United States Patent Application Publication US 2008/0114160 A1 - sequence listing, part 80

SEQ ID NO: 33830 - DNA, 1588 bp, Oryza sativa
agccccatgtgatagctaaatcattgacgtttagatgttggacttcgataacaggatcactagcgtcgggaaaaaaggtctaattttaaatatgtgcttttaagaatctatttacaaaataatttttaaaaggctcgaaacataatagaatccgacagtagtagggtaagtctggttgcttggctgggcttggcgttccatgacttctatccttgctgctacacgggaaaaatatacagtgcaaaccacatgacacatatgtagtggaaacctgaaagctatagttacataaaaaaatagacgtattcgtccacgtcattatgagtaaaattttgacccctaatgatggtagttctcgatgcaaaggtattcatacgtctattttttaatttgatggtagtttttgggtgtttactatatacgtaatttccggtgtatatttatactactctatgctgaatgctgaagtaaatgtgaaatggcaggcacaccagccactggacaaggaggtagggtcggcctcatctgcaactgatcaccggtcaccaccaccgttgggtaagtagcagcagcgtgtagtgggcaagtctcaaatacagtgatccttggtggccggtacaacattcttgatggcaaagtggttgctcacatacagtgatccataactagtgctttatttttgttgggaagtccaaatgatactcttttttgttgaatgaaaaatagggccaattggtttggagccggtttttttgtcataccaaaatttagtgccaaaatgttggtatgtttagtaccactagattgatagtatagaatttgtatagtatgtgtaaaaattgatagcaaacaaaacatccatataacattattgaagttgccaaatttttttggtaggacaaagcactataaaaaaattattttcccatacaatcaaaaccaattttcgcatgtggttgggtcgccgcctgctagggcagcgcacctgtccgcgaaaatccgccttctgcgggcggtaaattatgtcgcccaccctcggaaagaaaaatcgctaaaaccctatctagctcccatccacaggtgacattaacactatagtctgctatcgctcgtcaccgtcgttgccacagaggccccgcagctcatactcatcgtcgtcgccctgcccccatgccttcaccacctccaccgttgccccttctcaccccggtagcagcggcagcgtggatccgcctgtcacggggatgctcgacagcggaacccattgcggcgccacccgacggcggatcccgcctagaggggagttagctgccgaatcctcgtgggagaggagttgagagagaagggatcgactacagtcaccgtcgccgagcttgagcacgctgtcagctgctcgggagggggaggcgagggagagaggaggtgagaaatgagagagagaagagggggggggggggttgagagagataaggatgaggaagagaggaggtgaaagataaggatgagaacttataaaattttgaagatgtggaaaggaagagagaaggacggtcaaacttttcgtaggcggacctcttaatcggcctct

SEQ ID NO: 33831 - DNA, 697 bp, Oryza sativa
attccaaacttagctaaggtgttcggctggcatgtacccttgccgtgatggaacaactggtcacataaaaatccgtacacaaagtatagtgaatgaccgaatgagtgtagcaatgcattggagggaatattggattacataggatagtcaaacgaggaacctactgttctgttgaccacttgctacgcgagagaaagcagacgtcgcggccagaaaccaagtcaaacgaactgaaatttttgaaaatatttggattgttttgaccctgataacacccggctggagctgctcagctcggtctttgcttgctggcggcctaaattccatcaattcgtcccaggacaactggatcgacgggttgacttttcaatggaacacttgtatcaacctggtcgacaggatgtcgttactctactttttcatcaatcatctggtgacaattgactttttgtgtgagtgacagggtgcttgacctggtcgtagcccatagtaggccaactcagaatttttagtgggcttggttggacaagtgggccaaaagttgtagccctatataactaaaacggcccactagttagagccaaacccaatgcaggcaggaggcagccctcccctgaaccaaacatccgagatttttttttaataagttcactttaactcccttaactactcatcgaatctgattcgtattcttaaa

SEQ ID NO: 33832 - DNA, 560 bp, Oryza sativa
ttagtatctgacgttgagaggagtagaggacggtgcgggtgaccgacagcaactttctactatatgccaaacttctggaaataggaaaaagttactactcgcaggcaatcgagacccagttttgtaccagcttatacggagtagttctgaattgaacagaggctgcgtgttttgttgacagtttgaagagaaaataatggtgaattacagattactaacttgtaagctatctgtactagtgctactccacacagagatagcgtgttttgtttgacataactttaactcgcttatttttagttggattttcttatggccttttttttaggcttttaagtctttttttcaatgatctataagtcggtggataaagttttaagtttaagggtgaagttatacatctactttacattaaaaaaaacttctccaattagtttgtggcttaatagtgtaagagtgacttataagttataactttgaaaagccaaacgaaaaacctatttttttgctttggattataagtttaaacaaagagaacgttaacgctagaaatccttaaa

SEQ ID NO: 33833 - DNA, 647 bp, Oryza sativa
acaagtttagggaccttcgctgtactttttccttttaagagatgtttctttttcgaagcattagcgggcacaaggacctgtgcagtcgtgctgaccttgggtgaagcatttgacagaagaattgggaattgatcctatcatcaacgttttcagaggaaacgagtagccgagtactccctccatctcatagtaggtgacgttttcgattttttatttataacgtttgacaattcgttttatttaaaaaattagtgcaaatataaaaaaagataagtcatatgtaaagtacttttgataataaagcaaatgataaacaaaataaataataattccaaaattttttgaataagacgaatgatcaaacattgacaaacaaaaacttaaaaagacaagtaatatggaacggaggcagtaggtattaggtaaacaccgtttggtggaccgaatatacaggtagcagagccgagggttgaagagagcctaaaaacttgctctgggtgaacaatgggccaaccccttctgcttctttgatccgatgctacattccgacgtttccaaaaaaaaaaaaaatcatgacaacgttgcaaacgccatgagaaaagagaacatactaatagcatcaggcatcaattaaatataatcttata

SEQ ID NO: 33834 - DNA, 1309 bp, Oryza sativa
agaaattaaagccaatgcagtggcatacgagtaggagtattttagttaccatgcggcacaagaaattgttctgctcatgcacggtctgatgctgcatttcatacagaaaatccatatattaattcagctcaccactcatcagcaaaaaccacaactgcgactacaataagggagtagtgtaccatgcgacgcatatcctccagctgctggctcatgagctcatcctgcacacaagcacctcatgcagttaacacattctgtcatataaactctaattgtgaatttgtgagcaaagaaaaaaaaatcgtggaggacttgtatattccataaggatttgatgctgatctgcactaatcttctgccatatttaagcaagtgctagtaccttcctcgcatgaactttgctgagagatgattcaagctgcagctgcagctggctgagctcatccactgtggacacagatgacaggtcttctccagtttgcctccttaaactggcttcgagctggtcgatctcattccttagccttgtgatctccatgaccatttgctgcaaggcagcatcacacatgtagattagttgtagaaatgaagctttgagtgattaggaatttggtgtgggacatgcaattgcctttcaaatgtaaaaaagaaaaaaataacatgtgttagattcagttcgcttacctcatcatcacggtttgtctcctgaagccgagtgtttctggtggtgatctcataacggtgaaacagctccatcaagcttaacaaagcataatcaaatatgttacatccagaaacaatatggtattactagtacattggaccaatgaagtgaacttatacatgtaaaaggagtattagcttctagtagtactaatcgatgtggtcatgggcactgcttaattgaagaatgcactatgcagcaagcacaagtcctataggaatagatcctgaaatcaaaatttcaggatgccagaaaagattaaatcagaaagaaaagcaagctctagaacatgaaccatcgaaagatttctagtgataatgttgaatgcaaggaaagcgatcccaatttcccaaatccactaccaatcatgaagaacactacccatttgatcgggatgttaatcgacagtacccccaaacatttatctggaatgctgagtgaaatatcaactgcaacaaataaatgcaatgctaaatttctgaatcatcgcacacaccaccaatcaccacaaagaactgaaaactcagctaaggcatgcagatatatagaaatcaagattagaaatcagcacacgggctgcag

SEQ ID NO: 33835 - DNA, 1116 bp, Oryza sativa
gtgtgtttgttacattttgtagttttattagtccgatttactccctccgttccaaaatataacaaattttatctcttagaatttattctaaaatataacttctctccaatattttcttctaactaattacaaccctccgtcattcatttttctcacctatctccactacttatccgatcacaaccctacatcattcacttctaactattttcttaataactgtgtccaactttaaaatttttatattctgtaatggagggagtaattaattaattaattgggtccggtttgatcttgattccactaaatgaaggcatttcctctttcttcgcaatataatactggtaatctgtcgtaatctttgaagaaagggagcaacaaaacaaacacaccagtacactactgattgttattctgaagtagtattattggtgcttaagggcccctttgaatcacaggaatgaagaaaacggaggaataggaaaaacataggattctgacaggaatgtaagtgtgaaacagaggattgcaaaacacaggaaaaatataggaatgaccatttgattggaccacaggaaaaacacaggaatttaaggagagataaaaactcaaaggatttcttctatgaggttctacatcttattaaaattcctccaaaacttgtacgggaagaggcattccataggaatttcataggattccatagggttcattcctttgattcaaaggactttgtaggaaacatttctatagaaatgaaatcctctaaaattcctataaattttctttgaaggggcctaaagaatgattaagctatcttccggtgcataaaggacgcggcacctgatgccaatggccaaaagcggacgaagaatcttattttggtagggatgatcaaaagagtttgaattgacagctggttgtcgagaaaggacgtgcactaaaaacgcacgccctgaaaccacactacatctcaaccacacgaacacaagctacaaaaaaagggacccaagcatcgaaacgactaatgctatttgagaccggacactgctagacttacaacaacaccataggacggaaactctaaaaacaacgtcttcattaaggtgcgacgtg

SEQ ID NO: 33836 - DNA, 703 bp, Oryza sativa
acttctactattagggtaaatattgttatggccaatatttttttaaccattacaaactattttcatgccattgaaaatctataatatttatgccaattgaaatttacaggggggataagatcagattaacattgtgggggcaattggctcgattttttagcgaagatgtaattggcaaccaaacagttgtcattgttacatcaacaacagtgcaagaatatataggtaataacacaaactatggaaatcagattgttctttttatttatataatataaactaactaataaccatgattatataggtttatctctaaggtcaagcagtgccacgagaatatatacaaatctacacatacgtgagacatggacacttattgacaggtatatgttattttaatactgatttttagtaacataatacaaatccttctttgattcaaatatttatgcctcatagacaattctccgaagaaacaataccaaaaatgatggaagtagataagagcacacaaggaacaagggaggagcaaatgttctacaacagaaaaacactcaaggatataacagaaatgcggcatggcaacccaggaagtcaggtaattcctacataaattttatcttaatatacttggcaattatatatatccttaaaaaatttcataaattgcaggaatttgtgtttacatcaaaagttacgattg

SEQ ID NO: 33837 - DNA, 1065 bp, Oryza sativa
tatttttttaagcaaatttgattttttaagcaaatttgattagctattttaaaaaaatagattaatttgattttttaagcaactttcgtatagaaactttttgcaaaaaacgtatcgtttagtagtttgaaaagcgtgcgtgtggaaaacgagggagatgggctgggaacatagggatgcaaacacagcctatgaaatggaggagagagtactcaagggaaaaaaaaactagataaactcaggttgtagacttgtcgtacttcaccttggccgttcccaacttccatcttttacttccatccccttccctctgcactgcagcaacgcctgcgtggtttttctttgttttttccaacagaaattaatccggcttatatttttctcctgtgaataaaaaaaaaaccagaatctcgaagaaccgaagaaaaccaaaccgaaccgaagagtgcgtgagccattacgtcgtctacctcgcgccgctcacctctcgccgtcgtcgaagccacacgcgcgccacaatttcttttaatcctcggtgagacgagagcacgagacccatccccatcgatcccacatccacggcgctgacttctccagctccactccacgtctcccagcacgaggggaggagaagaatcaaatcaaatcaatcagtcgcaatcgaggggaatcccacaattctggacaatccgagaccctcccgctccgctggattccccgcctccccttcttggattgggctcagctgggatgattggattgccggtcgcggtttgagctgaggagattcttgcatcgagggggggagggatggaggtgagcaaggaggagttcttgaggcagttcggtggcgactatggctacccgggcgcgcccaagggcgtcgacgagatgcgcgccgccgagttcaagcggcttgaaggtgcgcctaatctcgaccttgtcgattccctttttgccaaattctgggaggaaaaatggaattctattagtgttttgtgagaacaaaaggatggataggaacttgtggcgttcggtcagatgaccgcgtttcttgctgtaact

SEQ ID NO: 33838 - DNA, 1639 bp, Oryza sativa
gagagagagaatagagagaggggaagaaagtatgacaggtgggtcccatattttttattaaatagaatgctgactggactgccatgcgtacgtcacgtagataaaatccaccgttgattgaaccgagggaggtaattcatctggtttgcatagttgggggtgaagaatatccggttttgtggttcaggaggtaattcgtactttttccggttggagatatgcatgatggttttgaataggaagtaatagtaaactaagggcattatgatgggctggatggaaattctgctgaaatgtttgacgaatacttgctgtctgacgtccgatacaatcacaaatattgaacgcctccactcaatgttagtagtacatgtgttacgcggtgattattttttcttgtgctcaggtgcacctacgggtgatgtatacgcttataacaactttattttaaaactttaaacaacttttttttttctattttacttatcttgtcaataatttgatcgtactattggatttgttacaattaaatctttacaacaagatctcactcaattatattctggttattttttaaaacttattctttaatgttgcgcatagttttactcagttgtttcaataagtatttcttagtgtttcactattccatttataaatgttacacatttttttcacacggtctaaaaaatgttttagcaaattaattattcttgtgaatatattatgtttcacatgactttttttaatgtttcactagttaggactaaacgtttcatgcagtgattgtcgatgttgcagtcagtattatcgaaatgttgcatctctttgaaacacatttaattacatgatgaaacaattttaatataaggggtgaaacaacgctcattttttttatcaaaatataaccatatgagatcttgttgcaaagatttaattataatgattacaatgatataattatatcgtagattggattgataaattattagataaaactatttataacttggtaaataagtatatataccaagaggtagtgagagagagagttgttagagaggcgtccgattttagtgctgtccgacgcgtaggcgtccccgaaatgtttgatcgtcgatgttagggagatatatggatggatcgataacagttgggcaggagaaagaaagcggcggtggtaagctacagtgggttggtactacgtgctcccgtatccgattcagccttattactgtgtttatatatacatacaccaacaaggaaggaagcctcaactgaacaaacatcaacaagaaaggaaggaaaagtgtcaggttgcgatgaagcggcggaaaatccccaaccgacagcgacggagcagcagcttgggcagatttacgtgttatcacggcggcggcgacgacgacaaccgatgcaaccacacgtggtacgacgaggcggcgcgccggcttcccctggacgacatcccggagctcgctgactgcctcggcgaggccggatgctgcttgggcctcgccgaccccgtcaccaacatcatcctcaccaccatcttaatcaccattactacatgtcagattctcgcaagaagtcctacgggtttagtatgtccacacctcattcagaggcctcctcgcct

SEQ ID NO: 33839 - DNA, 500 bp, Oryza sativa
aaatacaatttagaagtagttaaaattcggaattaaagaataaggaatattagaagagaagactagagtccttacagaaatacaattaagaaataactgaaattcggaattaaaaaataaggaatattagaagtggagtatagagtccataaagaaatacaattaggaaataactgaaattcggaattaaaaataagtaatattagaagtggagtatagagtccatatataaatataattaggaaaattactgaaattcggaattaaaaataaggaatattagaagtagagtatagagtccatatagaaataaaattaggaaataactgaaattcggaattaaaaataaggaatattagaagtagagtatagagtccatatagaaatacaattaggaaataatataaatttagaattaaaaataaggaatattagaagtagagtatatagtccatatagaaatacaattaagaaaaaaaatagaaattcggatttaaaaa

SEQ ID NO: 33840 - DNA, 681 bp, Oryza sativa
gtccgcgccgccgccgccgccgccggcaagccgatctcggagcatgaggcgatcgaacacctctggtccaggcaatgcgacctcaccgaaattcttcagaacagcagcagagagaagaagagaaacccctacgccgccgccggcgaggcttccgatcacccccagagcgccatgatcgggtcattcctcgtctccctctccggcgagaacctcgactgcctgcgccaatggctgaaacccgcgcgagatttcggttcctccggctgcgtgatctctgacgttgattgggagaagctgaacacgatgatccacggacatcagccaatccgaggactgaaaagaaagagatcatcatctgaaaacccactgaatacacaagccctgtcagaaatatcaacggtgagatcagcctttgtgaagcgagagaagtttcttcttgccaagtttgaagaattgctaggcacctattgcagacaacatccttgggtaatcaaattgggaacaaatttgaactcctgctcaaattttcgattgcttatttgactaacttttctttttcatccactggattgtgaacttgtgattgctgctgcaggaacgagctttgttctggtccagaagttggtacctccaggtactggtaccacaggtaccaaacgaaatccggccgttcaataaact

SEQ ID NO: 33841 - DNA, 784 bp, Oryza sativa
agctgaatatgcgctccacaactctgtagaaacgtgtgctccctagttttcatggaatcatgggaaagaaagaagtgatgatttggtttgtgttaaactgttaatgctaacttttacaatgtaggtttgattttaagtcagtaagaagatttaatgggctattgaatagaagggaaaatctgtgaatctttccatggaaagatttcaaggttttgctatcatctaaagaatgggtgatcaaactaagcattagttatgctttactggcgttggaaatgatatacggaattcttgtgttatgtactgtacgtacatagaagaaaagaataactcttttgctcaactctatcattttttccccaaaaaggttggtctctaaaaatcatatcaaataatgacgtcttattggtgtttgtttctgataaagatgattttgaagttttgttgagtcagatattttgtttgtctttataggattgcttttatgttatagttactaccaagctaacacaagtaggttagttcaggcatgtatgacttgatgtacccactattctcacctagatatagcatatcaagttggaaccttttggacttattctgttccattaggcacgtggagtgatcattaatcttcctttttgcaacaaatgtgcccttattagactttgttatatttaatgaatcaaacaattggtattggtactatatgaactatgttgctgacctagccattggatgtggtgtattggtgttcaggcttgttttacatactgattataat

SEQ ID NO: 33842 - DNA, 1364 bp, Oryza sativa
ccgcccagcggccgccctgcatagagagagagagagagagaggaggaaccgaggaagaccgaccggcctgcacagaagagaagagagggagagatatgccctcatcgtttggcttttcttttaataagccaaaacggcttattagagaataaaaataaatttgtaggtaaaacttttatatatgtgttctcggtgacttaaaagccaatgctgaaaaagaaactacgttgaaaatatctcaaaatcaatgtcaaaattaagtttgaaaattcaaaatttggctttttctttggctgaataggccatccgatgggagccatagatgactcagcctaacatgtagggtccacatgggtccatgctgactcagccgccacgtaggataaaaccggggtcaaaaccaccgaagaatctactgtgaccagttttaattagttgagggatgttcggtatctagttttaccggtatctggttttgcggttgagggacgattttgtaactcgatgacaagttgagggaccttcggtgtactttttccaagagatattctccaatagaatattcttctcctctgatcccacgaggaacgttctctagattgcttaaaaaccatccaaactgttatgaaaaattctaaagaaatttgaaaacgcttatacaatatatttatacaactccacaaaatcctaggtctaaactcaactcgcacgtcaagataaaaaaaagataaaaaagacaaatttaacgtatgaatagcaatgtactattcacatctaaatttatctttttttctcaacgtgtaggttgaatttggacatgatttttggtaaagcgatagatattattataccctatattgctaaaaaaatcataattgtttactactatttgtataaaatttaaaagaaaaggtacacgagaggatataatcccgaaggattagaatccactcccctctcattttcgctttttttttagaattggtccagaaattaagggtcatttctgtacgaaaacgtaaaaataacttaaagttacattaagtggttaggtcgtcatatcgtcctaatgaaattattgcgtactccctccgtcaaaaaaaaaacaaactctggtttccgtgtccaacgtttgaccgttcgtcttatttgaaaaaaatataaaaaaaattaagaagataagtcacgcataaaatattaatcatgttttatcatctaacaaatatgaaaatactaattataaaaaaaattcatataagacgaatagtcaaacgtcagtacggaaactcagggtttgcctttttttaggacggagggagtactggttgggtcatcataacaactcattcccactggctgcagga

SEQ ID NO: 33843 - DNA, 1140 bp, Oryza sativa
  unsure (1)..(1140): unsure at all n locations
ccatgttgaattgggctaaactgtgtaggttaccagtttgcctctgacagcttgaagagatattggaaaaagtacaccgaaggtccctcaacttgtcatcgagatacaaaatcgtnccccaaccacaaaaccaaatatgtgactatccctaanttacaaaaccgtgggactacctatacatttgttgacaagtttttctccaaaaatttgacagatgtaattatagtacaatcgtagtgtaattacactgggacttatatgtaatcacactgtgacttacatgtaatgcagggaacttatctgtaaataccacatatttctgaatgccttgaccaattacaagatttgttgtggcgaggaacaataccaatcatgacgcacatgtgtgaaaaaaaattgctaccacaacgtccattcaccagaaataacatgttacagacagatttttgaaagttagatataagttacaccatagttacagtgtaattacatgcaagttacagtataattacactacgattgtactgtaattacatctgtcaaatttggggggaaaaatttatcgacaaatatatagcaaaatcagaaaccgtttactctaggtccttcggtggttttgaccctggttttatccgacatggcggctgagtcagcgtgggacccgtgtgagcccccacatgtcatactgtccacgtcagctttctctttccctcttctctcccttcctcctcctcctcctcctctctctctcttctctcttggcatggcgtgcatcgggtggggaggagaccgcgccgctcgcccacgccgcccgcgccgctcgcactcgccggccgagtccggccgtgccgctcgccctcgccagcgccatgtcaactttcagctgtcggcgagtctgccgagatgagcggcggctggccctctgcagcacggggccatctctctaccgccggatgcactcaaggacaacgcccccgctgcccctaccgtcgacaagctcggccgcgcgcccgtcggcggccggcgcggttgggctccatgccacgggaagctcgaccaccaccatggccccggcacatcgccacacggcttgctgcgctctgcggtcgacaccggccgccatgttatggggcatctcgt

SEQ ID NO: 33844 - DNA, 647 bp, Oryza sativa
catggccactgaactaaaatacgaggaggattacaagctagggaaaaaaccagagcaagaaaaggaaaaaaagagagaaaaaaacagagcagagaggcaagaagaagcgcacggccacgagcctgcgcatctcacactcaacacgcccggaccggactcgcaaaaggagaagaagcagcagcagcagcaagcgagaggagaggacagaatccaatttccgattttattttttagtaaatagtttcctcgtcttcctcctcctccacctgacctccccgacgcttcccgtccccaaccctctcctcccccctctccaaaccctaaccctaaacccctcccccccactcccgttctgtcaatcttgtcatcgtcctcaccgccgccgaccggggctgcctccctcccgtctccggattcggattcttcaagcttgcctgccggattcgattctgatggcttcggggtgaccgcccgcgaggagggaccaagcgtagatggcattgggggatctcatggcctccaggctcgttcactactgcttcttcttcttcggcgtgccatgcgacggcctgcccaatcaccataccaaccacctcgttgatgaccaccttccccgtggagaatggaccggaccccatgatggacgt

SEQ ID NO: 33845 - DNA, 656 bp, Oryza sativa
tcttttaagaagggtgcatttttatgcaatttcttccacttatacgggaccatttgccatcagctgctgaagaaattgaatcagatattatttcgctggcacaatcgaaaggtctgtaacttttccttcagatgttcaaaaaaaaatctgaaatttcgattgtaacttttactttagaaattgtggattttggttgcctttccatctattaattcatagttgagccagctaaggctaaaatatgctattcttggaggtgttgaattcagttctgtattgactatggagaaggaagtaggatgtgattagtgtgaaataaattctgccactcctgtgctaacgcaagattgaacagaccaatgattttctttatgggttacaacctttagtgtgaggagacatatttttcgctcttcatttgtcattcataccaatgtcatgaatgtttgaatcatgaattagttatgtgcataaggctcaaacatagcgagaacttttgctccagcactagttttgatgggcatgttttttctgatgagcagattcagatgtttatgacatatatactgtcaaagaggtggatgatgatacaacaatggagggcacatcttcagctccatacccactgtaatctgattgacatgtgtttactatgg

SEQ ID NO: 33846 - DNA, 542 bp, Oryza sativa
actcgagaaaaggttgttgtcggtgacatgggaccgggagtatcatgactagaggcttgggcaggagcaatcacccacgaggcctgaccccctcgggggggtcgggcccgagggtgatgtggccgcccccccctctctttgtctccccgaggggtcggactgctcccatttcggccccgagggctgaggcgccccgaccccttgtaggttttgcgccgcgtgtatgggttaggtgagcacagcggggctcacctaaccgcattaattgcggtttggacgagcgcgtcacgccgcatgtaacgcagtgcagcgcgctcgtttatccggtctgtgaccagtctcagaccggtcagatcgtggattaggtggcgacaggcggtatgacacacgcctcgccccatcccgtcaagatgagtgcctccaagcactcgtccctagccggagccggcgtgttacctcctgaagatggcacgttggtcccggtcagatatatgccaggcttcatcctaaccattagaggcaagatattgtatgaagaaggg

SEQ ID NO: 33847 - DNA, 736 bp, Oryza sativa
tcatataatagttaatagtatgtagtatgttttctcattatattatttgaatatattaaaatgataacataattttaaattttgcaataactttacaaaactactaatgtgtaatattcatattgtattttatatacgtgttagttattaattatttttaatatcaaattttagttatttgtaaattatatatattgacttgttttttaatattttttttaattccgaattttctgtaaattgtatttttatatagactctatgctattcttctaatattatttatttttatttctgaatttttattatttctaattgtatttctatgtggactctaaactaatttttaatttcaaatttcagttacttctaaattgtatttctatattgactttaaacttcttcttcccatgtttttcttaattttgaattttagttatttataaattgtatttttatacggactctaaactctagttttaattttattatgtttattccaaattttagttagttttaaattcctatatggactctatactttacttctaatattccttattttttaattccgaatttctaatttttcttaattggatttctatatggactctatactctacttctaatattccttatttttaatttcaaatttctattatttcctaattggatttctatatggactctatactctacttctaatactctttatttttaattccgaatttcagtt

SEQ ID NO: 33848 - DNA, 1089 bp, Oryza sativa
ggattaccgactacatccaaactcgggaaggattctgatgcggccaagtcttgtcccaccgacataaatcacgggccgacaaagatgacttccgaagctatcaggtcttggtgtcctatccacaaaaccaagaaacatacccttcaagattgctgggtattcatcaacgtccgtgctgaaattcgcgcctgcaaagaacgtggaattcaatgtatttctccgactcgggatgtctattgtcctatccacaagacaaagaatcacgatctctcgagctgcaaagtctcctcggcgccatgaaaaccccgtctcctaagtcatacgtccccgctagggataacggcaaggaacagggagcgactccagcctcagatcgattcgttggggtaatcgatctcgatcctcacgaaccatcggtcttacatcccctcgaagactacgggtcatcgacaacaagtgcgccgcgggaggtattagttatcgatgacgttggcacgtcagcgcaagccaacgcagaagcggcgaatcaatcgactactctagtccagcacatcagggctattcaagctatactgagggaaactccttacgatcccgttctgaacgacgacctcgagcgttggacagaatgattacgggagtcggtgactaacctcagcaatgcgttcaaagaggctgctaccgcagcacaccaagatcagccaccaatcggcgacgccaatggtgaagatccggagcggagggaattgcctcgacaggctacccctccacctcgtggcactggcgatcttcgagatcaaattaacaatcgccgagaagcacggcgcacacgggacgacgcaaatcgctctcggcgtcatgtttcttcatggcgccatgatcgaggaaaccgcccaaacgaggaccgagaatgcaacgatcgcgaacggcgggggccagacaatactagtcatggccgtcgccgcaacgacgacgacgaaggagatcggcgccgagataacaacgagagacaacaacaagattctcgggatccaggtcatcatcctcgtaatcgtacgccggagccaagcgacccatcgtcatcgtcat

SEQ ID NO: 33849 - DNA, 724 bp, Oryza sativa
tccccacttgtggcatgatcgaccaatgcagcgtttacactctaaacccctcccctcgtttttcacgtgtatgtttttcaaactgctaagcagtgcttttttttaaaaaaagtttttatataaaagttgcttaaaaaatcaaattaatacttaattaatcacgtgtgcggtccattttccatgtacactgtttgggtcgggaaaaagagtgtcgaacacagctatgtatgtatggattgagatgtacaacagcactggcaagaagtcaagaacaacccacgacttttcgaacacacgagcgaattattcgccgttgctctagtaatctaatactccatattaatatccctccacaccgtaacgacaaaaatatttttgtaattagcttagaggggtttctaggtccatcaaaaagatgattataattagagctagtttgtatgttggtcaatttaacattgttgtaatgataaagttttaatggtaaataactatctaaccctatacagcttatcttcatgtcttcctactggctccacttttgatttacgatgttaccacagaagagcatgatactatgcacaatggtgcttgtcagggttacgggtcaggcatatcccctacccttcgatatacgatacgtatcgacatggcatacccacgcgcatgcggatatttcctttatgatctaaggaaacctttcacgaaatcaatatacgggaaa

SEQ ID NO: 33850 - DNA, 698 bp, Oryza sativa
aactattttatactagttacatgcccgtgctagcgctacggcgaaacaacaaaaagatatacaatatattgtttgggctatcaagtatagattcaagacattaattaagacttacatatgagcgagtttagttaagaagcttattagaagttcctcagttattatatactcgaaagggataaacaagccaaataaactacatccaggacaaggttcaaaatttgcaaaacaagccataaggtcgacccattcagtcgacgatgtatatgtcttcaacgtcttttctccatgtcacagaaaaaccagtaagcaaagaacaaaagtctgattgatatattaagttctaaaccgattccaggacacattcagtcaattcagttcaaatacataatcatgcgtttcaacattaattaaagtatcacattcatatatcagtacatggcttggcaaaccacaaagctgaggctgccttaatctaagctacaacaaaatttcttttttttttgcattttagaataaacagtaaaagagaatggataaatcacatgtcctgaagctgtaaatttctacgaagtcctgagcagctcaattttggagagggtagtagtgttgttccctttatggttcatctgatgcatgaagaaggcaagttcaatttctggttcagtaactcttgttgttcctactgcttccaggaa

SEQ ID NO: 33851 - DNA, 991 bp, Oryza sativa
cagattgagatatcaatctagaaagaaaaaatcaatccaatcaaaacaatcaaaagcaagaagccacccaagacccaggaaaacaagcaaagcctcatcactcaggtcggccaaaccctgatgctcatggagcccaactacgatcaatcagcaacccagctcacagatcggacgagatgatcggatgagcgagggaacttactagcttcgtcggatcaaaaggccactctcgccgcgccgcgccgcgcgacaggagggtctcgagttcagtactcacacttgctgtcggggctcgagctgatgagagcgaaggagagagaaaggccatctttcattccctttcctcttcccttttcttttggtttttaaattgggagaagaaattgtaaccaaacccctcaaaaagatgcctttttgctgtttttctatgacctatttccgtgggtcgaccaccaaactgatgaatatatttaaaaaatccaaaaatatcactgcctccttggagttgagttatcgtcaggcaggcacagtatttttcttcccagtgcttatctcactcaccgcacaagcaccatcacctttttctctcttttttttaaaaaaaatctgcttagtactgtactaattagattcttttttttttgcggttaaagaattcagaaataagataatttgagtttgggcggcgattttggtgtattttgtcctttcactgttctgaagatcttcaatgctcatcacccacttgcatctaccggtctgtctccatgccccttcccttctactactgtcgtactcggtacatcagcaatttcagcagtgagctcacagcaaaatgttgctacgtgcagtctgaccataaggtatattcaggatttcaggtgattcagaaatcgctgagtcatcagtggacatgaacgctttcagaccgatcgagctgtgctatcaaccgcattgattttgtgtggggagaagaagcttcaggcttaat

SEQ ID NO: 33852 - DNA, 700 bp, Oryza sativa
aatcaacaagagatagaacaaagaaaccgcaattaatcgctatgaatgatagccgatcggctaggtgctgatgacatatcatttatttcaagccgatgtcatgcgtacatcgatcggcaaatatcaataagcaattcagactaaatctactcgatcaactgtagacattaatgatatataatccttatatcagtatatacttaaatcaagtgattgggatagatcggtcgccttgccgagacagtataaatcacttagattgaaatatatattaatagtaggattatatacattcataacatagctgatcaggtaaatctagcatgtatcggctaatactccgataccactctatactaagatattaaagcaagtagaatataccaaacataagcttaatatacttagatgcaataaaatcttaacataaagggcagatttaacgtatcaatcaagcatataaaataaaattagttaaatcagataagatcggctgaaactccgatattaccctaattggcaaccagaaagcaggctagagattgcaattctaagcacgacttaatagatcaaactcaactgatgcagcattaagtatgaaaagaagaacaatatctagataatcaagccgctggaagttttatagagtggtagatatatcacataatctaagttaacgtcattgtataacctaatcggc

SEQ ID NO: 33853 - DNA, 955 bp, Oryza sativa
  unsure (1)..(955): unsure at all n locations
gtaggctagtatcggtctgaaattcatttcctattgatccccagtgagcagaaaagagcaggcaagtataggtcataaaaaataaagtgcatcggtgttctcccgaccattttagttttgcagcaaaagaaccagcgaccgcggctggggagatctgttcgggggagttgacaatgagatggtggccagcggccctgagtcccggcggcagaggtggagtacagacggacggcgaggcggcactgaaggaatagtgatcgctggtgacgacgacgcacgctacgacggcggctgctcggcggcagaggtgtagtatggacggacggcgaggcgacacagagggaatggtgatcgctggtgtctggtgacgacgacgcacgctacgacggcggctgcgagcggagaagggtagtcggcgatgaggggctcgaccccgccgcaactcctcccgagcggcacgaagggcggcggcgtgagaggggcggcggagcagcggcagcaggcgtgagaggggcggcggagcggcagcggcaggcatgataggggcggcggtgtgggcgtggcggcaggggcgggccgtttttagggcacgggtgcgggcgtgagaggaggcgctggtggggtcgtgagagggggaggcgcggggtgcggtgtcagtacgtctagattggttcaccatccctcctgcgtattttttaagtagtataaatattcgtagaaatatccataatttcttgaagtgtcacatggcggcttaagaatgctccacggatatgaaatcatgtgactaanaaaccatgtaattttttttacaaggttattaatgtttatgcggtggcttagtctactaattntaaattatgtagcaaaatcttacagtataataatatcaattttaacttcgcccggccctccggcgttagcactagccgttggatgctgctggccaacggcc

SEQ ID NO: 33854 - DNA, 712 bp, Oryza sativa
gaaaacagcatttaaaagtcacttagttgcccaaagccattttataagacgatcctagagctacacaatattattaatcaaggccgtgaaccctcacgaacctgccttaacccaagacctacgatgattcagaccgaactagcaacccgaccctgagtcccagctcgtcccaagccaacccaggccaaccattccacattttagttgttgagcaaattttaagaattaaaacactaacttgggtacattgctttgcttgcccataacagagggcgcggctattcgaatagattatactctgatcagaggtgtacatctttacccacaagacacatcttcctcacatgtgtcacgcccggaatttctatccaaaattccaaacgcttacatgtgtgtgaaccctcgtccaggaatcagccgaggcacacaataacaaattgataatagagtacaaatattactctaattaataagcgaataaaatgtcattacagaggtagatagttcctctcaatcaataaagttctaagcagcggaaaataaataaacggcgcagacggctccactccacaggcagcttgaccaaggctacacctaatcctccacaccatcagcctcattgtagaactcttcctctgatgaatgattgcaaggtgagtatatgacatactcagcaagccacgcagcaaatatgcaagtgcgggctgcagga

SEQ ID NO: 33855 - DNA, 1139 bp, Oryza sativa
gtccttaattgccatgggtgcgaccagcaaaaccatgcactcgcagcccgccattcagtgtattttaattaactaacaccattgcggtggcaccaatccaaagctatgctaatagacaaagtctatgtaataatgtgatacccatttgtgtactagttgaactaagcatggctaagcattttcctaaaccaacatctagtcattttgatacccaagttatcaatggcataaggtaaacaataaatggctgagtaataggacccatcccacatgacattgtaaaaggatgcaacatttaatagaaatgcgggatatttgtaaattgggtacaatatgatcaattgtaatgcatgacttgccttgctctcgcactgatgagacctcagcaacgtcttcgagaaaccgcggatcgacgaaacggccagtctacgcgacaaacaaagcacacaagcaaaacatgctataagactactgaaacaggaaacaaaaccatttttaatggattctagggatttttataaatttactgagacttgaatggatttaaacagagctcggatgaattagttatgattttcagaagataaactgtgtttttactataaaagaaaagccttattggtttattgcgcaatatatattcccagatgatgtcagcaggggggcgccgacatgcgggcctcactggcagcggctcaaagggggtggtccaccgtggaccaggtccacggggccggggtggtggtgtatcacgtggcgtcgacgtggcaccacgtggctggccacgcgggccatgggatggacggccacgatcgggcgagggccgatcgggcggttggggacgggcggcaccgaggccagcccgggcatggcgcacggtggcgaccggcgaccggccggcggcaacggccggcgacgcggacggcggcgcggtgcgacggcacgcatgcggggagcggcggcgcgcacgagagaggagaggaaggggaggaaaagggggtcctcaccgaaggggcgacagcgaccggtgcgggaggggaggagcggcggcgcaggaggcagtggcgaccggcgcggaagcggcggcagcgcacgggcgaagcggcggcgagcgtgcggggaggcggcgcatgcgggag

SEQ ID NO: 33856 - DNA, 738 bp, Oryza sativa
cctgctgctgtgcttatgctaaagcaacatgggcattcacaaggattaagtatgatgacttgtagaatctcctggtgcagccccacgataagagagaatagataacttgatagacataatgataggtggagttaaggtattgaaaagagaagtgtagtgaagtgtgtcacaaccgattccaagtgtcgaattctaattggttatgcataatttagataacatgaaaatgccagattgagatatttaaagtcaaagctgggatcgaacggtaccaaatttacagcaaatttttaacttaagtagcatgttgtatggaggataggaggagtcagcaagacccacaataaaaggtgctgaatgtttggggcaagatcatccaaagtagtagcttttgtgtctactttttcttttgtggagcacataggtgacaagggcacaacaactgctgaaataagatagtaatgtttttgagccggctacttgatctaggagtatctttgcaacgaaaagtcaatgattcagtggttcgtcagcataagctttttgcctagtactatgagataatgtcaaatgacatggctgattgatagaccaatcagtgtgagcgagcaacatgaaagatgttttgaaaccgcgtttgacagttgaggcaaagactgattgttacccaagttttgagagcgaaagcaacactaaattcaatgtagctgcagcatgtaaccaaccaaaatacagtaa

SEQ ID NO: 33857 - DNA, 570 bp, Oryza sativa
ggagttttctgaaaaacaaaattcatatataagatagctttgatgtgcacgttcatctttcacctactttttttttttgttgtactgcaatcttgagaggcctaggcagttggataacagagatatattaacaaggcacggaattatatttatatggacataagaagcacgtacgcataatcactttgttgaaaaatgttgcaaattaaaggctagaaatattgtctgctataacttttcccgttgcaatttgcactactaggaaaagcattatcgcaagcggccgaaaagggtcttcgcaggcggggcggccgtccgcctgtaagccaacgactatgaagatcgccgatcttcgcaggcggggaggccgtccgcctgcgaagataattttcgcagacggacgttggctagtccggtccgcctgcgaaaataggaatcgtccgcttgcaaaaaagaaaacttccgcctgcgaagataggtagaaaatattgaaatttaaatataatttggccgtaaattacttttaaattatttattagaaattcttgcaggtacatatattggaatatt

SEQ ID NO: 33858 - DNA, 775 bp, Oryza sativa
cataattcaaaggtaaagttatcgacccttgcatcaaatagcagaagtagctatcacccggagaccagggaagctaatatgaggcagttggtggcgagttagaagcaaatgacaagcatggtatcttagtaatgacgagctgatctcgacacatgacatgaagcgggtaacttgtatgaggttgactccaaagatatgaactatgcgaagttctggaactgaagccccatcttcaagtgccgcaacccagtcgaagtcagctaaaggttcaaccctggttcgagtcaggtgaaaagaagattccacctgcaacaggagatcgagccaagcagtccagagtggagaagctttgttaggcaagtttgttatagaaagcggagcggaagaagtcagacaagaagagaagaccgcccaacctatcttcatgctagcctcctcgaatctcggggacgagattcttgtaaggggggtggatttgtcacgtcctgataaattcatcccgaaataaaaatcattttctaaaaggaataatagaattaattaaaaattcgaaaagaaattggcaaaccctaaaatacgtacaagaaaaattcaaatgtggcccagagaatttttgttaaattctccttggtctaaaaggagccctcaaattttagtggaatttcagagcacgaataataattattaagaaataaacaatgttaaaataattttataaaaagaaaaaccctaaaaagtctttcccccccctttcccctcttgggccggctcggcc

SEQ ID NO: 33859 - DNA, 668 bp, Oryza sativa
  unsure (1)..(668): unsure at all n locations
tggtttggggtccggctatgtcggcgacgataccaaacagaagcattatccgtatccgtaccaaacaccaacactgcgaattatatatatatatatatatatatatatatatatatatatatatagatatatcttcctctacatctacacgacgtacacttggatactgcaggtagattagattagatgatcggccggccatggccaccttccgggaccacctcgccgtcatcgccgaggcgctctgcgcgatcgccgccgacatgaatgcggncgcccgcgccctcgacccctccaccgtcatcagactcgtctgcgccgccttcaccgtcgccatagtgctcgtctgctacgccgacatntggggncgcctcgacacgctacactcgcagacgcagacgccggcgggggaggacgaggacaataatgccacgccggcggaggctcctgctgcttctttccttaaaggaccgcaagcgctccagcaatggcaccgacacctctttcttctcggagtcgtcgtcgtcgtcttcgttttcatcaaccgagttctcgttcttcgtcttcgtcttcatcatccgagtcctccttcctcgtcgtcggatgatgacctagcgcggcgacgtcagcagagaaaccctttctcctccgcggagtacaagaggaag

SEQ ID NO: 33860 - DNA, 820 bp, Oryza sativa
  unsure (1)..(820): unsure at all n locations
cacagagaataaaatagaatagagtgcatcgagcgagaagagggcaaacaagatcaaggaatagtctgagtgaataggacaaattagatgatctagttagtagaggtaatggagggataaatgcacatcaagatagaggaaaagtgaaggaaggaacggaatgtacgcaaaaaaaaacagtggaaggtagtgcccattagtatattgtgaactataagagaaggcggcaagataatcttttatatttaaataaggagtagagaaaaagttaagtaagtcaatggtgaggattaaaagtaataaacaaagtaagtcgaataagcaggaggaaatatcttcgtgaagcaaaagaggaaagagtaggaagagcgatcaggagggaagaaagaacgaaagggcagcaaagaaagaacaacaccgagaggggaagaggcgaggaaagcaggcgcaagacgaaaaccaggtagaggaaagagcgacaacgccgacggcagcnangcncnannnagnnnnnnncngtcntgnngnnnnnnngcnncagccactctggcgccccaaaaaggaccattttttggataagtttttctaggggtctatttgcgaaataagtttttcaaaaggaccaaaacgtgaaaaatccagggcggttaggggtgaagctcttcggccagctcccagatggaggcctccgcctgaaggtacgattcttattaattacagatgctgctgtcttccagtcagtcaattcttttggtcagcgggctgtgcttgttcgctgctaatgagcgacactcggggtgtatccaacctgaaatggcag

SEQ ID NO: 33861 - DNA, 772 bp, Oryza sativa
tcctgcagcccttttgaaagtctctgaatctctggtgtacaagctaggacaaagcgttctcactctagctccctctcccccctccctggactcgaacctccttttatacttcaaggggttctcacatgcaccaggtgtgccgctcggtgaaaagggggggtaacaattccctatattaaatgtgtgtctgcgctacagcttggaagccacctaggcatcggctctcgtgcggggcccatcaaatcatgccggctgacgcaggccgacacggggaggatccccgtctaatgcactgtttttacttcctgtagtttgttagcagggctcctcacttgccaccagagctgtttctgctgaggtataatttccttaattctctctcaagtctaagagccttttctaatggggtttctctgttaattgtgtgtaatgtgttaaaatgcatcttgtgtttcttttcaaggaggtatggtgtttttcattgttctaacataatttatttccttctattcttgtacttttaagtcttcgtatgcatcacaagaagttattattgggagagatcatatatagaggcgatgtatctgtggataatgcagacacaattagctgtttgcacagtgacccggatgttgtttctgctgtatggactcttgttgacctctgtagctcatcgtctgtggcaaatgaagcttcatcggagcttgctgattttatttctaaggtgtgctttcagtctttattcttaatcgattggcatgctcctccatta

SEQ ID NO: 33862 - DNA, 1653 bp, Oryza sativa
cgttgcaatgcctcagtagcggcctcgctgttaaaggaggaagagagaggaagagaaagagatgagggcaatttggtcatgccatgtaaaaaagtaggccccttctcgcttagtcagcacaaaaatattaatttaatgaatgaagtgtcccctagcaaataaccacattttgagagtgtctttccccaaaagtgacttcgtgcggtgccctacagctaaaaccacaaagtcgtgatatcttgtagcaaaatttgccaaaaaaataattaatctaaacatataagttggccatagctgtatacagtatacgtaacatgtaacttgtttttgtttgtctgcaaatttaaatggcaaagtttcataattagttggagttgaaaattatattttgtatagctgatttgattaccttaggaacattacaaatggttgtccacaagcacgagcagggaaagtctcctactacagcatatctgacttaatcaattccctggaagaaacaatgcttttgatctgttcttcacacgtcttcctgaccaatttgttaaacaattcaataaaaataccttctttacctatatgcacactctttttctgctaaatattaattgctattgtatactagtagtgcactatacttactttatactccatcatgcagataacccatgagccagtactggtgttttactactctgatctaccagctatttggttccttgatgtgaatgtaaactggaaggagcaatgcaagaagcttccttttcattgccaatggcactggttgaacatgctcttgtcttcctgtagaagtgttgctggcatttgtgatttctgtacttgattttactgataaaaagtgtggatcatgcaatttattgataggggcaatgtttgccggttgaaaaaaatgagatgtgatttgttaattgtgatcgttcgggattacaatttaaacagataatatgctttcagagaggagatcgggtaggttacatcaaaaggaattattctcttgtcatgaaaattggaattaaaatgtacgtagaatcgtgtgttcagctggtagaaaatgctaccagataactgatgcaacagaaacagtagagtttcaagagctattagtctaagaataattgatattgtgcaagaacgtgattgtccctgatgaatttcaaaaaagaatttttaaagcacctccagagcttcacactgccaagaagctctctctgtatcagatgtggcacatctagcttgattagaaactagaaaggttaactccaagcagcagatctgcaacacccgccaaggaatattttgatggaatattttgcttgcttatttgcactcttggaattaattgataaaggaaacaagctatgggcctaatcggcccatataacatctgactattacggtccaacgccagaaataggaataagttcatctgaggtcccttgactttacaccaaatccgattttcgtccctcgatcggaaaaccagacacaacgggtccctcaactatcacaaccgatgcagatcaggtccctcggcggttttaagggcggttttggctaatgtggcgcatacgtggctaatttgactcagtcttcgttcgacatggcattgacgcggcgcttacgtggcaattc

SEQ ID NO: 33863 - DNA, 725 bp, Oryza sativa
cacttctcctggtcgtcaccatctgaaaaccccacacggaaccagcaaacagagagagctgacaattaaaactaaccacccacgactaccataattcttgagtttaatactgctattaaattggttcattaaggttcaaattgcttaggcaaataaaataaagacaggctccgacatagttataccacacaccggcataaccatgccccatacgactctagcaaaacaaacaaacgaaaagaacacacgcgcaagcctactaactgctcgtctaccgctgcgacgggccaggacggaaggtgagcagcagcgcatcctccgtgctccctacgccggaggcttccccctcctgaggaaccacgggcgcgggctcggcacgaggggtctccacgaagcaggtccacgccagggactgacaaacaagctcgggcctggaggtactcttgcgagcggtgatcttctggctgcggcagacgcggcggcgcttgggacgacagacctctccctgggcgaccttgagctgacagagctgcgcctccagcacgtccagatccttcttcagctgcagattctcctgacgcagctccaggatcttcatgttgttatcgaccatcccgcggcgcaccatctggtggaagtcgatacgggccgcgtcgtacgcctccaccatgcgcgccaggtgcatgatggtagcgtcatcctccgagctagcatcccggaaggtg

SEQ ID NO: 33864 - DNA, 690 bp, Oryza sativa
caaactccaaaagagaaccaaaaaaaaaagagtaagcacctgttgcaactgtcataaacacaaataacatactccctctgtcccaaaaagactcaattcctgggtttttgtgtacaatgtttaactgtccgtcttatatgaaatttttttatgattagtatttttattgttgttagatgataaaacatgattaatactttatgtgtgacttatacttttaaattttttcataatttttttaaataagacggacagtcaaacgttggacacggaaacctagaaattgagtcttttggggacggagggagtacaagagcatttgacaactggcacaccaaagaagaggcacatgctaaaaataattcaaaagtcatgtatgcaactctgcaagagcatgttaatgggaaccaggcactagggctgataaagaaatatcaccaataaccttaaaaaaaaactgtccccgttacataattctgatgatatctcaaaaagaaaaggatttcaaattgtattaccaagtacagtacctccagcaagttcatgtcaggttgtgtgaactatgggactatttattagcaagtatgttgcagcagttttctcatcttaaaccacaagccagggacaaaaactaccgtcacatttacaaaatgcgtgttgcttttaggaaacttatttgaagcaatatat

SEQ ID NO: 33865 - DNA, 1284 bp, Oryza sativa
gatcatctccaagagtaataagcaccgagatgacagcccacgagatattccaagtactcacccaagatcctagtcttcacacctctccaaatcttcttctctccctctcaatctcactttctcacaagaattaggctctagattgagtggagaaggcaagaaacacttgggagaggctagcaacagctctaggttcgaaaagtgaaagtggaatggccaaagaacgagctggaaacgagctggttatgtataacagctaggtgacgtcatctagccgttactcataattttgaactggaaactagacaggaagttccggatgaactggaaactagacaggaagttccggacctggaagacaggaacttccggactacacttaggaaaatctttttctcaagaccggaacttccggacctggaagacaggaagttccggacttgcatttttggacatattgagtatttgcaaaaataactcctagggaaacttgacacttggttcacactaagagcacttgacatatctaagagtatcacctggaacccctcttaatagtacggtttttcctaaaaactcgattgcaataaataaactatcctatgcacttctcgagttccggtccgctttgattttatacttttgggggggtctccaagcatccatcttccacaccttggactaatacacctgaaagtaactcaatgaactcattagtcccttaaccacatttgtcattaatcaccaaaacccactaggggaattaatgcactttcaaccacaagccagcgtgggcaacggctgggcttgtagtatagcttttctctagctgacgctcctaggcaagggtgggcgtgatggagcggggtgggccctgcgacggcctctgtcgcttccggattcacctaggcaccatagggaactgtccgttgcccgctggggacgggggtgaaacccgaggtgtggtgtgcttggctagagagggttatgcgaagggtcctgtcacagcctctttccggtatgtcgtggtggcatgtcggcgcacggtaacgtgtcgtgaggctgtgtcttgtgggtacagttgtacacctctgatcagagtaaaactattcgaatagccgtgcccgcggttatgggcggtcaaccagattcaccgtgattagtctcaccctagcttagtctaatggaattgattagttcaggtggtgggttgggcctgttgcaacgtggtgtagcgttggacagtggatggttactattaattaattacttacaactatttta

SEQ ID NO: 33866 - DNA, 555 bp, Oryza sativa
tttggatgattttcttaagtttggggttagacttgtttgatgtacagggcaaaaaccgcgattcaaatctgggccggatcactagtatagattgcggcccagactgcatatggactaaaaatccttccaaaaaaaaaaaaaacagcacgagctgcgctatcttggtttggttcaaacagcacgatgattttagtggctttgttggcgcgagttgggtggtttcccgcgctcgtagcgtggcaatgttgcagcgtgacgagtcaaccaaaaatagcttgggggtctcgaatcgtaccgcactttagccgcaaacggccgaccgactcgactcctccctccatttcgactcggggctccggccggcctcttcttcttccggtgagccaccgacaattcgattcttacatttcgtgagcgatcgattgatttcgtgttgtaatcttgcgtgatcgatcatggtgtgtcaattaatggcaagggcgtggtcatggagccccagcccggctcgccggaaaccgccaatctgcccacgcctatggtgctagagccgccgcc

SEQ ID NO: 33867 - DNA, 570 bp, Oryza sativa
catatagttaattaattaactagcatttctaattaactaatttgtcttcattttaatttgatcgaacccatcacgttgccattgcatgcgccggccatacatgcatgtatatatacttatacatatgcttcattattaaaaaaaatatatacatatgcttgtacacgtcatgactatctatctctatctctatctatatatctatatcctcgtcagttattttgtttcatctagctaccttttccagatgtgcggacaccagtacatgcatcgtgcttatattttataattacttttctacaaaagaaaacgcatatgcacatatatatactatacgcgcacatgatacatgcatacatgcagctagccatggatatatccggccggtctcctggtgtagtatagcatttgaattaatggatagagctagtgatatattgctcgatccctaatcatatccgaaaatgcatacgctcatatacttatcgctattatgaacatacatatctacttatcgctatcggtgttttcgagaaactagagcgatatatcttaagattatcgaagtca

SEQ ID NO: 33868 - DNA, 571 bp, Oryza sativa
ggacggatggagtaataataattaatcaaaagatacatatactatttgatagaggtagcgcgagagctagctagtaggcctttagagaagaagtgatggatggattagatgcgcttaaagctacgtacgacatatttgatggaacttttggaggtgatcgagtacatttttcctttccctttttattgtttgcctttttctctttattttccctttcctttctcccgatacctttcgatgttacctttcatttctttaattaagatcgatgcatgcatggctctggctctccatatgaatatatgatctctagctcatctttatatacagtacatatgtctctcctttttatactgatgtgatcgatgtatgttaagggtgggtttagttggggaaaagaaaatttttgggtgtcacatcagacgtttgaccgaatgtcggaagtgtttttggacacaaatgaaaaaactaatttcagaactcgtctggaaaccgcgagacgaatctttcgagcctacttaagccgtcattagcacacgtgggttactgtagcacttatggctaatcatgg

SEQ ID NO: 33869 - DNA, 695 bp, Oryza sativa
ttaaaatggtcattgcccatgtgtacttgagttggcctctatgtagaagatatcagtttagtgagcacaaatttctgaatggttgtaatagtgaccttatctatatatctacatttgatagaaggtgtgataatatcttcctgtctctatacatgggactgtagtaaaaagggcagcaagctaggtagctgcagtgggcttccgcctgagcttgttgaaggtgggtctcagaggttggcttgcgctgggttcaaatggcagcaatggcttcttgatctgtgttccggctccaatgctggacgctggtggtggtggagttgtgttgctgttgccggtgcgtgtgctggtggtagccctctgcttctttgccctgggagcttccagcctctccagaatcctgcttgtcttgtcgtccaggcccagcggtttcactggggacggcagcttggggttggccctagaagtagaacatgtgacggcactggtgaagtcgtcgtcgatgatgataagctgttcccactcctcggtgatgctgggcctgggcgacgccttctcctttgacgctgcctgtggctcgctgaagctgaacgattggatatctccaccctcctccctacacagcctcagcaccttgttttcctctggaccccggaatgtcaatatttgtggttcactcaacgaatcaagatgatgag

SEQ ID NO: 33870 - DNA, 504 bp, Oryza sativa
attgatttgttggtttccttgatgtaaaaagcttccatccgctcgcattacctttgttccttttgtcatgcatgatcaaggtctgtatatctcataataatctggtagatagatgataccagtgataataacaaattaagtaattaatatctgactcgattttcttaatttctctcttgatcagaagcagcagtactgatcagttaagctcatatgagcttgaatcactccaatcagttgaaagtcagctggcagctgctgctcctccgacattaagcccccatctgcaggctcatcaactcagcacggtgctaatgatgcaggagctagggttccaatggagcagctgcgctgcgccagcagatcaacatagtattgcaagctccacgaataataatagtaatgtgatgatgaacgaggaggagctacggccacgtcctgatcaatccctaatcagcaatccaaggtcatgcagcgccaccacgcttttcctccgccgcatct

SEQ ID NO: 33871 - DNA, 535 bp, Oryza sativa
agtggtggcactatggactgattgaagcaggtcaaaagaaatgaaatgaaagggccagacctcaccttaatttgctgtgcatttccactaccaaaatttagagtcagtgatccagctgagtggatgcactagtatctcttcgcaagcagctgtacacgtgtcatacttctatcagatatacggagatgtgtatgtatgggttgatgagatacacacacatgtcgtgtcaagatggagtatgtcccatgtgtatgggtaattgtcatgttaagtagggtaggtcatcccacgaggccgaccggccgaccacgccattcgcctgcgaagaaagaaaatgcctgaatattcaaccacgccacaagtgctgcccacaattttattagcaataactcgttttagtttgtgcgacacatccataggcggcccactaaatctcccatttattcttccccctccttccaagtactgcactgcaatttaattactcacccaacaaaaatactactccctccatcccaaaacatgagagactgct

SEQ ID NO: 33872 - DNA, 716 bp, Oryza sativa
ttcctgcaccaatgatgagagttgtgagactaatcacgaaagacattgttagacccgcccataaccgcgggcacggctattcgaatagttttactctgatcagaggtgtaccactgtacccacaagacacaaccccacatcatgtcaccatgtgcctcaataccaccacggtatctcaaaaggagttgtgacaatacccctcgcataacacaatccactgcagcgcaccttcctggatcataatcacccccttataaacaaggcatggactccccagcgacccccgtgggcttatctccgccacttctcagtctggtgccccgcaatgaaccatgctatacaaaagataaagcccgttgcccatgctggcttgtggttggcacggttaatgtttcacaaccgaaactcgtgaaccggtccttaattgtcatgagcacgaccaacaaaaccatgtgctcacaacccaccattaccaggttttagttggcacattaattaattaactaatcacgattgaccatcgtgaactatcatgaaaccatcatgaaatattagtgagtcattagttatcccgaatgtgtgctaatgtttctaagcagggctaagcaattatatctaatatctagttgaaccaatataaataaagctcaactagtcaaattgtaataacccaaggtatcaaggaataaggtaatcaagtacaaaagggccataac

SEQ ID NO: 33873 - DNA, 641 bp, Oryza sativa
ccctcccactcgcctttttagtttaggatatgacagacaattcaacgcttcatattaccacggctattgttgctatatatgacctcaaaaagtaattatctctactacttaaaaagagtgtagtggtggcgatgactccaactctagcagacacgcggaatgtgaaccattcaatcgtcaaatccatcggttcagattaggcagacgcgcttctctctccttctctctgcattcttagggcaacagcaatgtgtaatatggaagtgggtattagtgtgggaccatttgtcagtgagtagtagttaaattagccatcacaatgtatgagaatagagagaaggaattaagatggggcccacggaataaaacaaatcgctacccccaacctcccgtgactttctcagttcctcccgcggccgatgcgatccccagtctcgactccatcgctgccttatccaaaaaaaaaagagaaagagactccatcgtcgccgctgcttgcatcgcttgatccggagcagtcggccgccgcatcaggccggcctccgaggcctcaatgcccagcagcctaggccggcggaggagcagctccctatcccggagcgcctctccatccaactctcttccgatcccgatccaaaatc

SEQ ID NO: 33874 - DNA, 2877 bp, Oryza sativa
aaagtgagaggttctccttctttatagggtgtttatgatggttgtggaggttggttcacccacaaccgtcattggggagtgatccaggccctccacgtggaagcagatggagggtggcgtctatggtggttaggccaaactgtgggccccacctctcagctgctctttcggctgggaggctgacaggtgggcccctatggcactgcaccttggttggatccattttaagtcgattttgattggccggaagtgggccctccaatcctcatgctcacatatgattggccggaagtggcgtcgcatggcgggtgtaaatctctccaaattcaccaacataaatatatttaccaatactagtggaaatggttagtaatacccctaccactaagtttgatattatattttgaattcttttatgcaagagttgatagttaaagtttgcacttaacaactgtcaacaatagcctaaaatattttcaagagcacttaaattcctcgactttggatctatgcaaagatttgtactcagacttttttttaaaagtgctccttttaactccagtgatcgtgcagaaatggcatgcatgattaggttacgaatggaattagggatctaagaggtcttattggagtgtgaagagatggatatagggtttagaggaagggtccgagtgacggtggtgccatcggagtcatgagagcgaagtcaattgttgcaacacaaaatcgaaaaggttacaaggtgtaacagcactccctccacaaccgtgcagcccagcctaaacgacaagcgggccactaacacataccactccacttacaattttgccctcgctttgtgcaaaagggttaaaccggaaatgataaggttggagggaagatgccttataagttggttccaaccttgctaaactagcaaggtggtactaaacatgcccacacagctctcatgggccacacagacctcatcctaattggcccaggatgtcacacaaggcgacagggtggtgaccggatccggcaatgctagccatcggagatggagaaggctcagtagcatggggaaaggtcattatcaaaattgtagaagaagacatttactcgagtatggaatcgatcaagaaaagagctgggagggtagaagggaataggtgactgacggggctagcccagttccatggaggtgttgtcgaggatgagttggtagcaacgacatcgtgtcacaagagtatgaggaaaaaatagagcggacgaaagagatgaagatataagattccatgctcgaaccttcaaacatgcttagccatgtaaacaccactacaaaaatgattttttccgtgaggtcgaaaggggttttcgcgtgcggatctcccatccgtttgcaccgaggggtctgcaaaaattcgattttttcgtgagggtgacacactcgcacacgaaaatccaattttcgcgtgcgggcacttaagccgtccgcacaagaaaacaaaaattcacaacaaagaaaaaaacgaaataaaaaccctagccctggaaccctaatctagccacctccgccgtcgccgccaccgtcctgcccgaggcccgccgtcgtcatccctgcggtcgccggtgacggattcagccgcccgaggcccagcggcggaggatccaacgctaccgttgttgggagactgccgccaccatcgccgtcatcgttgccgccctatccgaggcccgccgtcgtcattgccgcgatcgccaatgatgcatccgccctccccacggaagcaggcaacagccgccaccctcctctccggccgcaacgcagctgacgcccctcccctctgccggatctaggaggggagggaaggaaggggaggggagctggagggagagggagtagaggaccagcgcacaccgtcgtcgggagggaggtcgccacgcgccggattccgctcagggggagggcgaccggccgccggatccatgcgaggatggccgccgtcgccggatccatgtcgggtttggctgccacccactggatcccgcgcctccaccatcggagggggccgccgtgccctcgcctgccgtcaccatcgcctacacccgccgccgtcgccggattcgtgcggggcttggccgccgtcaccggagggggccgccattccctcgcacacttatggcccgtctgcaacctattagggtgcttgtccaggaaaatcatttctgtactagtgaaatttgaatatttttcccaccaaacaatcaaatggattgtttttttattttattggttaatatggattggttttgttataatagtcgttggtggttacaagagcctcagtagcaccttaggtcctgggttcgactctctatgagagcggattttccaggatttaacggcattgtgctttcagtggtaggcaacatacccgtcgacaacaagacgtctgcgataatttcgtcaatctcaagtatttgccggcccagttttcaaagatgctcataggagtagggtttgggtgcgtgcgtttatagggtcagtgtgcgtgcgttgtgagtatctgcgttatactgtgtaattcgtaaaaaaaatcatggtgaattagtaagtatggagaaatcatttaaaaaaaagatatttagttacatttatgccaccgtaaaagccaagttaagtgatgaaacacgagcttcttgacaaatctcgttgctggttcaaaggtaagctgaatatacaaacatacatataaagagtaaattatttattggcccatttaagttgaccgtatccattatttgctttgaaattgcctttccataaaatggttctcaacttgttttcctgatcggtgtacttcagaaacagccacaagtttttttcgagtgaaa

SEQ ID NO: 33875 - DNA, 2408 bp, Oryza sativa
gttggggggcacggagatacggggggacaccggacaccgacacgctccgtacggggttacgagttacgaccggtgtttgggagctatagtagctggcacgatggatctggacgggtttgggggataggggattggggagagccgtgaggatgtcccggttcagtggacggtcgggtgtggttgaggtcggccacgcctgtcgcgagtttgactttatttactgttgatgtgacttattctcaactcctcctccccttcgtatgcaacatggaaaacgatagattaatacataactaattaagtattaattaaaataacttaaaattttggttaatataattttctaaagtaactttcttactaatacttttgtaaaatacatatcatttagtagttgagaaaacatgcgtgtgaaaaagagaaagataaagttgagaactaacaaaaaaaaaaaactacatagtcgtcgttgtgatacggtcacatctaaaattcgcaagcgcaccattatcgatgtaacactcacctccattgacgcgaaaaacaacacaattgtttgggagatctgcttaactctagtgcaggtctccgaaaaaaaacgctagtgcaggttctaaattattgatgagatacgggcgtgctagtcagtttgatcctgcgactaacaagacatataaatatgtaaatgatcgaaaagccgatcggctaacaagcaaatgtagcgatattagctgatatcgatactagccaatgtccatagaattttgaacaatcgactatatgtccgatatagattctaacacttgtataaacaatgatagaactttaacaaacaatccaatcagccgattataatataatgaagtagatgcccgatgaaccaatcgacgatatttatgctgaatattaaatgttggctcagtggttaaaacttacgttggctggaagtctggtgcacaaataatttattggctagcactccgataaaacataggtaagaaacctatcgacttaacaatacttagattatcaacaataatgtagtaggtcaaacctaaccgatgattgtatataataatctaatactcaataagccgataagcctatgaaaacatgatggacataccacatatatttaaaacaacattgtaattgtagagatatatcgtctaagacagaagaccagacctaaccgatacagtctcaactaaactaatgtgtctctaaacacaatgtgattaaagatagaatcgaaatatcagttaggcaaaatatcaaccgaaccagagtgatccaagaggtcaaagcgatacagccatgaataacaccaatgcagccgacataattcaagggccgacggaacatagggcttactcctttgaaggagatcgaagccgatgcagccccgtgttaagtgccaagttccgccggtgataaataaaaaccttggaaaataaggtggtgatgcgtcaagactagttgtattgatcgagagatagattacagggaccccgggtgtacgtatttatacccataggccgataagagtcctagtcgggcacgacacaaactttccaaaagataaaaggaaaaacataagttctgattggacatgacacaaactttcctaaatacaaaacttgcctaattaatatataaactcaagctgctatgtcgtggtcttcgtgactccttctcgaacccgttctcttctggataagcttttaatcgactgattgtaatctttccttaaccgaatccactaaagaatcttatcaaattttggcgttaacattctcatagcattccaagagtatcgaatcatagggaatgtgtgtgtatatctaagaacataattcaatccaagaacaacaactaagggtaggcttagactaaaaaggattcctatgggttaatttactagtgttgagttaaaggtaaaactctgtcgattgcttcgggcacaccggctctccactggtctctcaagctgagtctggcctacggctctatgatgtacccgaatatggagggatacaaagggcagacatgactgtcacgacctgccgcctacctcacttttcgtggagcacacggtaaccgctaacctataaatcacgcctaagttattgattactactctagtctcgcgcatgaacttttttttttatccagagtcctagtactagagcagttaataattcaattaagcgacgaacccgcaacaatgggaatataactcactcaagcaaataaattaaataccataaggagatatcgaatacttactttattgaaagaagcatccgccaaggtacaagcgagagcagaagaacaacaactccagtgcttcttcggaactccagtggaagaatgttgacaaaaccaacttcccggagagaactccg

SEQ ID NO: 33876 - DNA, 637 bp, Oryza sativa
atgatggtcatctggttggtgtgtgaatgcaatcgacacgacaaacgatgagccctccatccaaccgtgctgtgtactactccatatgtgatccgttttactcaatgtgtgatctgtagctcgtctactactcatacgtgaggtgtgtatgtgggacacagtagaacgtgtcacaccagtacaacgtgtcacacactcgtacgtgtcgcatctgaacgtgtcgagtcacacctgtgtgttaggtccgatcgtacgtgacttgtcacatctgaacgtgtcgagtcacacctgtctgttaggtccgatcgtacgtgacttgtcgcatctgaacgtgtcgagtcacaattgtgtgttaggtccgatcgtacgtgacttgtcgtatctgaacgtgtcgagtcacacctgtgtgttaggtccgatcgtacgtgacttgtcgcatctgaacgtgtcgagtcacacctgtctgttaggtccgatcgtatgtgacttgtagcatctaaacgtgtcgagtcacacctgtctgttaggtccgatcgtacgtgacttgtcgcatctgaacgtgtcgagtcacacctgtgtgttaggtccgatcgtacgtgacttgtcgcatctgaacgtgtcgagtcacacctgtgtg

SEQ ID NO: 33877 - DNA, 738 bp, Oryza sativa
ccctgttctacaggcaattcattgtatgccagtgaaacataagttttttacaaggtatttatgcaaggggaacaccatagaagcctattaagttattacgcctaaactatgaagcaggtatatatttacagatgtatatggatgttgtagaggcaattcattgtaagccctctcaaaaaaaaaattcattgtaagccgctcaaaagtttatcttttcggttagagtaaatttaacaaaactataaatatattgaccaaattatcacaaaactacatatttaaaatggtgtatcacaaaactagctataggttagtgtcaatttaattacaaaacttgaacatttataactcaaccataatattagtgctaaggatttaaaccccaaaatatatagttttgtgataatttaattattaaatatataattttgtgatacttagagttaaacctgtagttttaggataaatttattgttaaatctatagttttataataatttgatcaaaatatctataattttgtgaaatttactcttttttttgcgaggagaaatttactctttctgttataggctactaaggtcactttttttagacaatataactacatggagtatatggtaacatatatagttcatttttccccatcttgaaaatcaggatctgaggtatagaacctacataactcaccagaaaatagctttttcttttagttggtaagttttcacgggagtgtac

SEQ ID NO: 33878 - DNA, 1466 bp, Oryza sativa
cagtgggtgtccatgcctcaaaagattgagacggaggaggaggcaatatgaccttgtaaccaacatgcactcagggtagaaccagcaatgaggaggagggggaggggatccgttttcggggggcctgcttcgccattgccatgccttcatagaggagctctctgcaacagagaggaggggaaggggaaaaggagggcaaaataggagaggcggaggaggaagacgaagactcggagagagaaggcaaatagataagaacaaagcgttacctacttattccatttccacgggatatggttgagtagtttttctgtttacatagtacatcatgccgaaactcctcatccattactatagttgaagatgcatgcttaattatttctatgtatgtatatatatatcctcttcacatatgtacatatcggtcatcagttccttgctccagcctttaatttggtcgctaatagtaaccgaaacacacgctatttaccaacttgagcaacactagaaatgggaggcatgtggaatcccatcagctgtggcaccaatcgacgaagttttagtatagcatcagctactgaagctctgggagccgacaccgtgggattgtaactcttttccacctcgtactcgcagcaggaatcgatcaaacaggaaaaaactggaattcctattagtacttgaaccatggatagctgcagtagcagttgtactatatactaatgtgctaacatgtgtcttggccggtatctcagtatatatggggttgaatttcactcgaggcgttgctgctagttgaatgtgaactgcattcttctaaagtgacagctgctggtaattgagctaatggatcgacactagggttttcaattttgatttcatccgaaattttggtactttttggaccttttttttttctcaaaattttagcataatttaactgaatttaactaaattttggccaaatttgcaaaaatttgagaaaaccgaaaatttcgactaaaataatcgcttgccagcaagggggcctgaaattttgaactgaaattgcaatccctgatcgacatgccaaatactttctggaggtaggagatgaaccgtattgtttagaaagttcacatcagtttcagagaacattgatgtgtgtgtgtgcgtttgtatgtgtgggttggggtaggggtgagcgttcggtttactcggttaattcagctcggtttcaacggtttaataaattttggttttctattgcaaccgaagaatctatataaaaaagaaaaccgagccgattaaacggagtaacttcggttcactgaacaaaccgttggaacacgttgccatgaggccacagccgtggcttcgcacgataacgtgatgataataaacagggcttgagacatgggtagcttaggagatgttgggccccattaaagagatgttgggccttaaagcttgcacgttgcctaatt

SEQ ID NO: 33879 - DNA, 1681 bp, Oryza sativa
cgcaacggcgggtagattgaccgcatgcatcttcattcagtcgtgccctagtaatcgttaagactaaatgaagatgtgcttagtcttaatgttccttctattatgtactgtgatgccctcctatgatgtaatcctatatacctatacaaatcatccccactactagaattctctgcttcctggtgcttccacgtcccccattttctccccaccgttcgatctcaatcaagcggtcgcatcgctcctctcctctcccacatctcgctgcttcaccggccccacgcgcatcaacccctctctcccgcatcgctcctctcctctcctctcccctcgcacgctcgcatcgattccctctcccgcatctcgctccgccgcccccttcgtatcaatctcgccgtgatcctctccatctcccacatcgtgctcgcccgtaccggcgctggcatgtcatccgcctcccgtgccacacagaggcaggatgagggtgtggcgcttcccttcccgtcgcccccatggcagctcgtgcgctgcttccccttcctctcccatgtctaaggttgttcgcctctttaggttgccatgattaatgaaaaccgttgacaaccaccgaggaaaacacttcacggctgttatcaagtaaatccattaatggcttaatgcgttttcttctcctcttatccctttatcagttctgcatctatatccaatttatcatctcgcttattcgtcgatctaccacactctaccaggctgctggcattttactaccgttcttgcaactctgcttgctggattcatatgcagccctcacctgtcgatcctctccaattacttcaatgatctaacacaggttacctaccgatttcccctttccttatgttcaataaatctgatacccagcagagaattttattgttgttgtatcctctttttccaggtttcaggttcttggctactgatttagttgattcatattctttatttatcctgaattatagaccacttctcattcttaagtggttgaagacgtggcaaatatgcatctattggttgatttgtcgtcacccgatcagatctaagaactcatcgagctaagtaacaatcatatgggctgctaagcggatggagctttcttcttttggtattttaattatggtctttaactggtgaagctatatatatctcggtacatctatgtcgttgatgtgcttttcacttttgataaggtccttatcaagaatgatgtcagattctccacacacagacacacaggtttgctcttaaatagattaggttgtcttccgtctcaaagttcattttattttctgatcatgtatactctagatatgtttttaagtatcttttgtcactcttgaattagcttggtgatataaatatttttggagttttctgaaagctaaaatcactccaaagagttaatcaaggatgagtacttaattatatatatgaggtaataatccttttcccaacttcccatatcttactcaagcatgaaaattttctaccattattatataatagtttgacaccttagttatgatttccttgctatcagtgataattggactatatttgtagatgtttaaaaatataaaatattgatgtttcagttatggttattatcagttttgtaattgtaaagtagtcatcactcatcacc

SEQ ID NO: 33880 - DNA, 1225 bp, Oryza sativa
gaaaacaataactgcgttaacctcgcatttctgtactacgccctaagttacattctctacaatattgttctctaaatttctaaaagtaggttacattctccagatcaaactaaactacatcttacaattaacactattgtctatgtctcaattcatactattatattctatgctctggatctacacatatgtgctgtgtgctacagatctgctaaaatatatggaactaaaactaaaacgcaacatatgtactcaaacgtaatatattagtacaaatgcaaaagatgtatgggagcatacctgtgatgaagtgagcgaaccagcagggcttcgccgctccccttctgctgccctcccctctctctctttcgtttttttggatttttagtgaatataatgaaatttcacaggggaggggctgggctttataggggggaggcaaaaatcgccctcccccagggcggcaagggggccgcctgcaaaattccatgccccctcgccgcccatttgcaggcggccccccgcacagtagaaaatcgccctcgcggagggcggcaagggggccgcctgcaaatttcgttgacggccgtcgcccgagagcgaacggccgtctgccacgtcattttcgccgccctctgggagggcgatttttaaaatcgccctcccagagggcggtaggcgactatttccgttaattttcaaaatggaaaattatttttgtaaaacttttaataaaaaaaattataaataaaaaaaattccttgacgagaagggcaccatcgtgatcaatcatctgtctggtgggcccaccaccatagactcgggaggcccaagttgatcccaagccgcacgatcaaagccgatgcgcgtcatgattggatttttgcctttgcccctgccccctcgctcctcgtggtggggtgcacatgacacgactgcttccgcgtttcttctcggcgacgcaccccacacacgcacacacacacctccattcgctccccgccacacaacacgagaaaccccccgccttcgctcgccgccgccgccgccgccttccgccgcctcgaaccggaccaaccaacgacggctcgcttccctccgaggcggtaggccacctcctcccggcggctcccccatctggccgcccggcgccgagctggggatccatccgcccgcgattcctctcgccggtaacgactccctatcttcgctgcttggatttgcg

SEQ ID NO: 33881 - DNA, 1167 bp, Oryza sativa
atattccaattacatcgttcatggtgtacttagggtacctcggtttccttatataattattttcaaaataacagcaggataacatttccatatatactacatcgtagaagtatacttagatttttcatataccctaataaaccgcattatatttgttgccaaataaacgcaaatccatgattatggtgacaaatatttagaaaccaaataacggccgtgaactgttgatggaaaggtattaaagacgctaaattgatactcctaaatattttgcatgcatgcacaggctgtcaattaccaaacctaggtattaaagacgttactaaatattttgcatgcatgcacatgctgtcaatttccaaatcaaatgtacttaacgggtgaacccgttaatcaaatatacatgtaccgatcaactagatgagaatgtgatccaacggcagatgtcagtggtgcccgggcaccatggagccctatctggtttagggtttagggtttatatgtatgtaaaattgatctggaatgtggcggttacatgggcctgaactgatgtgaggagaaaatttgttctacttgctaggacatgatatgatctggacatgaaaacggaaaacgtggagcaatttgggagggggcgatatggaggaatcggaccggaaaatcgtaaaaaaatacgcacagggaggaaaagaaattggactgcgcagcgcattatactgggacaacgtacaaaaatacttggcaaaagcatcttaaacatttatgataggtaaagatctacatatttcaataaaaaaaagtcctacctaaaatttaaaactaactcaaaatttgaaaactttgaactctcaacatgaaatttgaactttcaactcgaattttgaaacttttaacctgattttaaaaactttcaacttgaattatgaaaactttcaactggtaatttaaaaacttttaacgcgattaaaaaaatttctaactcaaacttctaaaactttcaactcgaattatggaaaatttcaactgaaaattcatgatctttcaactattttttaaaactgtgaactatcctaaaaaaataattattgatgtatttttttaaaaaaaatattactccagtacatattaccattagcgctaattaggtcatttgcggactaatcaccc

SEQ ID NO: 33882 - DNA, 1304 bp, Oryza sativa
acccccacccctcccaacccacccccgtgcaccccaaccaccggcgccccctacccctcccaaatatactagtaaattgtttactatcgaatctacatgctatatatatatagactagcaaaagtgaccgtgcgttgcaccgggtgtttacggagtgtgtatagcgatcaaaaagtattgtttggtttagagaactaatctgctcaaaaaaaattgtttgtttttagataaataatatgctctatatttgcgcacagagtgatgtcacgatggataaaatttaactgaacaattttttaaacagtctagtatttcaataataatcacaaagttttttttaaaatattccactttacatgtgtatgatatgagcgatgttcctgacgcgttagcgtaacgattgtactacggtggataaatttaactgatcgatttttaagcagtttagtattaaaaaataataatcacaaatgtttttttacagttattccacgtatacgtggatgatataaatgttgtacctgatgcattggcgtaatctctaatttcgaaatctctgccgattcgcgtgcaaacaacccctccacgtggcacaatacgattccagcgttagtcctctccctcagccgtcggatcgatgatcaacggtgtggaatagctgcggtggacctctttgtaatatgtgaggttttaggggtctttttgaaaaagttataccctgctatgcccttctctccgccggcagccccgcccccgcttcctccgcctcattcgtcggaggtcgacctacgccgatgtcgccgcctcttcctcctcctcacgctccagctccagctccacctccgcccctccggcgcccgaggccgaccctcccacgcgccggcgcgctgttctgtgcgtctctcccctcaagctcggcggcagtggcacagattcacctcgtcgctggatgtggcgatgaattcggttgccgtgcttggggatggggagggtgaaatcacgtgcatcgctacgtccgtctttgcctgccttttgattcgccagccgcctctctccccaagccgcggcaccgaggggatcttggacggaggccactggccgtgccgcaaagggcgtggctgaggaccgcgctaccgctgccggatgacgtcatgcaggagcaggagctccctcccctgcttccctatgtgttcacaccacaggtgattaattccacctgtaaacggaatcggaatcggaatatataaagcggcgcacatggggcgagcgaagaggggtgccacgtaaggattttgctacagtat

SEQ ID NO: 33883 - DNA, 1061 bp, Oryza sativa
cgacgctcccccgtccgaccgagcggaggacctcgccgcgaccgatcttggcggcggatctcgcgaatgtttttttttttctttttcttttttttcgagaggaactcgcatgaacctaaaccctaggaggcggcggcgtttggtttgaatggtggagttggctcgagtggaatggcatgacctagtagggtagtaggtgcgaggaggcgactgcagtctactgaagtcggcctgtgggctgtggtccgaacggaccaagacggcccgcgtcttggactacggagtgttcagttgagctgcaagttttacaggatttttttattattgtttttctaaagatttataaaaattactctaatataaattatcgttccaaagttttgcaaaaatactctccttcggcatataaatcaccctacaataagaccatctatgtgacgtggcaccccgtagaaggggcacatcgcgacaattttgcaggcctcccgttgggcgatttatcgtcgggaggggccacctgcaaaattgtgaaactttgaaatgattttttttacaatagggtgggaggagtatatttctataaaacttcaaaatgaaataaatataaatattaaaaaaatgttttacaaagagtaaattttacctagactcatgtattattatactttaagttacacaagaccacactattgatcatttcgacttttatttatcacagttttgaattctacaataacatctcaaatttatgtgttctttattcatcatataaatgatctacatccatgtaactatagccttttaaaattttgatatgtgaatatgtcaaactgattagtgacgtggttttatggaacttggaccattaatatcttaagttatatgtcacgtgccaaattttatgtggttttgtgcaactttgaccattataggtgaggttttgtaaaatttactcttacaatctagccttctaagaaaaacttactccgtatttcatgaaaataccattagtaagacttatttctggaaatgtgttgatacctcggtgccaacgttggtat

SEQ ID NO: 33884 - DNA, 1702 bp, Oryza sativa
atgaataaatgtgcgcacagcattttcaagattcttctgaatcctgcaaaaaatatagaaattaagacactgactctcatatgaagatgatctaggacaagaaagtcaccttgggtagcattggcacaagtcatgtgcgagttcagagcataactccaaatatgatcgaaatgtatgtgcatctcaggagagctcagggtcttcatagaatcaacaattgctccataatatggtatattgttccgctcgaagctgattaaaaaacagatcagatgctgctttgatttcataagccataaaacatatttcctaagaatgatagatttttaccttcttaaaaagtcgaggaacatgtgttccagcttttggtcttttccactcatgaaataagacgcaaaatccgctctcactgttccaggagagggaggcctggtttctagctgcgcattggtgggtgatggccttggcttaacactggagctgctaccatgttctcctgccatacgggaatgccgtactggaggaggaccttggcttgactcaagtgacgagcttacgctctagaacagagaaaaaaaaatgatgaaggcattttgctagatcaaatcaactagatgaatatattacatggttatagcaatatgagtgtttacaggtaacatcaaaaagaccgtgacaatagaagtggctttgaacacagtagatttgccactaaaatcctacaatcaaaggaatgcatatttctagcaacatgctgaagtagacatggcaattctacatttagaacaacaatgtgctaagcatgggatagcagttaacatttaaggcaacaaaaacgtacatgatgctgggtttgcctggcactggaggcttcttcttaaagctttgcttagcaccttcaaaataattgccacttttcaacacagaatgttggtcccttgagattgtgatatcatgaaccaacacaccgctttcaccaggctaattatttttaaacaaaaaaggtcagtaattaaaaaaatgcactgcttaacaaagaaagtggcagaattactaagggcttacagaatcaacagatcgccaaatattttggtagttccggaagcccacatctgattccagaacaaaaaatcttccatggtactgaaaagaagaaaatagaatgaaaactagcataccaagcttatttaaaaaaaggcaggtatcacaactcgtaaattacaataccttgtatacaacgttgaagtgctcgttttgaaagaaaatgaacaacttcctatcaggagttgctgctttcaaagtgtgtaaactgtgattttaaaaaaaaatgtcaatagaagaaacaaaatgacaattgtatttacctatagctagcatgcatacccaaactctgtgacttgtccaggattatctttcaagaacgtgtgaatcaactcatctacaaataaacaatttaaaaacagagcattagcgatcaaagaaagaaacatatttgcatccgtaaatagttgacaggtgaaaaatgtaagatcgttacatcttctagtttcagcagcatctatcataaaatcagcatctttctttgagttgtatttagccctatcgatattcagctgattgtatgaacgtccatcaactgcattcaataaaatggtgtcttcctgttcacaaacataccacagaagaaaaaattaggcaaaac

SEQ ID NO: 33885 - DNA, 508 bp, Oryza sativa
atatgggtgtaatattattgaaaatatgtgcactactttttttttataaacttgggtgaactttgttagttggtgtgtacggagtgtgtaccataagattatgtgttcatagtatatgttccttcttttttaataagtacatgtttataatttcttagaaaaaaaatacttctcagtttgatagatccaataatgatgctatttttatccatactagcataaattttgacatgacatttttttatgcgatcgactactagcataaaaagaatacttctcaaattgatagatccaataatgacactgtttataactacagcataaataatgacactgtttactgtggcatcgcgtgttttagtagccagtacattgcattgtcggcaactggggtacacatatgtacacgcagttgctcacacagtgagatcgatatccttgtgggcacatgcactgtgcaaacccagatcttggatgtacacgtagggttcactccttaaaaaatcta

SEQ ID NO: 33886 - DNA, 907 bp, Oryza sativa
taaggtttgcagcgtgcataatgatgtgcggttgaagttgaactcagttttgtgttccttttttgatatttcgattttcttcttttcatagaaagaatggattggagtaaatcagcagcggtgtggattgtgctctgacctcggcaggggcggatacaagaacacagcgatgagatccgtgcggtttgtggcggaccaagcatgccggccgatggagatggttctctgcatctacgcattccccaccaacatgccgcccttcaggtacaaatcaagtctgataaaacactgccatccttcttgtgttacatgttctgtgttacatggtggcctcctcctccaccacagcggcggtgtcggcaaacagatttgagaggtaaaaacatcccttcttgtgttgctttacggccatatttgagaggagaatggcatgatgctgcagtttgatttcaccggctttcctgcttgccgtatttgtaatctcaactttcatttcaagtgattgttggggccaaacctatggtggctagtcgctgaggtggtgtcattaatggaggcaaagagtggcaagtggtgaccaaagcggaaggacctggtgtgttgcgcgtgcgccggccactggcggtgcgaggccacggcgacggtcatgctgccattgtccaagtatggctgctgaccaatttcttccctgaagtaggtgaggttagcccgataggaacacataccacctatattgtgatatttggagctagggcacattcagtcctgttatttgatctgtagcatcaaggttgtaaaattatcagttttgcagaggatttttggtcatcaaattggagttgatgatattttttgagacactgaattaactaatatcaaatatataatctggatttcccttcaactc

SEQ ID NO: 33887 - DNA, 1077 bp, Oryza sativa
aacgtggccttgtaggtcagttccaaccacaaaagactgagcaatcaacatcaagctggcgacagtcaatccgtgttggtcctgattcatgaacaaaacacaaaaagtaacatgatttgctcgtacgaaccactgagcttgaaaaaagaagaatattatattaaattgatatatatggaaatcatttttgacggattcctaagacttgtttggttggagactaatgatgccacaactttttgactaaagtggctaagattagtcttgtcatacttttgtggcaaactaagggcttatttagtttggagaaatttaaactcataggaataggaaaatggagactaggaatttttccaagatctttgagtggatggaaaaattcatatgttttctctatacaccttgtagaaaaggaaattttactttgattttcctatagttcaatcctacaaaccgaatgacatctataggcattaatccttaggaatccaaatcctttgtttttcatcaaaaacaaacaagccctaagcttaggcagagttagagagtataatatgtgggccagatgactaagagataggtaaaatagagttgtggtagaaatcaaatattgtctacaaaatagaggtatgataaatttagttgataaccaaacatgcccatcaggatacaatgcattttctattgttagtcaagtacagaacaaatgtttcttattttttgtacggttaaattgatttcagcatgaaaacatagaacaacgacgtagaaaattgtaacccaattcaacaagaatcaagagagcacaatttgggtatggtgagtgaattttggatgaattactttatccaataaacttcaagcatcttggttaatattcatgcacaatgaggtgtgttttaatacttttttttttgaggttcaaagagcaatataatgctgcatgccatcaattcagtgcctgttatcatggattatatatttgattgtagagattttctatacttgattatagagatagatcaaatattttcaggaataaacttaaaaaatactacatacgtaatctgtagcaat

SEQ ID NO: 33888 - DNA, 727 bp, Oryza sativa
ctaaacggtgtgtttttgtaaaaaatttatatacgaaagttgcttaaaaaatcaaattaatctatttttaaaaaaaatagctaatacttaattaatcacgtgctaatggattgctccgttttccgtgcgggatatttgggttgggaacctggggtgctgaactgagccttaaagctcccaccaacatattttgcaaagataaatacagcaaagtatcgtattttctgtttcccagtttcatgcggcggcaaacactataggcatgaaacattaatctttagggcaagaactggacgttaaagcaaatggagttatctcggggagatcttgtatccgtaaagatggtgacaacctgaccgcctaagtctgagtacaccgctgatgctgcggtggtgcttcaacctcctcttccatacgctacaacctgagataagataagacgggggaatgagatccgtcagagatgcacatgcacagtactctgacttgggatatttttagccgttcgatctgcagcgaacaaacgagatcgattgctacattatgttacaataatatccaaacagtaactttgaacagtatatttcaatactacgccttttctactgtaacgcgtgactcaggatactgtgctcctctgacgtgactcaggatactgtggcgacgtaccatcccaaagtcacaggagttgatcattagcagtagtcgagttaagattttggaaatg

SEQ ID NO: 33889 - DNA, 960 bp, Oryza sativa
gcgagggtgcagggcagagatggagaagagattaatcactggaattaatatggttcagtggacatatattagcttgtttgttacgactagcttaattagctttgtggtggatgttattgtgttgtgattgaagttttggaaagctaattaaagaaggttgctgatggcgaccggcacagcaatatgcatgcgtgcgcggaaaaggtagatttttttttctttttgaccaagtcaagcttatatatgtcatcaatgattagagcaatgtcaatgatatagcagggtacttagcggcaatatttggttatttcacatatactccctccatcaaaaaaaaacccagagtccaggtttaaacctagaattgggttttttttttacggagggagtagccactaagagagaaagtatatgcagtaaattagctgttacattagctatatgaaatagaaaatcaattaattcatgcataggtatcaagctcatccttgtagctacctatgttatatgcaattatataagctgtggtgattttatttgcagaatacaccattgatgatggataaggtttttgtttttttgaacaatcagtggtatgatttattgattaaagtaggaaataattacgaggatagagtcttcaaaggcaatacttcgtccgtttcacaatgtaagtcattctagcatttcccacattcatatcgatgtcaacgaatctagatagatatatatgtctagattcagtaacatgcatattaatgtggaaaatgttagaatgacctatattgtgaaacggagggagtagctaggaaagaagaaaaaattccaccatcacacatcgacgtcacctatatacagctaagaagaaggtttagcaccggtccgactgtcgctaaacgacgaaatagaagtatagaactgagctaatcgaagcaagcaatttaaaaattagattcattt

SEQ ID NO: 33890 - DNA, 721 bp, Oryza sativa
ctgcagccccgtttgttggcttatttggagagagcggaatgttaggatctttcagcacatcgccaagtcggttgatttgctagcaaacggcatcaataaggaaatcgtagtttggagggcagcagggatcttttcccagcctggcgagtaatcccactcagaggcggggcttgccacattgtttctatttccttaccgtctttagtttgtttgagaccagcgcgacatccttcatatagttataattaaaactttatttcctccaatcataatgagattggcctgccaatatttggccgacccggaaaaggagttctggttccttccattgtccctcccactcaaaacatcatcagatttatcgtaaataggtaaaagcgaggagttccacgaaagaacaataaagagctagcacattcagacggctacctctaacttttgtttgtcgttttcatatccaggtttgcctcattttacaccatcctctcctttgaacagttcatataattattcacacgtgtcagtaaggatatccaccgaagaaaaataaaagagtgaacacatttgagcaagcggtataatttctttgaagttttttgcttgttgctttcgtccaagttgtctccttttacaccatcgtcctatgaacagttgacatttatatcttcagctatgtacattatatcttacgtcatcctccaatcaaaacgatcatctttgc

SEQ ID NO: 33891 - DNA, 743 bp, Oryza sativa
ctactagctttaaaatttgacatctcatttgtagctaatccaatagcctaatgtatactacatcattaatatttggtcacctcatgtacaaacatcattaatatttggtcacctcatgtacaaacactattttggagtctttgctgcagcaaatctatagaccgttttcatctctttttctcctttacacgtgcttatagctttcggataggtgttctatccagtatccactgaataattcagatcaaatgaaacataaattaaactgtttcatctggaacttttgacaaattttctacaaaattcatgtgtccaaatgggtagcagttctatactcaaaagcttgttgcatttactggaactatttctcatgaacttttcatcacaatcttcaggcttttgattgcggtaaatctaattggagaggcctctccaattattcttaaccagagacacccacgtgctagtactttagaagtttttgttgctattaatccattgagcaagtagtggaaatatccctatcatctatgcttcaaataaaattttctcttaaattactcatccgatttacaatccgattacaccgttgtgttcgtaataattaaatctttacaacaagatctcacatgattatattttgatgaaaaatcacaaattacttttatgatatgtctaaattacttttagatttcactaagttacttcttatacatataaaagtaaattcagtaaagcctaaa

SEQ ID NO: 33892 - DNA, 939 bp, Oryza sativa
acgggggtggccggagacgccggggacatcggcgacgagggggaggaggggcctatctggacgggcgcgagatcggccatgctgagcgtggggtagagcggcggagcggagggagcagggctagggttagggttagggttagggttggaggtgttgccgtagtagcagtaggaagccatgggagcgcgccacgggggggaatatacgccgccggggacggtggaggggcggcggctcgccggcgacgtggcgcttgtatagggagagccggccgcgtacgtggcgacggagcccggtgggacccacgcggtttgggggaggtgggtcccgcatggctgtgtttaactaattgggtggttagttttcccatttatggcgatgcttctcgtcaatgacttgtggggtccgttgaaagtgttaactggtggaccatgttttcctggacccacctgtcggtgggtagctttgggtgaagagtaaccggcccacgaggaggtcacgctacccgatgccgatatcggcggagggagctgacgagaagctacgctatttatctttctgacgtgtgggcccatattggccgtcctatccacagcagctttcctccatgagtaagcaacctcgcggccatagcaacagcatccaatccatccatgcccaatgcggtaagtaatctggttaatgatctagtagtaggcttcgtttggaatatgattactacgtgtaacaacttttagttggatggaatgtatcccaataatataaatctggatataccatgtctagatttacagtaatacgttccatccaagcaaaatttactatattttgatatggagggagtagcttttttaatgtaattttcagcttccatatagttcaaattcagaaaataagctaccctttagaaccggaggactgaaaatctagctttttgca

SEQ ID NO: 33893 - DNA, 750 bp, Oryza sativa
tcctgcagcctgcaacttaagttgcacgtatttataactaaagttgtgcatatttataacttaagttgcacatgattgcattttttttattcttagaaaaatcacaaaaataggtaaaatacctagaggaaaatttcctagatacacaacagtggcaagtattcaagggtgcggaaataaaaaaaattactctaggtacctagatacacaatgcagcaagcattcaagggtggcaaaataaaaaaaaagaaaacaaaatgcaaaaagcacaagcagttcggaactggccctacagccatttttctgatatataacattactgagaacattcaaatttttagttttcgaaaacttgcagctaaatcctaaaaagttgcaaaagtttttgctaaaaatttgcacattccaaaaaagcaatgggtataaaaatcgactgacagattgaagattttcaatcacctgcaaaataacaaagcagtttttttctgtatgttaagttttccttataaattataatgttttccagttctattttgatctaaggtatagctagcatgtttatatatacccaatataatgcctcctaaatttcttatcatcaaatttgctaacagaagttttataccaattcccgcagcaacgcgcaggaaatcatctgtttaagtatggtgacctcatggtcaccgtcaccgaggcaacgtatggtgacctcatggtcaccgtcaccgaggcaacgggtagacgggttca

SEQ ID NO: 33894 - DNA, 905 bp, Oryza sativa
tgcaatttatttgtaaacaaaacatttataaatctaggatcaatatgtttaaggaagggagcgtagtgacttgccttgctataggttcctaatgtcttcgagatatccgcattagttagaatacccgcgatcgataaatatccgacacgtctgataaataaccgaagaatatccacgcataatcctaaaagaaataaaataaagcaacattcaatacaactaatggtgccaatttaatagatctcgaatttagagagattatggatgttggacggagtcaatcggggttatggtccaaaagatatgaatttccgaagttgaaaggttttataaaccgaggagggagtgctctcgggaagggaggtgatttagactttatgatagggctctgggctgaaatgaggatgtgtatggactttagtgtataggtaggccgatggtgggctctggaggataccaattagacttctgtaggtgaatgaatccctcgggttctgctagggggaaaagtacacgcaaggtccctcaacttgttagccagatacaaaatcgtcccttaaccgcaaaaccggacatccgacgtcccccaacttacaaaactggtcacaataggtccctcggcggttttcaccctggttttgtcccacgtggcggctgactcagcgtgggacccacgtggaccccacatgtcagtaagccacgtcagcaccctatctctctttctctatttctctccttcctctcgctctctgctctcgcacaggcggctgcgcgcgcggccgaaaggtggtgcggctagcgacggcggctcccgggtggcggtgcgcgggctcagggcggtgcgagttcgccggcctccccgtccccctcgtgcggtcagcgatggcggcgcgcggctacgacca

SEQ ID NO: 33895 - DNA, 719 bp, Oryza sativa
aacgaagtcactataagcgtgactaaaagcacaaagccgttaaatcctggaaaattcactctcacgggaagtcgaacccaggacctaagatgctactgagactcttgtaaccaatagactatagattataaatcacaaaacttattaacaacttaaaataatattttacaggtaaatttttatatatagcgagttaatatatagaaaaaaaccataatgaaaacatcaaaactaacaacaaaataaattttaaattttaagttttaggtgagattaataaactaacaacaacataattagcagtcattgcctcatcggtcacggttaggtatgtattcaggtcaggtcaggtcaggtgtgagctcagcaggtgtaaaaactggactactccgtagacagtaaacaatcgggtgaaagagaaaggggaaacacagaaattttggcagctcactcgcttgcttcttccgtcagccatggcggccatgaccacgcatttcgtgtacggaccagtattttatttgtgtggctaatggtctggtttatttctcatggtacctggcagaaacgcgctaactccaaacaggagtcaggtttcgattgtgattgtttcttgcctaattaaaacacttgactttcactcgctgttaattacacccctccgtccaagaacatttaatttctggttacgtacttagacaaggcgaaaataagttatttta

SEQ ID NO: 33896 - DNA, 2407 bp, Oryza sativa
aattaaagtgaaggaatttatggcgccaactaactcgcaccgctgcatttaaggagatggactaaatactcatcgacgaggaggagaagaagaagagcatggttaggtttggttgggctaatctctccccgtggggagattggagattgctcagcatcagcatcggcatcagctagcttcagcttcatcactcaacagtctcatcagatacaatatgtatcacgcattcatcagctggaatagctagatattcgcaatgtgcatcgtggatcttccgggcagtaattaagtactacctcccccacattttaaatgtagttgtaagttttatatccaacaattagtcgtccgtattatttaaaaaatttataattttttttaaaaattattgacacataaagtaccctttatatttcatcatctacaatagaaaatattaatcataattttttttaaataaaagaatgatcaaatgttgaagatgaacgatgtaaaattattttttttctggaacggatgcagtagtaattagggttctcagctcgctcctgtcgtggagtatataaattggagtaaattaatataaatagcaagtggaagagtggggtaaaatttaatggatcaataaataaataaatcatgcaatgcaggggaggcccatcgtgtccagacacggcagaagcccgtcccctgcaggtacgaagccacacagatattttcgctccttgctttatactctgcaccgaccgaccgacgtacctttactgtactgtcctacattgatatttcctttcattttttttactacattgtccattatttatcttatttaatttttttaaaataaatcacgataaattaaatgataattacatatttttaataataaaatgaatggtcaaatttatgttaaaacatcaatagtgccaaatataaaaaaatttacgaggagtatttttgtttcaatatcaaaccgttattctattgatactttttttttgcgaggatccattgatacatttatttactacttgggctgaactcaaggctggctgaagagcctagaccggttgtgagaccgcctaagccccagttcggccagatgcccatcatcaaccaatccagtcggcagaatgtcattgtctcatgttcgactcccacgcagctatactttatcttatcgtgactagggtttagggtaagaccttgctcttctcatttttgcatttatttagtccaaaaaataggttagaattttgttttgttcttgttgtttaatttacttcataagtttagatgtatatcatgttattacttgtttttgtgtcattttagattatagatggtttataaagtatatattacaagatacggcaagaagtactctaataccagaagaataatttttttctccaaacacataaaaggattacacgtcaatatattagaagaaagtagagtttcaaatacacaacacaactgccagaaagaccactgcccccctcctccaaaaaaaaagtaaaaaagaacaaatatacatagagaaatttaaactggaacctaatcctattatactgaacctccacattcatggttgacaaaaatttatatataaccattgtttaccaactctgacatacaagctccatttgacccttaatgatcaccgcaacaattcatataatgcccaaggacgaagccatacaagctcctaacagtcatcatctcatcacatatatgcaataaggaattcattcaagttagcactgctctgccgttgaactactccagctagctagcacgcgtatgtatacgcgtaggagtgagatcacgtatatgcattgcatatacgtatgtacgtacataacactggtttgaagcgaccgaccgggcggtcgatctgatattgactgagctacagcactgtacgacgtggggctcgatcaggtacgtgtgatcgatgaattgtgatagggacgagatgcctatctttgctgttgccaattaattaacatgcacatatacatatatgcatcaagattattgattcattaatccggttttagtacttaaggaatgtactcgtattatgcaggtgtattctaatatatcccttaagggatgtccccttgtgtatctcctttttcaaattcaatgcaaatagttttagaaaaaaaatagaaaaaaaatgtgaatttagagtatagtgggtagtgacatctaggagtaacacttaatttcaaatttgatctgtatattgagaaaaaaaaagataaatttgggtaaattataccactactatttatatccgaatttgtttttttatatatctcaatatgtgagttgagtttggatctaaatttttgtggagtggtacatatatgttatatgaacgttcatttttttt

SEQ ID NO: 33897 - DNA, 590 bp, Oryza sativa
ccagtcccatacttcctcaggcaaatttcttctctttaattgtttttgaatcttagggtgtgttttttttcacgttaaaattggaagtttggttaaaattagaacgatgtgatggaaaagttggaagtttatgtgagtagaaaagtttcggtgtgatggaaaagttagaagtttgaagaaaaagttaggaactaaacaagggcttagcctcatcggtgcgcctaaaaaaacaaaatcaaagctaaaattcaaattttaaacttaactttgaagttgattttaacatattttcaacatagttttttttttcagtattagttaagtcattaaaaacatatatgtatatacatttttttttatctcaataagctgttatggcttataataagcttttggataactaatgaggcactcggtgttggctactggtgatgaatgctcaaatcctgtaggcaatggtagttgtccctttgcttctttgatgtgttttcttttgacttggttcgaagagaactacacaaatgtggatcatcaacatttgcattgtacagtagtactatatttctctgatgaatctgtgttgaattttg

SEQ ID NO: 33898 - DNA, 584 bp, Oryza sativa
aattatagcacatactatggattcttaaaaattcttaaaaggtttcatataagatgaggctttaaccattcttttcatttacacaatagccaactttacatttcaatttggaccaccttattctatccaagtccggtgattcagcaatgactctgcacataaactctctctctctctctccatattctttttccctccaacagttggataaccaatagatctagcaagaaggagcccaaatatagcgccttcgcgcttcggtaggtcagctcctgcctcccaaagtccctgcaagcctgactttcccgacctgaacgacaaccataacaatagggtgcatcacgataggggagggtaaaaagacatggcggttactagaggggaaggctgcgcatgtaaaggcaaagaggaggaatgatgatggctcatggagaaagagaggtggtgggggggcgtaaagtgacagttagtgtttgttggtgggaagaggaaaatgttggtgacacaaacgctaaaatttccttaagtattgaagaaacgtggatcaccaggtatataaaaaaaaggaactacttttaaaaaaa

SEQ ID NO: 33899 - DNA, 615 bp, Oryza sativa
aaatgatgccctgtgtgtttatctgtttagcctctttatcataactggacaaacctgccagggtggctcactgagagaaacagcgaaccatgtgatataacggctttgaattgtgattgtgcccatgactcctctactgttcttacctggtatgcattcctgtgtccaaggctaaagctgacgtgtaatgggtttccttatccccaacttgtagcctgctttgtactttgtcccccatgccctgatgctaaccgatcagcccccatgcatgtatccacgtataattgttcgtatccatcttggtgcgtgtgtgttgctagtacacaagctgcatttttgcacatcctcagtgcgttgttgagctagctatgttggataatgattcgattcttgcaccgcttgttgggaagtgaccatttgtatagaatcactggcttttggtagccttgcttcaattctttgtagtttggaaattgtacataaaggtgccccttcaacttcaagtgcttgtgcaaaaaaagccagtagaagagagatggattcctccttctctgacgtggatatatgcttttaatattcgcgggcaaattcaccttggggatgaaataaaaacta

SEQ ID NO: 33900 - DNA, 644 bp, Oryza sativa
aagctaaagaaaaagccaaattttaaattttcaaacttaattttgatattgattttgagatattttcaacatagtttcttttttagcattggcttttaagtcaccaaaaacacatatataaaaattttacctataaatttattttattttctaataaaccgttttggcttattaggggaaaaactaaatgatggggcctaaaatttggcaccatgatcaactcgatgtagatttgctcgaaaagtacttccataatgccggatcgttaatggttactccctccgtttgatattataagttgtttgattttttcttcgtcaaagttcttaaggtttgactaaacttatcggaatatatagtaatatatcgaccacaccaaattagtttaatccaatttaacattaaatatgttttgataatatatttgttttgtattgaaaatgttattatatttttctataaatttggttaaatctaaagaagtttaaatgaaaaaaagtcaaacgaattataatatgaagcggagggagtagaattttataggtttataagaattttgtcctaaactataagcttttataaccggaggaagtactcaatttggtgccaaatccgatgtagatttgcttgaaaaactggcacaa

SEQ ID NO: 33901 - DNA, 586 bp, Oryza sativa
agcaatcgttacgctagtgatatgaactcaaccaagaaagtatctcgtaatcacatccatatgaacacatataaacactcgtacttataaacggatccgcgcacaccctatccatatgaacacatttaaaagatggggccccgcatattttaaaatcgataaatatattatctacctcttaaagaataattagccataaatgtaaatgcatgtgtcaaatctataagtttaaatcagataaactgattccaccacggtaatcctaatcagtttacactcagcgatagactgcaaatctgtaacaggagcatcaacaaagtagtgctgaaatgacaatctcatgatcatacaccacatacatatggtacgcaaacaacgatagttgtctcctcgacagtttaggatagtgtcccacgcatgcgtccacgagtcctcgacgcaacgttcccgccatccacgcgaccacgcatgcacggggggcgcgcgcggttgatgcactggacgtcgagcggaaaaacgccctgatcgatctggtgtgctgagcccccgaggattcactagcttttgccaattgtatccatggccg

SEQ ID NO: 33902 - DNA, 553 bp, Oryza sativa
tgatttaaaatgggctggttcaattcagctctaatccaaagatcaaacaacaggtagaccccttgttagcaacaggacccgggatttggccctggactagctaggagacaactgaatgtggcccgaatctagacacgtctacgttgttccattaatgtcggggtagggatatatcatgccaaaaaggtaaatcacagcgcaacaagctttcaagttaagtacactagagtagtaatttagacgagcttaattaggttggtagatttctcgaagcagcacgagcagagagcatgtacagtttgctcgtctttttcttcactaatcatcctactagaacatgtgcaatgatactctactacactccttaacatagagatggtaatgctaatatgttcaactgcgaaaattaacaccggacgaataatacactgcattaccggtattgacattataagtaaattcagtatttctatcaattaacggcatcttaattataagttgggcctgaataatcacgcagctatgaagcaatcaaccatggcgtgcacgacac

SEQ ID NO: 33903 - DNA, 764 bp, Oryza sativa
cttggacggccctagtcaatgagtatggtcttcaagaggagaatgcatatctccaaaaggcgcagatgttaatagacgatgaaacgaagcccaatgattcacaggtaatttattttaatatatttttggttcacgttcagctccagttctggatttgtcactcctgctcttaacattttccacttgtttttttttcgtaggagatagatacagaccgtaaagatgtcaagagggaggtggaggctcctaagttgatcatttctcgtcatagtgatgataaattctcatcctagtgatgagaaatgagactcgcccaccgtctgaatagcaaacatgaggcaacatgcaagtaccagccgaaaatcaactctctgatggtgtgatatggttgccagccatcggtcaaataagcagccattttgtgtttttacatttatgaatcacaatcgtactgtaataataaactagttacatctatatttatatttatagatcgtttttactttaattagcatatgtttcatttatattatgctaaactcctatgatatgtggatgagccaattcaccgatattttgtttcctttcagacttcacttaagagatctactcttccaattcagcatattaaacttctaaaagcgcatctaaaacactgtggaaagaaattgaatttaatctaaatcggcacatatggaaaaacatggtggaaataataatacacagtacacacatttaaattttagatatacttaaaatccatg

SEQ ID NO: 33904 - DNA, 612 bp, Oryza sativa
atcctctataggttagtaaattgtcaagaaaaaaaaacatttccatacatttaagccgttttacaaaactgaaagttatggattgtggtctattttatactgcaaattagcagccttcctattctctggataaacaaccgacattatatttttttaaagaaattaaaaaaataaccaatagctgcattaaattactgcaactgttcaatttttttggtgttgctttgcactatcatgatcatcaagagttaaatcacagtgcagcactgcagctaataaaaacccctatgatcccaccttactataacttgagaccggcttgcaaataacattttatcgatgtattaatctttgtcatatagtataaacatatacaattgacaagtaccagagcacatgcatatgatagcaaggagaggtaaattaagtacctgcagtaggagtgggatgtttggagatggcagttgcgagatagcatctcatggagaagagggtgttcttttttccgtcaagcttggccgctccttgaatctccttcttcctgacatcaagggcgatcatcactcctcccatatcacaatccctgttggcagaattgcacaagaggtaaac

SEQ ID NO: 33905 - DNA, 1684 bp, Oryza sativa
tcgccattgattacatgtcaagctcaacatatatttgatgttatgttactcaaacactacacaccacagttacatgccaacaaaataataaagaagatatatagccacatatctgtggtgcaaattgtaaggttgtgtgcatattgctattgctcgatggatcgctttcgtgttccttgtgatgtgttgctttatcttttctcctttccagtgtgtgccagaaagaggacacctttctcttcttggcttttggatcttgtttcttgccttgcaagagctagcttcccctaataatctctctctctctctccattgctagctatatagctacattcctgggtcgatccctatataagaggagaggcatgaactcaaatgaaatttccaataagctccacatgtcgtgagagcagagcaccggccggttgatcgagataacacagttggagagttttttctccttttctttttttctgtttaattcatccggcgagtcagatgaggtcttcgtcgtcaccttcgttggctaaatccatatttagcctcggaactcgtaagtagacacttgctatacatgtatagcatctttgaattcaacagttttatactggaagcttattataaaattctgccaatgtttaaactttttttaagtagcaacatgcatgcatgacctcataataaaatccatatttgtcagctcttgtgtgtttcggttttggtcagtttgcgcaaatcgttttgaaagatcaaactacctacaatgttccactcgccttaattcatactcgttaaataatccctacatttgcatcagaacaaaagttatggtaggcaagcctgcagctagctagaatcaaactttaatcaagaagcacacacacaattattcacttaaaataactatggtgggtaagccaattagtcctgtgtaatttagattattgagtaggttgttgctacggattattcacttgattatatataaaaagtataaaaattttgagatacaaacttagcaaataacttaatacaattggtataagcaatacaacagagattttttttcttttcttcagaaatgtattttctgaagcgtagagcaaataatctgtttcaataatcggacaaataatctgaaaactaaacagggtacatttaggccggttaaccgacctacaaatgcatgcttttcctcaagtttcatctgctagctaagctatagccaatagcttgtacacgttgcacactagagagtcaatggtagtgtagctaaattgcacacttgcatcacaagcaacagcaagctatagagatagctgtgctcccaaagagactcatctccatttcttgacgctttcgcgctctcatgcttgctcttccgcgttgtttgccgccttaatttaattaatttgctgctttaactaactactaataacttactaacttggtcgtcgtcttcctcatcttcgcgccaatgctgcagagggagccatgatcgagagaagcaactccaccccttccgccactccggcgaggccaccgctcgcgtcgacgaggagtacaaccaggccttccgctccaagtccttcctcgacctatggtctcacgcccaccaccacctcacccacaccttctcctccttcaagctctccacctccaccccctgcgccggccgcggcgg

SEQ ID NO: 33906 - DNA, 2070 bp, Oryza sativa
cgattttaaattgttttttttataatttatagaattcgaattttaacttgcttatttgcggagtactatattactggttaatatatctttgtaaatttatttttttcataattatttaattgacatgcgataaaaatccctctccactaccatactacttttagtgtcttgtctattggctttaggcactgttcttttagcttttcttttttagatttttgacatggattatttgctttgcatttaaagaaacgttgtttttttaaaaaaacactatattatttagaccactttcttaaaactaattttgaagtttatttatcaaaacattaatttattaaattaatcaagtaaacaatccgcgtaaaaatctgtttgaatgcaaagcttaccttttactgctaaacagcatcaggaaggaaaaaaacagtgtaagcgatggagatagaagctttaaccagcgtcaattccacatactgtacgtacatagcgtctattaggtcattttcctttggtcagaaaatgcctgcctgcctgcctgcgttttgtcgtcaatcgctgactgatagagatcgatccatccatgcatgcgatttactatacaacttagcaatccagggagtgtttcgttgattactgcagctatctatctgtggctctcctttggtcaatccgtggctttctgctagtctgtaacctgcatggtgttctgacctgaaaggttgaaaccaaccaacacttgcgtctgcactgacggagacacaaccatctcatggaatctcttctctcatataaacatttctacgtggtctagtaaaaaaatcgatgaagaatatttcttttcagtcacctcattaatcaaattttaaaattttgaattgcttacattcccttctgaagctcctaatcggttgaaaatgctttgatttcaagaacagtaatatcattggtataaattttgaatcttaaaaatgtttatattttagaacggatggggtatctatctgatgtggccctcgtgcgcagaggcagctgcgaagctgccgatcgattctctcgtgcctcagcctctgatcatctccaaagatctgtctcatcagtctcagtctcagctagctggggaccgtgatatttaatcaccttgtctgaatgatttgcttatattacgctccaaatcttcttctccttcctcctctgtcactcgatttctcttacgtgttgatcgacttcaggccagattcttgacaggttacctgcaattgctgcttatcagttaactctttcttttattaattatgtttcttctccaccctccattcttcggcaaaagcaaatgggagtatcagtaatccgtatatatactcggttagtcacttcaagcttagtttggagacaacactgaaaagccaacacagaaaaacttatattcttgatcgaatatatagctagccccattagcagccaatatgccctcagagaataacaagagaataaacggcaaattcgttattcgagtacgatttgtacttccaaaagtgcgctatccgatccatctctcattatttttgtttagataatggatcgcatctcattaattatttatcactggaaatggataatgtatccggtatgagcttgatattaagttagtcaaatattttgtcaggaaataattaagccgatatgtatatttataacccaaactctgttttggatatatatcgcatatatgaattattggttgtcaattcttggatcatgtacgtttcagaggcttgagaatgtgaccaccaacatctgatagcaacttgcttgcaagctaaatggacctctactataattaatttacggtttctggatttctttcctcttcatgcagtcatctcatgttcaggcataattaaatatgaattataatgtgcatgacaacatgacaatttgcaaaaaaggctaattcatttcctagtcgttctgaagaccattgcttcttgctgaaattacgccggaacgaaaacttggaccatgataaagaaaaggagaatctatggtcatgtggtgagaagagaagat

SEQ ID NO: 33907 - DNA, 666 bp, Oryza sativa
agaatcactgaatatcacatgggcacgaacattcagcaccagaaacaagcattctcttcatgtattttataatatccatctatgattcgacatcagtatgaagatgtcgttcagaaagcgcagataacagaggacacaagtgacaggatcaagtgattactacaaccagcagcaagatatgatccatcaaatgaaaagtgattactacaatcagcagcaagatatgatccatcaaacgagggacactgattaatttattgtcagaggactagagtactgaacaaaacaaactttcctgcacattacagcatgtgacaagcatatcatattttgaaaaagggcgagggttctaagactgttttctgttttcctacaaggcctggataaatgttagtactctacagatcaagtatgataaagtcatctatttctacatggaattctcagagaacatttccatcatgcaaaaatccagagtggtcttcaaagattggtgaagcacttgaataccttatgcataaggtatgaaacccaccaaacattgaagttcactggcaaagtataaatagactggcatataaggtggtactgacgtcgttgtaacaaaataatcacccccattgtttccatgacgaaataggcaagaattgcaagggctgcaggaat

SEQ ID NO: 33908 - DNA, 726 bp, Oryza sativa
atgattaatcaaacaagtatactataaactattgtactattttgcgaggaagaatttaaaatttaaatcattcacttccttatagtattttggaaacattggttgtcctaatacgggcttaattaggaaaaaaatatgataaacttctagttacgtacttagcgatttaaaagccaaatgctgaaaaacaaactttgttaaaaaaaaagaatcaggtttcaaaattcaaaattttggcaacgcggcaaaagatggaaaagccttcaacagcatcacagcatcaacaccaacatggatcggatggcaccacaggatgatctgcagctgctctgctttacgatgatgcaccttcgaacgactgcgagaggtgctttacattccatcccacaggtcgctattaggtgtgcaagggtaacggaaataggttgatacgattgcatataagtgtgtaaactgtgatcgagcatatggtgtgcaagggtatgataaatacaggagtttgcatacgtttttacaggcaatgtctgataagctatttgcaatctagcagttcgaagtgcttcaaatacgattaggaaggtgacctttgaaggggggcctcctgctttggacgcctgcatgtaaagaaaaatctatattaggttagcattgcctgttgatcagaggatgagcaactcccaatcaaaatggtatcacccaaaatcattttgacagttttaactagat

SEQ ID NO: 33909 - DNA, 633 bp, Oryza sativa
ctgtcagtgagaaagggtggacagcttgtgaggttgtgatagacacaaatgccaactgcacgcagcctgtatcgcagtactctgttcttaaaaaggaaaaaacagagcactcctcgcgcatagtaatcccttctaaaaaaacgtttgaacctgaatacaatatagaattgggttttttgacgggtgaagtatatgtatttgtgttttaaaagcaaaattgtgttaaatgtttaaaactttgaccgttagttttgcattaaaacaaatggtttgtaaaatataaggagtttataatgctatgatcgtatttttgaaataaaatttacggcacaccatttttctttcctttaaactataagtattttatatgaaactactccctccgttttaggttataagatatttttgactttggtcaaagtcaaactgttttaagtttgactaagttcatgacaaatatagtcatatttataatactaaattagttctatcacatcactaattgaatatattatcataacgaaatttgttctgggttgaaaatgtaactatttgtgcctacaaacttggccctactgataacagctcgactttgatcaatgtcaaaacgtcttgcatcctgacacggatgga

SEQ ID NO: 33910 - DNA, 576 bp, Oryza sativa
gaacaaacataccccctcgataaacaacaatcctattccattattgcccatgccattgcccataacggcttcggcttccatccagcagcgagctagcacggcatgtgatgcatgcctgcacatgctcctctcgatctgctctatatgcctcctctatcacatctgtcagttactcgccatagtctgcatcaccgatcgagtctgcagctgcatgcttctactcgtgacaccccccccccccccaacccccaaagaaaacgggtaataattagctcgttcttcctctgttacaaaataaaacaactttttttatataaattttaacataggtgaaggagcagtacttcgaccacgatagctgaaacaccttagcacgtcgaggaaatcaagcgtacacaccggccggtacacagatccaccgatggatggatcggtgaggaaatgaagcatgcagcagcagcagcatctgctgactgcaatggccatggccgatggctctgcatgtcctgtgccctacaacaccctgcatctgcatgctagctagctgcacgcgcgtcgttgcgtgcacacacacgc

SEQ ID NO: 33911 - DNA, 682 bp, Oryza sativa
tttgattgtgtgtatttgtcaactaattgaccacggtacgcaagcaacctgtttgtccaactcaactggagatgtccttccacatgactaattgctgtgatagttagcaaatacctttatttctttcataagtgtctgctgcttttaatcatgcagttctgttctgttccaataactttttatttctgtattatgggtttgtttgtttcctaccataccaaaatattagcaataccaaaacctaggtgaattttagccttttttttcttggcaacctatgtgtgttattggcatattttggtagcaaaccaaacactagccaaagtactattcgaagggtcaacaatttggtagggcacattttggcgtcaaaccaaaatggtcctgccatcataactgaaaccaatatagagccttacataggcaatttagttataaaacgtttggtttcacaggtgttggtaatcctggatcctccagaggcattcattgattgtgtgttggtggtctgtagtctaatatagacagattgtcaattgattacaaacatctgtacaaaaaaaatatgttgcaacagaagtacaatccaatatgttcattttttcatttcttgacacattacctctccactaatttttgtaccttggctaagcatgggttggcttcctgagctgatactata

SEQ ID NO: 33912 - DNA, 744 bp, Oryza sativa
ggcggctggcaaagttggctgatggagaagtgccaacctgcagatgaaatggagcattgtaaaaactctactaactagaattattactgtttattagttcatcagctagtggtgatttgttgagtaattaacagtaaggattttgcatttgcttgtaaacaaaatatgactttgtaactacagatgtgtcagtgcatatgaaattttttttttagaatagtgcatatgaaaatatgaatgagtgatacaccactgtatagtattctgtactactaatctaaaaatgaaaaaagaacggttggcacgtacctgtacgtagctcggtggacagagagtaattaattaaacaacaagtagatataaactaaagtatagattagtgtaacgacaagatattatcacatgcatgaactaatgttagcatcctaatatcacatgaatataaatgtaaacgaatgacatgaaattaaatatatacatctaatgcatgaacaaaatgacaaactgaaggaaggaattgcgtgcacatatacgagtagtgtgagtcagcttaattacattgaaggtgtgctccacaacagcagcctgagcaactgaagaaaccaaagcaatggcaatgaacagcagaagagaccagtgaagagtcatgctaatgtatatcatcaattggctaattataacaggaggttattagggcacaagagagatttgatttgtggcctaattactgggggaatggagatc

SEQ ID NO: 33913 - DNA, 720 bp, Oryza sativa
taaaaatatctgaaattcggaattaaaaataagcaatattgaaagaagtttccaaataagaacccaatatgagattaataaaaaatcaaaataaaaataaaataaaatctaaaattagaaaagaaaagaagagtccaagtagaaatacaatttagaaatagctgaaatcggaattaaaaataagcaatattgaaagaagtttccatataagaacccaatacgagattagtcaaaattcaaaataaaaacaaaaattagaaaagaaaaggataatccaagtaggaatgcaatttaaaaatagctaaaatacggaattaaaaataaggaatattaaaagaagagttcatataagaactcaaaacgagattaattaaaattcggaattaaaataaaaataaaatctgaaattagaaaaaaaaagagttcaagtagaaatacaatttaaaattagctgaaattcggaattaaaaataagcaatattgaaagaaggatgatataagaacccaatacgacattaattaaaattcagaataaaaaataaaataatatccaaaattagaaaaactaacagagagttcggaatacattttgaaacaactaaaattgaaaataaaaaataagaatattaaaataacacaatatggtattaattaaaatttggaaaaaataaattctcaaattagaaaaagaaaaataagatttcaattatgaatacagtt

SEQ ID NO: 33914 - DNA, 602 bp, Oryza sativa
ttcctgcagccctccggataaaattaacacgccatgcaccaacgcattcatggcgtgtgtgtgcacgcaacgacgcgcgtgcagctagctagcatgcagatgcagggtgttgtagggcacaggacatgcagagccatcggccatggccattgcagtcagcagatgctgctgctgctgcatgcttcatttcctcaccgatccatccatcggtggatctgtgtaccggccggtgtgtacgcttgatttcctcgacgtgctaaggtgtttcagctatcgtggtcgaagtactgctccttcacctatgttaaaatttatataaaaaaagttgttttattttgtaacagaggaagaacgagctaattattacccgttttctttgggggttggggggggggggggtgtcacgagtagaagcatgcagctgcagactcgatcgtgatgcagactatggcgagtaactgacagatgtgatagaggaggcatatagagcagatcgagaggagcatgtgcaggcatgcatcacatgccgtgctagctcgctgctggatggaagccgaagccgttatgggcaatggaatgggcaataatggaataggattgtt

SEQ ID NO: 33915 - DNA, 695 bp, Oryza sativa
ctgcagccctttccgatccttaagctgtctggctgagtgaatgatgagtggtgaactacgaacagtgcatttgggggacattgctttgtttggatttaaagcttgttttaacttttgcaagcaagttgtttggtaagagtcagctaaacaaaaccaagctagctatgacgaagatatagatcaatagatgccccggtgttcacctttctaccttccggttttcttcttcactttctctaatttttctctttctctttatttctctttctctttacagaaagggtggccatcatctgcatctgcaagtgataaggatgcatggctagctagatgcttttcatcttaatttcatttgttaattaattacgacaccaattctccttgtgttgtcactgaaattgtttccatggaattttatttgaaaattttaaattagagccttgtcgcggagcatgcatgcagctctgcaaactgcaattgcataatttatgttaacatcattcatgcacaaacaaaatacacactaaattaacaattctgcctagagaagaaaaataagctaatcggtcgatcagcagctaaatagttttttttcttgggaagtagtaactaagtaccttttctccaactcttttccaagatatactctgtatatattataaaatcaacagtagcagtataattcttaactgtgg

SEQ ID NO: 33916 - DNA, 2663 bp, Oryza sativa
attaggataacattcttatttatgccagggcaaaataatggagttgtctaacgaatgatgattgatgaatccttttgttcttctctttctttttctttttccatccatgcagccgtttaatccgtcatttttaagtagtcaaacagctatagatcataggagtagcagttagtggtccaagatgtaagagggccgtgacaactttggcacacttggcctaagtcaactgctataaaaactgctcgaaaatgaaatagcaactagagtcagttctttcaacttaaatagagatttgtggtattgttttctaaaatttttaaaaaagaaatttgtctgtatttaggatattgaaatcatgatattttttatgagatttgttttccctcacacacatttataggtcactgcgccaaatcagcactgatggcccaaaccgtcaattgtgacaggtaaggctctcgtcagagatgactgattagtaatgactctacctcatctttaatggatgaaggcccgtcagtggaggtaaatatttgtgatgagtagtaacaaacacccgacaatgaggctgttcacctgtgatgggatggtattttagcttgccatcgaggacacttgtctaaggtgggttataattacaacctagtatcatatatgcatatgatgggataaacaaaattcagctcacacgctagtatccgtcactggtgcagattaccgatggagaaaaaaaaaagagggaaaagtccattttacaccctcgaactcttgtgcttatctaaaatacacccccgaactacaaaaccggatataatacaccctcgaactgtcaataccggacacttaaccccccagactgtttttaccgtggtttttgccacgtcggataccacgtcagccctagccacgtcagcgcaaaacataaaatgggccaagcccatattctctccccccctctctctctctccctctctatctctctctccctccctaccctgttcgctctcctctctcacaaccgttggcggcagaggtggcagcgcggagctgcgaaatcgacggctacggcagctgcgtagagctgcgagggcggcggctgcggcgtcggcgtggagccgcgagggtggtggcggcggggagctggtgtgaggccggcggcgctgcgaatcatgagcttgatgcccctcgcggaagaggccaacctcgcctgagccatacgcgcggggaggagtcatccctatgcagtgccgccaccgcttggtcgaggacgaggtcgagctcaagctctgcatccgccgccgcctcgtcaagctcgagttccaccggcgagctcgattcatggagaagatggagtcatggagctcctggaggcggcaggagaggtggacctttgagcttgtgctcgtcggtggtcggcgcggaagggaaggctggggatgtgcttgagctccgtcgccgcaacgagttccctgctccacggccaccgatctcctgctcagctccaccactgctctctgtctgggaggaagaaggatggagagagaaagggaagaggagatgggggaagaagaagtggctactgacgtgtggctctaatttttatttttagttttatttgctgactagacttccacatcattgacacgtagacaaaaaccagctgaaaaactacttgagggtgtaaagtgaacggtattgaaagttggagggggtgaaatatctagttttagagttttgggtgtattttagacaagacaaagagttggagggtgtaaaatggacttatccccaaaaaaaagagaacatcacaatccgggctcgttgccattgcatttgtcacgatcacaaattcacacaggaaggatggcaagaaatacatcacaccataaatttatttgcactctggaaaatgattacgaatcgacaatctgggcgcctcaagagatgctaggggtagaggaggggatggtgctgggacgttgagagatggcgacaggagcctggcatcggttcgagccaccatgaggtcgaaggccataagatcaggtgtccctctgacctcgggaaggctggatctgcgattcttagggcagcggaccatgcttaggagtagagccagaatgcaacgccattggtgctcaacaacggtggtggagatgacactggcgaggctcttggggataaaggagtcgacaccggtaggcgacacatggggatggaggaggcggtgtctagcggttaaatctatgtcccccgaccctgacctcgtagaggatggatccgatggtcgggggacaaaggaggcgacacttgcatcatggtggatgggaaagaggattcaagcctttaggggcagaggaagaagaaagagagagagaggaggggatggaggaagaagggataaggacgagacggggagggagagagagactcattaagggaggggagttgttttatttgattttttaggtcattactaacgtgttaaaaaatactctcatcacagatgagtacctcatccgtgacgggtgtaaactcaacacctgtaacatacaagagatcatctgtaacgggtctatatgtgagctcgtcaaatatgttttgtgctgagtctccatcacagatgagtccttccctataacagattaacagaccgtatccct

SEQ ID NO: 33917 - DNA, 580 bp, Oryza sativa
ggcgaattcgagctcggtaccctatgttactagctttgatgtaagaagaaaatagatactatatgtggatatgcatcttcctcatgcgcattatatcagactagcaatccagtttcatatttcagtggcatatttataactcactcgtctgcttaattagacctcagaactttcagttcacctcaaattcatctagcattccatggtctgctaaaagttagaatgccaacacagtttgacaatatttttgcttacagtagtaacaatagatggcatatgtgaaaaacacaggttgcattttgtaaagaagaaatatgtaacagagttgcagtggtgggatggtgtttagtgtctacagtctacacaggccaagacactaaaacattaagtgaagtacgtacccttaaaaagatacaaggttgttcaaatataaagcataaattgcaggatgctccattgtaggaaggaacaaattaatgccagattctgggcctaaacagatttctatgaaactttcaccaaggcagtgttttcccctccacttatttgctcgtaaagtaaaattactagccaaacatat

SEQ ID NO: 33918 - DNA, 627 bp, Oryza sativa
caacatgtttctctgccagcacattttgttaggtttaatttgagaggattctatggtggataaaatatcatcctgttacccatgctattacattatctacttgaacgactcaccaggtctaaccatgttccggatttgtagttccttacagccttagtgtgctagatactaatgatacatgattgtttcttgagtgcagaatcaagggacacttgaacgggatgatgaggtatatttaaggatgctagtttacccctatttaatgctttttttttgttcttttcacctgttttttagttcaatttaattaaaatttttagtacagttcctaaacgtttgtttcaatcaaccatgtaaaaagaatggaatgttgcatgcggataatagtgtctagaaccatatttgttgaaattgtacttctcactgagtggatttccattgttttctccttttaggatgtctattttgatgatgaatcagcagaggtcgtaatatgttctctgcgactgggagatgaccttaaaacttactttggtatcctctttttttttttgcccttgggctaattatgcgtttatgtatttaaaagcagatatgtgctaacctttggtatcctattttcagcaa

SEQ ID NO: 33919 - DNA, 580 bp, Oryza sativa
ttgtccgtactaatactacatactccctcctattctataataattgatgttttggacaaggttgaaatcaaacttttaactttgaccatcaataactttaaaaatatttagtttaaagaaactagaacagcatatatagatttatcattcaaagcactataataaaagtaaacatgcatttatttattgtatatattataatataaaaataaggtcaaagatatattttgtagaccgtgtcattgtccaaaatgccaattaaaatgaaaccgggagggagtactgttttgcgtgctactactctgaatgtcaattctgcctttgtgcagtttagctcactaaactggtaatttatcttcaaacttcacttatttgtgatacccttgttatgcatggtaatttttatggtatatgaatagcaacaaaaatacatcagtaatgagggtagagtgtagactgcaatatttggggttatagtctattttctctggttcattttcctaaacttttgatgatttccatttgtactaaatttcttctcggtcgattttgcagctatttttgactgcttcagcatata

SEQ ID NO: 33920 - DNA, 2693 bp, Oryza sativa
agagtggttgcttgagttgtgtgtgcctgcgtgtacagagctgagctgatatgtactaagccaagaaagaaaaacgatttttggtttggagctttcagagtgtgaagcttgcaagtcaagcaatgttgctgtatacattgccacgtgtgctctagtattgttgatatgatactacgtcccgtcctaaaatacttgtcgctttaagtttttatttgtaacttttatcattcgtcttatttaaaaaattacgaaattattatttattttgtttgtgacttgctttattatcaaaagcactttaaacatgacttatcttttttatatttgcactaatttttcaaataagacgaatggtcaaacgttgaaaaaacaatcaaagcaaccactaatttagaacggaggtagtatactactgtacttttatcaatcaaactcattttggacgcatacaccgtagataaaatcaatcaaactcattttctgaatgtgacatctgactgctgaacatctagtactagcactagaattgcatgccaatgagcctatcattatttgtccgcatcctgtcaacgtgatcctgaaccgaccaagaaatgggaaataattgttcgaagctcaagtaccaaacagagtttttgagcaagattagtaacagcgacgtaacagtaaatacaaatcaaaatcattgaacacttgcacatatctttatcaagaaccgctgcctggcttcctgagagaagagggtgaacaagatgtatttgtcacaatgcagctaaaatagcacgccacgttgttcatgcagacaccaaacaatgaaaatgtagaggactgattggttctgttttgctgaagtggtagcatcacaagggcactgtttagttaacaccaaacttcccccaaactttcaactttccatcacatcacatcacatccaaaacttttctactcatataaactctcaattttttttcaaactaccaactttctcaaaacttctcttgaatttcaggaactaaacacagccaaggattacaaacactgcctgtgtgcaagtgcaaattaattaatacagcaggcaatcaaacagtttgatccggtttgaaattacaaaccagtcaaacaatccatgcatgcgattttttagttaactaatactccctctgttttttaatatatgacaccattaactttttaagatagtttaaccattcatcttattaaaaaaagtaattatcatttattttatagtgacttgatttatcatcaaatgttttttaagcatgacttaaatatttttatatttgtataaatattttgaataagatgaaagatgaaacgttggtaaaaaagttaacgtcgtcgtatatttaaaaaacggaggtagcagaattgctgatgatcatccaaagatgtcacggccaacatgattgagaatggcatatataggccggaaatgctactgggcgaagggcgatcagattttgccccccctccctccctccacatctccacctggtttccttttttggcactacattactttcctattttagtaaatttatacacctaaagtttacacatctaaagtttagagaccaaaagtttataagtcaaaagtttatatttccgattcaaatttgaatttgaattcaaatatttttttatatatagtatttctatacatttaaagtttatagatctaaagtttataagtcaaaagtttatatacccgtttcaaatttgaatttgaattatatccgattcaaatttgaatttaaattcaaatattttctatatataatatttctatacatctaaagtttatacacctaaagtttatagatccaaagtttataagtcaaaagtttacatacccgattcaaatttgaatttgaattcaaattttttatatatatagtatttctatacataaatttttctaacttttttttaattttttatggtgtactgtagtaggaagagaagaagggaaggaggaatgggagaagtgggaggaggtattgcctatagggaaaggggggggggatccgatcgctgggcgatcgcccaggcgatcgatcgatcgtccattaggccccccatatataggcctcatgcgatttaacaagtaatctgactgtcggctttcattttgcagagtgaccaggcacgcagcgttggagtgatgctcattgacaagcatatgctatgatattaaaaacggaattgctaaaactctgtcgatagaaaatcctaccttaaatcttgcaaaatttggattactggatgtgcttcacgattcgtgctcttcttctccaactccggcgaccaccttttcttctccggcaccggcaaacctaaattccggtagagggccgacgaaatagggtctcggggtgggggtggggtgggggtgtggagggggggagttcaccggctttagagggatggccgtgggaggcggcagcccggcggtgggtggcggatcgggcgggcggcggtggcggcgccgaagccgcggggctggaggatggcggcgggggcaaagcggaaagagttgtaagaggaggcggacggtggtggcgcccgccgctagcgatggggatgacgacggacagctcacggccgccggcttgaggcaaaggagaggagagggagggggagggggaaggggagggggagggggccggctg

SEQ ID NO: 33921 - DNA, 677 bp, Oryza sativa
tatcaaagatgtacctcaagttagtttgtcaatgttaaataagttaatttgcaaccttgatcggctgcttgaagtggaagcaggtgattctacttgacgatctgtactttcttacaatgagaaccatattttgtatttctgaaaggcgtacttttgtatatattgacatgcagagagcattagcggccttccaaagactacttggagaagtctacttggcgcagcattatcatcatatcatgaattacagcttattaacaccagtataagttcagggataggccaaatcttatctcttgccaagaaacacagcacaagtccacaagtactatctgctatagctgaatacttggattccctgcatgggtaaagttatatgctctctacctttaaattctatattcatctaccatgttactttgaccatgtgggggcaattaaaactttttcctttgtttctgtgagcagagcagcttccctgggaatgacaggagaatgtgatccacaaaaccttttagatttgttctctatctttgctgttaacttaagcagtccaaataaggatctccgggttttaacattgaggattttatcctattttgggaagatggatcaacgtctaggcacagatgaagagcgtccacataagaggcaaaaaacagaagattctggtgacg

SEQ ID NO: 33922 - DNA, 512 bp, Oryza sativa
aagggaaaagaaattatcgctcaattaggatcaggcaatacaaataagttccagaactcatcaacacataacattgaaacgaggttaatcatggcattatgttcaaatatgaactctgcagcaatcataaaatggaacaaaaactttatcataagttcagtgattcaaaagattgatgtccaatggcaatgcccaaaaagggtaagagcctattgtactacaacaatgctacaccctcacaataaagattctttgagcaacgctgtcagtgcccaacgaatcggaatcttcacctcacaatgcaaatgcaaactaagacttgtatcaccagacagaatcacacaggattcatttgtaacaatacgccagtccctttcatgccatacgcggggctgatccaatcctcccccaaaaatcagtaaaacctaaccaaatcgtggccacagcacacccaacagcaccatccaaatccgccgggagcagcagagctacgtgctcccccccccccccca

SEQ ID NO: 33923 - DNA, 837 bp, Oryza sativa
ttacgcccaccccttggaaaacatcgtttgaaggtactggatgatgcaatgctcatttacaaattacaactgaccatttatccatttctgcattcaatgattatttcttgttctgtacaaagtcatttgcttaatggatggatctatgcatttaataaacatatttaaattgcctagatttgtttaggtttagtcattttgttttgtagatttcagtctcggaccagatggagtacagaaaagaagggacccaggacctgtgccagtctggtccacctaattggattgggtctggtaaacctaattggattggtgctgcaattggcccagcagattgggcgtcccagtatgatagaatgtgtgactcgaaccgtttaaggccatttaaccaattaattcacagaaatgatgttgccgccagggattgaactcacggtctacagctacggcatttacacctaaactagttgagcctagctcatttcttggtttgcaggagtgtatatttcaatatatagaacatatcaatagtttttcattataaaataaaaggaaacgtggttcgtccgatgacctgataatctgatcatttacctggtgcccgtggctgggtcattcactaggctgccctcataagactgagttttggtatgttcatcaattcatttcgggtgagataggaatatccaagaaaacagagattcatgcatgctcgagtccttatgacatcaagtgttcttttgtcattaacctttatctgcagtgtataactcttcattctttttaattttggcattgaaattctgttttggtgattgtcgttattttttttgggtg

SEQ ID NO: 33924 - DNA, 1574 bp, Oryza sativa
  unsure (1)..(1574): unsure at all n locations
tttgacgctgaacaaaagaatcatttttgaaataagttttggcggcggttaatttgtaaaattagatttttcaaagggttaaattgtcaaaatttgtgtgatacccggctggaagttctgtgcaattttgttcatttccttcttggaactacgaaggcgcgcgccatatacagttactcatactgtcatacacggccacacacctgctgagtgtaacagtgtaacatacacaaactgatggagcctagcggcaaatccccaaccacagtgcatccttattgaaaatgcagctacatgtgcgtaaaattcatagatacactaaggctgatatcttatctctactttcccaactcatctctctcgttttccgcgcgtacgtttttcaaattgctcaacggtgcgttttttataaaaaatttctatataaaagttactttaaaaaatcatattaatctatttttcaattttattttagctaaaacttaattaatcatacgctaaacgctgcttcgttttgcatgctagggaacacagcctaagattcaatcgtataatggatgaagtcatagatcacctacaactctaccatagttacgtaccactcatgcttcctcatgcaattttattctgatctcgtttacaagacaaccaaattgcgggaaggatcgcactcattctctccggctaaccctaggaaatatgccggaacatttttagatgtttcaaattcggtgattgtattggctacgtactggtcaatcaagttgtcctattagttcaaatgcggcaatcgcctaattaaactgatacatacaacatatcgtcaagtttcaggtgcacttatgatgcatatttactaacaaatatacaacaatttacatgtcctaatcatgggatatgatgtataactcctaaaaggaataaaaacccatgtatacaaatgcactcaatattaatttcctgttatcaactaccaagggcatgtacagatatagagttatctaaccattaatgtatcaatattttntgnactcttcttttctttcttgcaccaccatgcaacaaaatttactctaataaatttaagaggagccgttgtcatacataataaccatatttctcttttctcctttctcttttttccatgtcatcaaatttacttgcatggtaataggaagagaccactaataaataccgttgtacatgccctcattaaatccaaatctatctctatctctagtactcattaaatcaatcttcagtactcaacaactacacctttaatctaaatcttctagatattattcactatatcttttactagttaatattgtatatttaattcttcatatttcatttatgtatttactactagcaattaatgataagtcactcatttattatagggaatacttctatatatattgccccctcaactattaatatgttcgtccaaaaacatcacccatcttacaaatttggtataccatcaaaaccgtttaatttatcccctcttggtctaaaatagagttgtttttgtctatgtggcagtcgaatgggacaaaaaaaatcaa

SEQ ID NO: 33925 - DNA, 676 bp, Oryza sativa
tgtaaaaaaaaaaatcccaaaaatcaattgggaattgggttccattggactcgtccagaactttgggtagttttctgtcaacaggaattttggaggagctggtttacgaaagttttaaatctatgaacagcatttccccctactacaattaatttgcatacacatttctactcggtggcaccattgataagtagatctagctttcagtacatctttttatgtttatgatgagttcaatcatttatacaatgcatctttgctgactatcagtcagattatattgaagaatctatatttgttgatataagctggacacttgaagaaatacatttcagttgacataggttggattattgactgtttaaaaggaattcaataagggctcacccaaacaaaagaatggaatagacaatgaagtgtaattaggtttcaccgcacgttgttaggaaatgcatgggttcaagttgtgctctccaaggtgacatggatgcaaaatgtagcctacctagatctcgtttagcatcttcaaacagaaatgttattatgccgcaaggcatacaaaatacaagaatttggcaggtaatcattatataataagaacttgtggacagtcaatcttgttactgatagtacccatttttcaatttatatggtatctacctattatatgcataaa

SEQ ID NO: 33926 - DNA, 2047 bp, Oryza sativa
tagaatattaatttttggttgagtaggagaaaaaaccgtgtgaaagttctgaattacccatgggcccacatgctaggcttgccatctctctatccttctctctctcgtacatggaatccgcatataagcctctactatctttttccccatctacttcctctattcctctcactctcgcaggaggcaaaggtgagagagtgtctcggtgaccggcgacggcgaggcgagctagatgctggttgggaatggtggatcgtggaaggagatgagctcctactcgacatcatctgtcatagtccactcggcatcggcgcgctcctatgggtgtggcgcatccacacggttcacgctgcagcatgtaagcagcgagggagggggggcccaaaccatgcaccgacatgggagtaagcagagtcatggagaggatgggctccattccccccgggtgtgcgactgtgatgaagatagtcagagggtgacgatccagctcccgacaatgggtcttgaaagcagggacgccacaagtggtggagacctaagatcgcgtgcgaaggacgactcttaccacaacccacaggcgccatgcaaggaggagcttggggcggtgaccggccagaggcgcaggtggtggtagacgagcagaacgggaccaaagtggagctgcacctactcagatagtcagatccaatggttcacctattccaactagttgccgatgaaggtaggcttgttattgtgtgcttggcgatgcaatgaactaggcgtgcaagagctcctctccttccacagcaggcagcatgtgggttcatgtgcgagagagagatagggatagagagatggcaaacctaacatgtgggcccagtggtaatttcataattttcacatgatttctctcttattcaatcaaaaattaatattctaatggttgcggttcccatgagctaatttccacgcttccaaagtgtcttcccctaaaaatcacttcgtgtggtgttctacaactaaaaacgcgaagtcacaataccctctagcaaaattttccaattccttttcgtcacgagtgagaatctccttatttgacataacttatcaaattaataagtatcacaaaatataaaatgtcctaggatttttgaagaggtttaggtaaacaagaaaaaatatactataatatctctcgttaaatacttaaatgaggaatatgtaacgagtgaaggtggttggagataaggatggatgaaaattaattaaataagatgtgattatatgaaagaagtaattaaccctattttcttatattatatgacaaattcatgataagatctattttaaggctgtgttcggaataatttgttcccaacatgcaatttgattttttaagcaactttcctatagatttttttttgcaaaaaaagtaccgtttagcagtttgaaaagcacgcgcgcggaatacgattgggaggggttgggaacccagggttccaaacacagcctaatttgtgatgagtgatatctcggttcaattaggatgtggcctatgttacccatgagcgttgtgtgcccttgatttatatgagcaagagtagaatctcttataagccctccaaccataccacttcctttttttaaggaaatcatgccattttcggattaaccattttatacgaagcgagaatgaaagtgtaaatgaggtgctatacggatggttggtttgcggttctggaggatgggttgtccatcccaccatatcgtttttgggttaaccatttacacgaaatgatgatgaaagtgtatgtgaacatgtctgtcgaatgaaagtataagtgggtctacctgttggatgggctcaatactacttccaagttaatcatttgactcgaagtgagaataaaagtgtagggggtgctatgtgtcagtgttggaattaatagatgggctaaggcccattcgaagattaattctttgggaaatcacaaaagcccacctcatgggatggcatgcatgtggagtttagtaccaccttgcttattctagaagagggaggcct

SEQ ID NO: 33927 - DNA, 784 bp, Oryza sativa
tttaagtttagcttctttttgatttttttttttgctttcttatatcctataattttcggttgttagaagacaatgaaaaggaaaacatggcaagggaagggaattaggatgttcatggttaatgggttgtcagacagttgggagtagaattcagagaataattttatacattttgcttcctgctcatgatcaatgctggtttatgctctgtattctgtgtgttgctgattgattatccatttatccattgctactcactttccaggatactgtatcattctcttgctcatctcatctctagtaagtatattcagcttaattccatcatggtagaactgaactggaactgaagtgaattatgcatctcaatgattcaagggcactagtatcgaggacggcacattcagtcagacaccgattggacactgccgcattactgtatcttcagggctggatggacattggtgtttgttaagaccaggaatatacattttgcagtgacagggacagagattccattcatctgcagtgtgtgctctgggcatgccagacaagctcaacatgcggcacgcttcagtaatcatagtcattagctgcagtgtcatgcactccctccgtcccaatatattaaaacctaggacatgatgagacattttctagtactacgaatctggacagacctccgtcccaatatattaaaatctgtccagattcgtagtactagaaaattctgtccagattcgtagtactagaaaatatcccatcctatcctaggttttaatat

SEQ ID NO: 33928 - DNA, 558 bp, Oryza sativa
gtgagtcctgaacaatcaaacagctaagttgtttcctaagatcctcccacaagatcaacactccaaaatgcccaatccttgtatcgcgctccaaccacccattcgtgcatccactctcttcgcgctccgtcgcacgcgcgccggctccccttttgccgcccaccttccaaccctgctcccttcgccgccaccaaagtcgtcgtcccattgctcatacgcctctacccatcgcaccgatccacactgccaccgatgacgatttcctccgctcatcccctaaccaccgccccatccctcccaagtcaaggtacacggatgttcgcgcaagggataatttcaggttgacgtggcatattcgccaaggtgtagtttgttagagttttgtgtcgaatatgtgtacgtagtcggttgcaatttaggacttggagttgtaataggtgtttggactagagtaagagtcagattttatcttggttgtaaccgcaagacgacaatagcataggtatggatacgactgaccgacggcctagccgatggagggtcgtgaatacccggata

SEQ ID NO: 33929 - DNA, 647 bp, Oryza sativa
cgcggcgcgcgtgcgtggacttgagggagggggtggggtgatcgcatgtcatggtcgtggacgaatcgcgttggttgggatgtggagtgacctggcggtgtgggccaatggggcttcgacgtgtccgaactcgagtagctggggggccaattaacccaacgcaaccatcacgctacggaaagggcaagtactagggtaccgagtaactacggctactcctcgacggtccaatgcgagaagggcatagtaaggccgtggggcgtcgcgccgctggctggggtgtccgtacagtcggcaaccacacgcggcagcgagaggatatagatcacagtacacaggtcaccccgcggcagcgcgagcctacctgggcgcgccacgccttgcatgcaggtacgcgtctcacgggaattcgcgcgctggctccgcttgccccgtcgctcctccgtactccgctactgtctccccaaatgggccatgccagcccgtctccaactctccgtgcatgtatgcctgccaatacttcggtttggataattttagtctctctcacatcagacgttgagatattaattagaagtattaaacataaactaatgataaaacctattccaaaactctggactaatttacgagacgaatctatgact

SEQ ID NO: 33930 - DNA, 506 bp, Oryza sativa
aacgatccttcttgtacttgatttctgatgattgacattcgttgtttttggtgattgattatattgtcgtacttcatttttgaatgtgacggagataaacctccggggtacgccctcgagacgattccgtttactatgatcactgttattttgatgtaaattatatgccgtctgagagagttcactcccgcgacatttgattattgtgtgtatgttttgtatacaccacgaatgattatacgacccttgatatttgtgttgatcatctatactaaatcgttgatattaatcttattgtttgatagtgtggtttgttcctcgtgagatcgtcaagttaaggtacgacccccgcccggggagttctacacatcggttgatcagtgtcctcttaccttctttattaagcagagtctcgtactgtattgcaaatttagtagttctatatttctgccatgtgctgaatgtacttgaaaaatgaagttccatgattaatgatgagaatcagt

SEQ ID NO: 33931 - DNA, 732 bp, Oryza sativa
ttgtaaattggaaaataagtacaaagtgttgatgaaaatgtttatcttttgttagtcgtaatattaaaataataattgtgtttatcttacagatggattttactttttacattcttacatgtgtgatcagtacgcaaatatatctcattaccggggaaggtttgtaatttcctctttcctattcttttctattccaattctatttgactattttatgatacagtgcgaatcacaaaaaatgccaagaaggtataaagtaactctttatgaataatacatttgtgaaaaatgtgtatttttaaatttgaaacaagaagattgaccttaattccatatgtcctcattttgttataacaaaatcccatcttggcctatgtattaatggtttcctgaaagaaagaatatattcttttagtctttcatctgttgttgatatttcgtgagtaattccgcaatgcatggaaatatcatcgcgcgatttttgaattctttctctcaagtcttgcatatttttaaccgatatttcacggacattgcatgtacgtttgcggggactcgtgtcttcttctgtttttaaaacctcaagccagccccaaagttgagaattatgaaccttatgcacaaatcaaatagaaaactgtaggttgtattaatcatctctcaaaataatggatgcattgtcaatgattgtttttcattgagatggaagcctcaaatcgcagggctgcagga

SEQ ID NO: 33932 - DNA, 526 bp, Oryza sativa
ttatatctcagcgccaatctctatggcgctgagaaaacagcctatttttgtaattcgtttttggcatgattcaattttgaaataagttttttaaaagggtcaaattgtcaaaattacggtactcattgtatattttaccccttttagaagacgtactcctcattttgatggctagaattcttgtttggtattttgtcattttgtgaatccaactgccattatttgatagatgacatgactcattttggttgcttattgagtttcaattttcacttaggtagatgtgtaaattactttcccaatttaattaatatatatagtccagtactactagtagcctctcctaatgtttttcatcaaaaaatattctaaaaattgaatagttattatatttttaatcatgcttacagccaattctcgattcattttttatacggaattcataacttctgcttctatttatcgctagtcattttcaccgacatgtacacgattcttgcagggtcaagtccgatatgcaacgcat

SEQ ID NO: 33933 - DNA, 563 bp, Oryza sativa
tctgcaaacatgcattgtggataggtttcgggtggttcatcatcaattctgcagttgaaggagaggctagaaaaagaagtacttgaggtatattttttcttcagaacaaactaggactgccctggcctcatcctgtttatacttcccatttttaaatgtgcaccattttatagcctgtgcagccaaacttttaaatttttaactactaaagtacattgaaaatattccggggttgctacatggagaagtagtggtaggtttgcctttttcatgaaaaagtatattttatcattatatgaataacatataattataaatgcagaacttagaaacagttaaagatttgtggttggagtcctttgatgtctctaatgccatctgttttcaaacagaggaaacaacatataggagtcaagcctatgatctttttctttgttcttgtccaatatggaaatacaagaataaatgaatctcattttttttcttgggatagttaataacgggccagagtgcaagttaatagaactctattctgttttcaggctattgaaaatgtttcctta

SEQ ID NO: 33934 - DNA, 642 bp, Oryza sativa
tttggagagtctaatttggagatgttgttggagatgctctaatcttcttgggctgtaccgcaggtatttgcctattaatatatatactccatagtactgatcatttataatatttaataacgaaatttggttgtaacctacctatttttttcatattctcaccagctgacttcttaccagctgtttctcaaaattttaaacttatctaaataaggtctatatacccaattataatcgtaaatctgcataaaagataatatgttaccgacaacatgtcatgcatcaatttttcccacctacctattctacccatctccaccttctatccatctctaattctactctagacccattgaataggtaagtattgagctcatgagtagtcaatgctatggctatggatatggcgtagctagccgtctactgctggcctgcggctagtagttggctattagcttaccttccgatttttgctgctgcagctagctagtgcagccgagtaagctcagtagtaactataacctagtcaatacaccatgtttgttatagaattgtttgatttttcaattacctgaaaatacccacaaatttcaatcacctttagatggtatagattatgctacaactcgtatgctacagaaa

SEQ ID NO: 33935 - DNA, 954 bp, Oryza sativa
tgttatacatatatactctggctaaccatacaagaaaatcgatctatgtatttaaggtggtatttttaattactccctccgtccaaaaaaaactaattctgggtttgaatctatgtgtggtttgaatctatgtgtctagattctctatgtccagattcaaacccagaattggtatgtccagattcaaactcaggattggatttttttttggacggaggaagtagttttctagtctttagttatttgtcatgtaacctccataataattggttagaatgaattaaattatttaaaaagatctcatattagtcaagaaagatatactccatccttcccataaaaaccaacctaatactgaatgtgatacatcttagtacaacgaatctaaatatacatctgtctagatttattgtcataaattcgtttttttttggatggagggagtacgcatgttgctcagatcgtacatggtaggtgtgatcatgtttgcagatttccagttcgatttctaccagccgcacgccaaaccttcgatccacgcatatgcacctagtaaaacctgaagatagatcgatgtgacttgcattgagaacgacatcgatgcacatatatatttccacatgcatgtcaccagagcaaaacgtgagaaattgccgaacgaacgaattgaaggcatgtgcttattaattgtttagcacgtacgacacatatacacgtacacgtgttcattgaagtcgtcgtagttgcacccccgccgttaagcaacaccgacgcgatcgagtcatatgtctcgaagaccaagaaacggctgtgctactgtgctcccatgcaattgtacaccgtccagccaaaactgtggtgatcacgacagatcgagatggcctccgtccatataatcaatgatcaagatgcaattaattagctgcggggaagcatagatggtgtggtggtgtg

SEQ ID NO: 33936 - DNA, 659 bp, Oryza sativa
aacttaatcatatttttgtcaaatataggaactaatatagaaaaataatattaaaggaagtgaaaccagcaacaaagaaataccatgttagaatttgacaataccatattttctcaaatttgacaataccataggaacaaagaaataatattttctcaaatttttgaaattataagtagtcaaatgtaggaaacttaatcatacttttgtcaaatataggaactaatatagaaaaataccatgtaggaaacttaatcatattttctcaaattttagctcataacatcaataatttgagaaaattcctaacggaattatataaaattcttcaaattgattgtatcaacatatcaatgatctagtaaaattctggaaaagaataaagataactaaaaatgacaatatgcatatctcatacaatagataaaaaatattaacaaagttccattgcaaaattaatggaattttaaatagttttatgacattgcaaaaatctttcggttataccggtatacaactattctgaatatgtaaaagtctttctgaataccgatatacaactgttcctaaatttgcattacttttcggttaatgaattactattgattaaaaaaatatcacatgccatagagcaataccaaaaagaaaaagaaaaggaa

SEQ ID NO: 33937 - DNA, 620 bp, Oryza sativa
gatatggggaattttgtcaaggcgggtcagggtcacagcccgtgcgtcgcgtcatcagaaaaggggcagggcccgggcattgccaggccaccacctgaaggccatcagccaacacccagtactatccagctatagcgttgtatagcctcttcttgcatgatcaatcaaaatctaatggatgcaagctagatgtcacagttagggcactgtcgccacaatgtcctctcttggagggcatatacatgcactaattattattaattcttggaataactagtctggatcaccatgattataactccctgttaaatcctgacgcgacagccagatgaacagtgtgactaattgtgtgcatatggattagtagttaatttgattaattctgcagccaaattgacctgtgtttatgttgatgatgatgatgattatgatgatgatagcaactgcagatgaattcgcactctcgttcgtacgtacgttcaaaaactacgtcccaactaatgctagctgatgatgaattagtctctccgggctccattgatctttcttgtgtgtttgattgatcatgttgactgcagaaaagtattggagctttgctgtatgttcgttgttgctgtacg

SEQ ID NO: 33938 - DNA, 645 bp, Oryza sativa
ctaaccatctactattagtagtaataatttactactgctcggggtggactaacccctgaatgatggggacggtttttctaggattatgttctagggaccagtactgacttgtcggatgcgggttctatagctggaaactacaaagggatctgttgtaatcgtgccttctgttgtttattatatttgtagttacctaaaatgcacttaaccagttcttcattgagctatagtacagcacatcgtggtcctgaattgtagaagtggtacgtggcatgctatttgtcgcaccctagcaaactcatcagctcgagactagcgcctttcggcctacctggacgaatttttatacctttctgtcaacaacccaagggatatgtcacgccatcgcccatcgatgatcagctgacggccaccgatcgtgaaggcgagaggtacaggataaatactatccgtgatggctgcgtctgcattttttttttgtttagcattgttcgggtgactatttatggcagcgggccagctgctccaccgagctgaagcctcgtcaccgcccacgtacggtgcggcgattggctgggcttgcgctcgccggagacgctcctgatttaaattaatcgaatgatgaggagattttgttccagctaa

SEQ ID NO: 33939 - DNA, 511 bp, Oryza sativa
ggcagaagagcagtactagcatctttttggttgtagtactagctctgaagtctgaacattgctatcaggatcttgtttgcagaatacaatgtatcaaatctatctgttttcaagcatttctttttgttatctatggtgctttttagatgcctgctcttcttttaaaaaaaaattaaggattagatcatctcttcttttctgaagtcttctggatgacaagttggctgacaagtgaaaaccgaaaaaaactgaagtgctacttgttttcaattgaaaagaaatgcaaaataggatgtggcttgcacgcgttagtaactgcatggttagactgccaaacaaatcgcttttgattaaggtgtagattaatacaagaatcaaagattgttagtttttggtcaaagctagtacctttacagaatccatctgccctgttttgtcaaagtaagtctaagttggctgcaagctctgcctctagataccttgagtaaattctctttttaagattagcatt

SEQ ID NO: 33940 - DNA, 588 bp, Oryza sativa
ttagcaaaaatatgtcatgcatgcatctaccatatgtgatacttctacactgaaaatcagcatcagtcatccatccaccaaataaagacttcatacgcttacaatcctacctctaactattcatacaaaatgagacatgagccaaaaaaaaatgttgatgagaaaaagagaaatgctcacaaagaaaaagagacaaaatattctcgagcatgaaaaaaagaaaaaaaaaagggagaaaaatagccatgttcactaaataagtgcaaggaggaggatcatacaaaggggttatcatttcactttcacatttccacacacatgcatatcttgatcatagttttataactagctatcttcttgaatccgatttttgactttacaatgtatgttatacaagtacgccattcttattttctaccatgagctccacataagccttatgacaagtagaattagaaaaatgtacaatcaatgtcatggtgagaagtcgtacacattgagcgatccgagagaatcaattaaggaaaaaaattaaagttacgttccttatcagcaaaaagaaaaaaaacaaattacttgtcaggagta

SEQ ID NO: 33941 - DNA, 630 bp, Oryza sativa
atctttaccactggttggcaccatctgttgtcccagttatacaaccggaacggtgaattcggaataaatatcgctatctttagtcccggttcaatcgatctttagtcccggttggtgtgatgtggtcccggctagagggttttttccttcttttttttcttctctctctttttcactgttcttttgctatttgcccaaatcatctcagatcaaacattcatcattcacggtaatatagttcatcccaaatcattcacaacaacacatattgaatcacacggtaaggacaaaagaaaaaaaaatccaaaagcagcgccggcctccaccgcctaccgctgcactagccttcgcaccggccgcctcccccttcggatccggcggtggccggctgcctcccctcccagatgcgcagccgcccggccgccgcggtgcgaggccgccgccgccgctgccgcctaggggaggaagagaatgaggagaggaggaggaagaggaagagatggggtgaagaggaggaagagataaggtgagggtggaggagatagaacttattaactgatccgtctcctcctcctcgatctcacgcatgcctcagcccctccgccgcgcatgccaatctttttttccggt

SEQ ID NO: 33942 - DNA, 680 bp, Oryza sativa
tcatcaatatttttttctacaaaatcacatcattaaaaactaacaagtaaactactttgctccacagttacctgattcaaaatttttcattgcaattactatatttgtaataccttttataatagagaaaattcctccatacccctgaaattttagccgatcccttctatgcccctgaattctcttcactccctttatacctctgaattttgatttggatccctttcatacccttgccgtcaattgaccgtttaataggtatagaaaagtcagttttgcccttcaatacatgaggaatatgtagaaatttgtagactatattgttgaaagtatagaaatttgttgtgtgattataacattcgtaagtttgttgtacatagacattttaataaatattaaaaagtatgtatagaattttctttaaatgataagcatagttttggaaaacattcctaatatataggacaggaaaaaaaatgttgatctaagtaccataaaaaatgctacatatactcttttaataagtaaataaatattagttttttatgtcattatgtaaaaataaactttgaaatgaataataccttgtacaataaaatcatgaatataatagtcttatataacaaaattatacacttccaacaatatagctagtctacaattttcagatttccttcatg

SEQ ID NO: 33943 - DNA, 1002 bp, Oryza sativa
tttttattctgaattttaattaatctcgtattgggttcttatatggactcttctttcattccttatatttcattcgaatttcagttatttttaaattgtatttttacttggactcttcttttctttttttccgattaatgtgggaatttctagcccccacagtaaacgtggtgcctccattcaaagccgcgtaattacgcggctagcacccatataaaattatatactttttaatatgattttacttaaaatttattaactagttatcttgttgtcttaagattttgaaagaccaaacctaatcatcctcgtgtttctaattttatagtttttaaatgtcacatagttgctaccccttacttctgtcagattattctttattagcttgctcgatctaccactatttctattcattctccttggaacctttaaaaaatggatctaaaacttatagtttgagtttattgtccagttgggcttctattttataatttccataagtcccgtcaaatgctgatctaccactatttctattcattctccttggaacctttaaaaaatggatccaaaaacttatagtttgagtttattgtccagttgagcttcttttttataatttccataagtcccgtcaaatgctgccattatactcctctacaaccgtccaatgcatcttctctttattgcattgctattttaaaaatcgaacataattatcattttggttcattttttttactttctagaagttccgccaaaacgttagcgactttgtcactgtacttctctatggcctgcccgctgccgcccttctttattgtcatcgcgattttaaaatcaaacatgattattattggggtttatttttttattttttggaagcctgaacctttaaaaattgaaccttatagtttttagagtttattgtctcgttaggtttcatttttataatttctagaaatcccgtcaaacgctgccactatacttctctatggctcgtcc

SEQ ID NO: 33944 - DNA, 620 bp, Oryza sativa
ttctggttacaccgaagtgattctcctccgcttcctctctctattccatggattagtttgtgtttttgttgagtttttgatccatggcatggaaccctaggtgaagcacgaggtgttcttcaatttgcaccaatagagggtagtttcttggtgtgattcaactcctccaactggtaaatccctctccctcttgtgcattctctcaaatcgatctatttcaccctagggctatgggtagttgttccaatcttgatgaaataggtccaaccctttgatgttctagttccactcttgtgcaatattgttctagcaatttttagactcaaatgagtagatgtgaaaatttttggatgcttgaacttgtgggaggaggtctacctggagccacaggcggtctgaccgtgggtcagccgccggtctgaccggcgagtgcgcccggtctgaccggctggcaaccgtctgaccggcctgatgccgtcagacgccctgctggctgtggtctgaccacccctccataggatatagtcaaattttcacctctccaaattgtttctagaattattgctaatatctatcatcctttactctttgacagtgatgcctccccgcacttgccatgg

SEQ ID NO: 33945 - DNA, 575 bp, Oryza sativa
cagcacagatgatgcagaacatagcggcatttacacatcagtagaacacacagtgaatcgatcctatctctcaactaattgatggatacatccgtagccgcatgaagcacaaatgcacaatggattgctgttagctattcaaatgattggagaagtatgtgctcttttacctgaggatcggaaacggaaccggaaccttcaacttggccggaaaacaagggcgaagtagccgaggccgcccaagtcgccgccggcggggggatggcgacggagccgggacggaagaagcagcccttctagccgacgggaagagcgcgcaggcgaggagaggaggatctcggaggcagcgaggtcaccggacccgaccgacgggcgagcgattcgacggcgacgagggcacgcaagcggaagcggcagcggcgacggcgacggcgacggcaacggcgaggaaacccttgccgagttgactagccttgtctggaattctggatgggccgccagataattaccaggcccacataaacttgtgggtcttaacagaggtccattaaaaagcttaaggaataagttcactt

SEQ ID NO: 33946 - DNA, 569 bp, Oryza sativa
ccaatatgatatctgtgaaaataaacaaaatcagtgatcaagtctagacatgttctttttcttttgaaaaatggtacataaactgcagcaagaagtgaactaatgataaaaactaacatgttcaacaggtaaatgaacatgaaaataattgtaaatccctacagctctggtgtcatacagtcataatttaagataagttagtgtagaaatataaatgattcagccagaaacacaaacacaacaccaactgcattattacctctagaaaaaaagagtctcttagggattatgaaaaaaaactagtcatttactcaagtaactcagctttctaaacaagatttatcatgcaaactccaaaagtctaaatagaggaagaggcccaaaatatgatataaaattacagatggctcactaagaaagctgcaaatcactggccatagcatgcccatccacaatttatttgatactattatgccagttccaggatggcatatctcgttataaatggttgagaaagtcatggtctatactacacttgtattcaatcaacaaattcatttatagcgatc

SEQ ID NO: 33947 - DNA, 539 bp, Oryza sativa
gtatcatttagcgagtccaaactttcgatgtgactgggtgaaaaaattgatctaaacaagtccagaatcaggatgtcaaccgcctattgaattgcattgctatgctaaacaaaatgaaactttagcatttacatacgtacgtgcctccttagtttattatccatgttgatcgtccttttttttttatgtcactgtaattttgtaggggacttttccggcaaaaattttgtagggggctgattgttcatttgtatctatgcatatcataggagtgagaggttgttccaacaagaattgagaagagtaaacaaatggttatatttttttttgtctaaatattgtgagaaaacgagtatagttcatctttctggtcccttgatgaacagagaactctaatgttggcaaagtttaacttcaacatttcttgatcaatctagcgactttgcttgttggcaaagtttagtaggccataaaaagtttgttgatgatcatgtgctctacgacaatattactatggctagtggatataatcatttgtc

SEQ ID NO: 33948 - DNA, 511 bp, Oryza sativa
cctctccgctatcaaacatattctcgttcttgcaatctgcacatggacaacacatgtaatcactgggtcttcttatccgatcctcctccgcggcgttcataaaatttattacgccctttcggtactccgtagaatgacgtttcaaatttttggcatacatccaacttcgatcaattgctacaaaaaaaaacaaattagaggcacatattataagatcagtattgcaaaagtaagacgtgatgaaattgctcaattaatgatttatattactcacttgattgatccattttgatcacttttgggaatttaatttctgctttccttggaaaaaggacaaaaaatcgccccctacagcctaccaccaaaatagtgaacagtgggatacagttacactagggggggggggtatttatacttggcaacaaatatctggaacggccctaaaacaatcaaacgtgacgggcatacaagttatctctatcgggccttaaaaaaaagaacggcaaaaaag

SEQ ID NO: 33949 - DNA, 733 bp, Oryza sativa
atatacggccgtatatattttcagaatgtatatagaaaatttaccatgatcgagtacaacattttccctgtgtttttttttgaaaaaattattgtcacgtttatgacttattcagattgatgtcattttaaaccataccattttttttaaagttgccaattatgtgcactgtttagtttcttaccaaattttgataaaatacttaaaaaatttctatcgtgcttagatgaaatacttagatgaaacatactatatttgctactactcggaagacttattcgtactttcgtggtggtggtgacatatgtttagagtttagacacttcattagttgcgggatatatttattcctccgtggagatgcatattttttcctttcgattaaaaaatatatatacttcttcattctataatataagacgcacatgtgttttaggattgaacttttaaattatttaacaaaaaaaatactataatataaattgaattttatttgctaaaagttacattattgaattgatatttgaatttatttttatataattataatttctttgttataaaacttataacatacgagaaattataagcttaatattagttttgaagatcatttcaagtttgaccatatcttatattatgtttcaattttaatttttaaaatatttatcattattattttattatattgggattagatgttacgtgactgaatcttatcttatatagtgaa

SEQ ID NO: 33950 - DNA, 672 bp, Oryza sativa
accgtcaattgcattgcggatggcctcgaaaggccgtcgagtcgacgtttcagatggcggatcgacgaggaaaagtctctggattgattcggcaaccattgacaaaggggaagacatcatgcggtggcgtccgggtgtcgctacgtacaggcggcggcggcggcgcatgcaggtgccaatgactcggatttgttaccatctacttcatacagataacaatatgacggattattaacatacaagtcacaaccgacacagtgtcccaagcgcgctgatccataagatcggcgatgacaagtgtattaatatattcgtagatcaacgactatgttagccagatagacgacaacttctaggtggtgtcgtgtgttaccgagtgtgaggtgtcgtcgtttgggatagcactccgtcgttcaattaaacggattatgtatgtgcaccttcttgtgtacacggtaagcgcgttcgggcgcgtggtgctgaacttcgtggtcggcaatataacaagagaagagtcggcgcaaaggccggacaaatacatctattcatgcgagaaaataaaacgactagaggcatgatctagcatattaatctcgctgctgctaatttttagaattgatcaaatcgataacttatctcgtttaaccgacgtaaagttcggggctgcaggaa

SEQ ID NO: 33951 - DNA, 720 bp, Oryza sativa
ttgcaaaatagacatattcctcccccttttcacgccaatcataagaaaatttacaaaatagttatcgtgaaacccacatatttgttgtaacttcatggtacaacttttctaaaagaaataatgtggttgcgggtggatatatttaagcttcaatgcttaaacataaatattctaattgttcatgtgcataagtaaactttacatgtatgccaatatggcgtcaatgcacttagaactatcaacctacatggttgattgaggcttagtggataataagaatacattcgccaaaaaaacttcaaataataggcaagacaaatatttacgttcaatgttagacatacaattcacaattttattccacaaaaggttaaagaattactacaagtaaaaaaaaggcaatataggtaaggtgagatgacctatataaaaaaaaattcagtaatctaatgcagaagcttctatgactaaagcaaaagataaagatgctctacatgagcttaaccatgttcttcatattgaacttaatctaaactataatgtaactcgtgtattgtaaaatactatctcaaaagaacgaatgcaagattactgtcattactattcgtctccccctgagttgaacatcaaattcaaatataccaaattcctttccttccacaaattttgagtatgcatgttcttcatgaacatattaatagtataagtcatatatgtgcg

SEQ ID NO: 33952 - DNA, 880 bp, Oryza sativa
agaaactttaattagctatgctttgcaagatacatgaaaaatatcagtaggtttttcaatggctctgtcacatgtatggttccaagttcactgcaactgcaagtgatttgatctgtgcagctatcaaatgtttcttaagcatgatttctcttttttgttgactttgtttagctagagagttcctcatttagctgttgcatagattctgctggttgattataaggtcagggtataaggcatgatggataaaatgagctagggattttgttgctgaacagtcataagacatgatggataaacattttttgctggttagcagcttgtgatactgttatctcataagtcatatcttaactagtgagtttcacatttcgctgttgtgtagattctggatagactaagattctgttaaataaatctgggtatttattggttgtgaagcaacttttacgttttgtacgatacattagtaggtttttagctgaaacaaaaggcatgtttatttatgctccaatacggcgtccagtcccccgccgccaccgcctccgtcgaaccgtcgctggcacagggaggactccgcggcggactccgagaacgccgctgccttctccctccctcgtgcagttcttgccgtccccaccgattcgccaccgcgacgcagtccactccgctggtcacgatctccgttgccgtcgcgatgcaagtctcccctctaaaggtacacatgatccactccagcgccactcctcaatcagtcgccctgctgccaaaaacatttagctgctattcagtttcacaacagaaaatgttcacctctttattaatacatttagttgttttttgggatcaaactaaaaaattactccgtggcatgaggcat

SEQ ID NO: 33953 - DNA, 809 bp, Oryza sativa
actcaaattatgtaataatcgagtccatatgcctatgagaaatataatttccttactgaaattgatgactgggtgtacaaaacatgactcacattttgggatttgaacatatatttcctatatatattaagaaattgtgtattcttacttagggatttgatctgttggtttgtttaacattgcagtactcccttattgattccttcctcgcttctgaacaaaaaggactcagaggtgatacattgagtgcggcaaatttggttctctatgtgtctattcattttctaagtaagctgtaagtactaccagcattactatgtagtcatgctacgcatcatctgcactactgacctctaggtgcttgttcaggtgtttgcatattgttttataatgccaactgaacctatctgaaatcggttcctctaggtgcttgtatgcccgtgcgttcattgcactattgtgcagtttgctaccaaatcaatctcagatttttctagcgagcccggttaatgaatttgtctatgatcaagtgtagctttaatttgtcagatatggtgacctttaatttggatttatttatgatatttccttgacaacctttataaagtttatctactttctttttatctatctgcaaagttaaacagatggttccttaatttgtagtgaattcggttccccatctctggtcctatggtccagagattgacatttctctgttttatgaggaattcaaaaaatgtttttgctaaatgcatactagaacagtacaaccatataaagggggatctgtggtcggcctggtgagt

SEQ ID NO: 33954 - DNA, 637 bp, Oryza sativa
catcacattaaaccttttctacacacataaacttccaacttttccatcacatcattccaatttcaaccaaacttccaattttggcgtgaactaaacacagccttaagcattctggcacctaatatctttgcaacctgtaatcaacttcttaatattaatgagtattaaagacttgtgagacgagaagcagcagatatgcaacaataatttgacatattgcagaactgcaggatggctgacaacagagacggattaaagtacgtgtactgcaaggagtgcgggatcgacgattgggtaccatctgtacaagaaaaggcacatgctaaacaacaccgcaaacagaatttagagaggatgaatctgcttcgccttcgagcacaacaactacaagcgaaaaaggcaatggaggctagcaaggccgcgaagaaagccaacagtgaagcgaagaaagccaaacctcaagctaaaaaatacccaaacaagcacagttcccctgttaaaagacactagaggaaacagtcgctaatctgctagcaccaattggaacacctgatagctaacacaatctaacagccaaatatggtaacgtactctacatactctattgttgtatttgtactgactacttagtacttaa

SEQ ID NO: 33955 - DNA, 675 bp, Oryza sativa
atgcatattttttccttcgattaaaaaaaagataaacttcttcattcctataatataagacgcacatgtgttttaggattgaacttttaaattatttaacaaaaaaaatactataatataaattgaattttatttgctaaaagttacattattgaattgatatttgaatttatttttatataattataatttctttgttataaaacttataacatacgagaaattataagcttaatattagttttgaagatcatttcaagtttgaccatatcttatattatgtttcaattttaatttttaaaatatttatcattattattttattatattgggattagatgttacgtgactgaatcttatcttatatagtgaaagcagcaagccttcttatacgaggatgtgctatatcatcaaaaatatgttagccgtctgataaagagcttggataaataatggtctttggatcgaagagagcatgtattaaaaaaaatcataaatgggctaaatatatggaattttttttggaggtttctggcatctcctactaaacatatgatacatacaaaaagaaaggaaataaagagaagaaagatgatgcttctagtgattcctcttataaacatatactccatcagttttacaatgtaagactttctagcattgctcacatttatt

SEQ ID NO: 33956 - DNA, 606 bp, Oryza sativa
atgttgatcgggagagctctcagatgttgggctgccaaattagaggcctcctcaccacaaaggtttattctaattaaagttacgtgtgacaatcacatgtttatatcacaaaggatccattttcttatttaatcttaccaaagatgtatgatatcaaagattaaagtatcaacctagtattgttctgtagttataaacaaggtgcaactaaacatatgatatcaaagatatcgtatgatatcaaagataaatgacaatgtatcctgggaacagaacaggccatatcccctagcatttcaatggaactcctttgttccaaacaggaaatttcaaccagaatcaatcaatgggccatatgctaagttacagcgtactcttggtttctgttcccaaaaccattaaattgtcctcctgaatctcatgttcaagttcacttagcattactactccattaactatcaccagtgtacaaaagtacgcttgtacacacaagattgcatagctgattagcttttcatcccagcagctcctgaatttatatattcttatacagtttaacagactaaggatgagagtttccaattttatttgcaattttcagttctt

SEQ ID NO: 33957 - DNA, 567 bp, Oryza sativa
atgttgatcgggagagctctcagatgttgggctgccaaattagaggcctcctcaccacaaaggtttattctaattaaagttacgtgtgacaatcacatgtttatatcacaaaggatccattttcttatttaatcttaccaaagatgtatgatatcaaagattaaagtatcaacctagtattgttctgtagttataaacaaggtgcaactaaacatatgatatcaaagatatcgtatgatatcaaagataaatgacaatgtatcctgggaacagaacaggccatatcccctagcatttcaatggaactcctttgttccaaacaggaaatttcaaccagaatcaatcaatgggccatatgctaagttacagcgtactcttggtttctgttcccaaaaccattaaattgtcctcctgaatctcatgttcaagttcacttagcattactactccattaactatcaccagtgtacaaaagtacgcttgtacacacaagattgcatagctgattagcttttcatcccagcagctcctgaatttatatattcttatacagtttaacagactaag

SEQ ID NO: 33958 - DNA, 604 bp, Oryza sativa
taatcaggaacaagatgacgtaatgcgtagaggcatattcgaatctttcactgttttgatccgcttggaacaccggttaataacggcataacgcgtaatatacgccatagtgatttggacttttttttttctacgtacttttttcttttctttttggcctaacgaccgtcatgatgagcatttttgactggatttgtattcgaattcgatttattccgtctgactttgcttgggtaaaacggcacctgaaaattcgtgcgtgcgtgcgtgccttgaattatgcacagcatttgcagtttgaccaaggcttgtgctacgtgcggtttagctgcagagatctcggtgtgagtgagtgtgtgcactgaacgatccaaatatttttgaatggtttatgccaagtggaatttgaatttgctatgaaaattatggtattcatgcctacaaaattgtttgtaatcagttttggaaatttggataccactgtattgctggactcgatgggcgcgcacacaggatgtgaaatgtggggaagaagcagtttaaagtttaaacaaaccataaactgaaaaaaggggaaagcaaaagtgagttgaaattttgcctg

SEQ ID NO: 33959 - DNA, 706 bp, Oryza sativa
ttcctgcagccctgccaaaatagcatcagctaaaaacttcaacaatagagaatccagaaaccaaagctagcatccagtaggatgggatcttgtcaggtccgagaaacctttactgatctagaatcggaagagcagatcgccagataagataactaataaatccctcaccagcgggattgaaccttctagtggatcgatctagcgtagtaacacgtataggggctaccctatatctctatctctactacttaaaaaataagaggtgcttccatcgtccgtcaaaaaaaccgggtgaaaaaaaccgggtagaaaccaggtttatccaataaaaaaccagaacggaaaaagaagtccgatccagaaaaaagggcgaaaaaaaccaaaaaaaagcggacagagtccgatacagaaaaaaaaggcgaaaaaaaccaaaaaaaaccggacagagtccgatccacagaaaaaaggcgaaaaaaccatgtttgtccgataaaaaaaataagtccaactcctatatcaaccaaaaaaaaagtctgactcagattggtgaaaaaaattgatctgccggattgaagatctgtttgtaaaaacggactctacatgtcaagagcattccatttttatatgattttaatttttggatttgtacttttatatttgagtccctgtaatttttatatttgcatttgagtccctataatcttgc

SEQ ID NO: 33960 - DNA, 700 bp, Oryza sativa
ccctcctctcacatgttctgcctacctccacaatgtgtgtgttgccccactaataccctactacccctctacagtcgcccactactggagaaagggagcgagaaggaggtagaaagggattatgacaatggcggctgacatggacctggagtcctgcctttatggccgatgcatgtgttgtcctgccacttccttgctgcctttcctcaacctcgcgccgctttgctttcgccgggatagggatagagagagggccagagggggtagggaagaaaggggtgagagaggatgacgtgtgacctggtcatatttttgttaagagtaaaatgcattggtgatacacggacttatcaagtggatgcaatttagtaaatgaacttataaaatacttattttcgtacatgtacttgtccggtgcgtgtgaaccaaaatgacactacatggctaatcttgatgatttaggtgttgattaggatgctacgtaaacatatacatgaaaaggttgctacttagatatacattggttcaataaaaataaagaatgagacgtagtgatggtaaaaaaaaaaacccagcaatgatacaagggttagaaatatatgaaattcatcattttaatgatgaaggataaattagtgacccaatttataatagatatagcatgttttaagcatactcactacggataagcatgtcacct

SEQ ID NO: 33961 - DNA, 1327 bp, Oryza sativa
gggccgcttgcaaaatggccggccccggctggcttttttgcattggggccccttacagccccaacagagggcggcaagggttttcctgcaaaaaaaacctccctccgtcaccgcccgtcccttccccgtttgccacgtcagcttgccgccctggaggtgggcggcagggtcaatttttgtaatttttttggctgatagattatttctgtaaatatttaaaaaaaatctaaaaatgaaaaaatttctaaaattctactgcatatgtacggtcaaaggaaagtccagtttgcatccctcaaatatgggtcggataacactcaactacaaaaccggtataacgactcctctcactctctacagtttatcaatataggttctttgcccattttcatcaaaactcccatatataacgatattgcatcgaacatcgactcatgccggactaatattctttcatacattctcaactacaaacatcagtcctcaataatcagattatcactaaccaccaaaataattaggggcatagatgtgatttcaattcaaaccatgtaaaatggctccctcgacagtattaacagtggttttcattgaagtggtgcccgcttagtagcccagtcaacatagaaattttaaaaaaaagtaaattgcattgaaggtacgcaaacttgttaagtaggtataatttagtacgtgaacttgtaaagtactcgttttagtgtacgaacttgtgtaatttgattaggaggtgacatgcatatacgtagtgagtatgcataagacatgctatatctattataaatttggtcactaatttatccttcatcattaaaatgatgaatttcatatatttctaacccttgtatcattgcttggtttttttttttaccatcactacgtctcattctttatttttattgaaccaatgtatatctaagtagcaaccttttcatgtatatgtttacgtagcatcctaatcaacacctaaatcatcaagattagccatgtagtgtcattttggttcacacgcaccggacaagtacatgtacgaaaataagtattttataagttcatttactaaattgcatccacttgataagtccgtgtatcaccaatgcattttactcttaacaaaaatatgaccaggtcacacgtcatcctctctcacccctttcttccctaccccctctggccctctctctatccctatcccggcgaaagcaaagcggcgcgaggttgaggaaaggcagcaaggaagtggcaggacaacacatgcatcggccataaaggcaggactccaggtccatgtcagccgccattgtcataa

SEQ ID NO: 33962 - DNA, 1408 bp, Oryza sativa
attataattttacaataggccaatctacaagaaaaaaaagcagtgttctatgctgtgaaggtattttaaaagtgacttgaagagatgcatccagtgttacctcaatattcagttgtccactctgtggagcacaacgcagtaaagaaaagattgacatgatacttgagattttgccaaaatcaacgctcaagtttgaagtccttaagttccggaacttccatgtaattctctccaatggattttcatcgacctgaaaatcatgacaaatttaagttagactgatatatgatcatcaatgcaacttgatctacttgcttgcaaacagtgtatgagtaattggagtatcatactcctatagctgagctgaaattgaatctgcctacaggtaggatagaggacacacactcacacacacactcacacacacacacacacactctcttcatgccaaatgaataatgaggattaaaaaaggaccacaaataacaaaggaaattataccagtgtgattgggctgtccaaattcagaatgacagattataattttaaagcaattacaaaaataaaatgacgatgaaagcatctgacgttgatgcttttttgttttgtttttggaatggatagaaaagtatatttggagatcataacgagaatcttatgcaaaaaaataaatccgctagctctaaaaaccggttgcaaattcagcaaatttattattggagacaaacttattaatgggttaaatgctagagattgatcaataaaggaggatcttgtgtgcagatgagcaagtttcttttttgaatttagtgatttctaaaaatagtttccgcaaatgaacctctagcagaactttttctagaaagagactctcatttctttgtggggaacataaataatagactccaagtctcaacataaattgcagttggttcacaaaaagcacaacactttcataccgtgtaggccatgtgggatgcatcctagaattcacatgttgtccatgactctatgaactttaacgatgtgctctatagctggggctttgagtggtactgctaattagggggtacttatacgcacacataagaacagggcttgccgcctttctctccctcctctcctcctgaatctatatataaaccacccttcgtaggcagtttgtttatagtacatctatctatctatctatctatctatctatctattatatactaaaagtccattaaactccctataaacgctctcaagctgccacgtggctccctcaaaatgctctcatattgccacgtggcactctaatataatagagaaatctgaccatcgattttcatttaaatcggtgcacccattattttacatcgttagatctattttaaaaaccaaaaacctcccaccggccccacca

SEQ ID NO: 33963 - DNA, 596 bp, Oryza sativa
aaaatctaccaaatgacatcttcatttctaccatgtcctgtctcctctgatcctattactctgtcccctcacctacaccacccttcgaatattgtttttctaaacagcttatctataaatagaataattctatgtgtgctgttatcaaccggtaattaactcgtctaataattttgatatatttgtatgggatttgttctgttcaaaaatacaagtcaggctatgaactttttaccatcgtagtctactcatacgagtacattcagaaaaatgggccatcaaattttaagattgacgaagtcaccgtaggcgtctcgctatcaacagatacattgtctaccacttgtcaaatctaagactcgaacgtgagtggattattcccaacacaataaacctaaccagtcaagcttcagtcactttgctcttaaaagatgcaattctcaaggcaaaaacaatttcagatctaataaatccaagggaataaaataatgtaccacaattttgaaaaccaaaatttaaaattttcaaatggattctaataaaatttcagccttgttcgtcataatacacttgtagctcttccccggttttaataa

SEQ ID NO: 33964 - DNA, 626 bp, Oryza sativa
aaaagttgaaagtggtaggtatgcagcaaaaatcatttccatttttgttttcgtcagtaaccatttccacattgctcgtcaggtaaaaattggaaacagtcaatcgggaattttcgtgcccattttcacccctagaagttgccctctaccaacacaaagcgacaaaaccatttccacattgctcgtcaggtaaaaattggaaacagtcaatcgggaattttcgtgcccattttcacccctagaagttgccctctaccaacacaaagcgacaacgcacgaagtggcgcacaatgctaagtagttgctcaacaattatcgataggaagaagttcacttgagatccctcatcttgtcgtcgagtttcaaaatcatccatgaaccagaataccagatatgatatataccaaatcttacaaaacagggtcacattaggtcccatggcagtattgatgacggttttaaccaatgtggcggctgactcaggatggaacccataagtcagtgggccaatcataaaattgttttccctttcgttatactccctcaaaaatgccatttatatgaatggttgttatgttcatcaaagtgtcatcattgaaggatcaagtgtagaggactgatcagct

SEQ ID NO: 33965 - DNA, 618 bp, Oryza sativa
tacatgtgtaactgcgctttacgggagttgggtgttccattcttgaaatgcaagttggaatggtccaaaactattttggcaagttctttgttgtagccgtattttggtgctcagggatgggtcgactgttgtgagaactttttgttccatgtgctcccaagtcatgctaatgatggctaccatacaaaatttcaaacggaaattgattccggcaccgagatgccattaaacctttatctgttattatcgaaaaatttcatctgctgcttgtagctcaggaaagaacgcaaacctttttctctctctgaaaatattgaaaaatttggcaatgtcggtttcaacattcttggataggatggtaattttttttcctagctgggacagcaaatagctccggttgaactttattaaaaccggggaagagctacaagtgtattatgacgaacaaggctgaaattttattagaatccatttgaaaattttaaattttggttttcaaaattgtggtacattattttattcccttggatttattagatctgaaattgtttttgccttgagaattgcatcttttaagagcaaagtgactgaagcttgactggttaggtttattgtgtt

SEQ ID NO: 33966 - DNA, 624 bp, Oryza sativa
agcataagatcgtacatttatctttaaaagaagatcatatatttaatcaggccattggaattaagtaaatagcatccacatatatgtcgagagatataattaagttggttgtgagtcaataggtccattgatgctataattaaggttaaggtaagcggttaataagttattttgattttattaaaaaactaagttggatattttgatttgtaatgagaacttttaggattttttgcgtatggatgtgggtccaaaatataataattttattagcaattaaatatggttggtatagatattaaactattgatttaattaaaaaaacacaatggttcaaccagatcataaattgaatatataatttaaaatttacagctattgaagattctttatttatttataaaacataccaagatcaatatgtatgagatatattatctatacctatattttcaagtgtatgcaatctttgaaagtatgataaaattaacttactaatatagaagatattatatacccttaagccttaacttaattaccatcgaaaaaagggaggcgagcaaggaaaaaatcacacatactcttatcatgcgtatggatggaagcatgtatatgtgttgggcg

SEQ ID NO: 33967 - DNA, 533 bp, Oryza sativa
aagcttgataaagctcatctcccctgggaagcacttgataaaagacagggtcacacgcttgagacttctaaccaaatcttcactcatatatgcttctagaatcccttcatgaatctcatcatctccctgtgcttctttcagatcaacctacaaaacatatataggtcaagtaaatgaaatgccaattataattttacaataggccaatctacaagaaaaaaaagcagtgttctatgctgtgaaggtattttaaaagtgacttgaagagatgcatccagtgttacctcaatattcagttgttcaatctgtggagcacaacgcagtaaagaaaagattgacatgatacttgagattttgccaaaatcaacgctcaagtttgaagtccttaagttccggaacttccatgtaattctctccaatggattttcatcgacctgaaaatcatgacaaatttaagttagactgatatatgatcatcaatgcaacttgatctacttgcttgcaaacagtgtatgagtaattggagtatcata

SEQ ID NO: 33968 - DNA, 1212 bp, Oryza sativa
tcgtttggttcaattaatttaagcatcaaggtcacaactattttggtgagcaaagggcagtctcatcgtactggataaaactagagtacatgtaacagttaaatccagttaaacagttgagttctttcctacaatctcaaatcactgcccaattctccaggcaatgatgcaatgctaaacataacatgatagttcaagtatggatccatctcgaatcttgcaagataaaatagatagtgcagcatggactaagcaagtcagcacgccttatccatcgaaaagctacagcacaatttgtcaggtgcttgtaacgtggagtcagaatcttatctcttgtgttacatacttacatttcagctttacatacttatataggccagaagccacccaaggaagtcaagagtcagagctctctcattcggaatgcaagttagatacaggatggtctaaagctgggaaggaaaacgccaatggctcttctaattaaggcgagattgtctgctgacaacaatgatgtcacaacactaatattagagaacctgactaaggagaactagagaaggcacctaatggatgtatttgtaatttgtcaaccacttctgcagaatactgtatattgagagcattattgtggctgaccttatggaggtgactgacaaatcactttaaagcaaatgaaatataacttggggtgcttaaaaagttaaaagcttataatacccgactatgaaacggcgtgatcacgagtttacatgccgatgactatggtttggaaggattctccctaagagacaatgattggccatttttgggtgccataaattgctatgatgctaatcactaatcagcatcaggtgaaaacaatacaacataataacagttgacagcaagcactaaaaaaaaatccggttaagggcaaaagcagatgattacatatggaggaaagagaccgatccatataatcctgatcaagcctacttgttaatcactaatcagcatcaggtgaaaacaatacaacacaataacagttcacagcaagcactaaaaacaatcaggttaagggcgatagctgatgattacatatggaggaaagagaccgatccatataatcctgataaagcctacttgttaaactttgcacacgctttactgcaaattatttgcatatattacgtaaggaattacagttcaataatgtactgtaatttaaaa

SEQ ID NO: 33969 - DNA, 580 bp, Oryza sativa
tttctttaatgtgttttcccatgaaatgagaaacgcgaagcaacaatttttttgcatcgaattcaagcaacacttaaagtagtaactgatggaaaatttctataaactatggtaaagagatcagtttaatgtatcttgttttgtcttgccagcgagtttacagtccagttaaagaaaaatgtttcttagagatccgtttgcaaatattcgaattgaaataatttcactctcctgcgcaaggcctcatttatttatttatttattgccggaacagggcctcgtttgttgatcaatattgcatttaatcaattaataaactctcttattcattagtacctatgtttttgtatcatatgttgctttgacttttattctaatcaaacttctttaggtttgatcaagtttatataaacatttagcaacatctataacaccaaattagtttcattaactataacattgaatatattttgataatatgtttgttttgtgttggaaatatttctttcctttttttataaatttggtcaaacttaaaaaagtttgacaaaaataagttaaaatggcttatattatgaaa

SEQ ID NO: 33970 - DNA, 519 bp, Oryza sativa
cgtccactaacggtttcttgtatctttggggaaacggaagcagccgatgtgtcgcagtactcttgcggcactattttacttggttgagctgctttgtcggtatcagccggactagcaggtgatgcctccttgttactgctctgtgttcctgcagggttaggatatggcggatcccgagtagactttccccggctcatggtgatcgccttaacatactctaaggaaggttcgggttgtcctagaatcctcctagactcatttgtagcgactagagcagctaactgtgccagctgtatctctatcatcttgttgaagcttagctggttttggaatgcggaagccttctagcttaacatatatgttctctaagatcttgtcataggtggccagctttttgctaagagcatcagtggttttggcttgcgcgaaaacaagatcctttaaggttgattattgaaattaccgttattattgttgcctccttggaagtatgggcggggctggctccacccatggcct

SEQ ID NO: 33971 - DNA, 1298 bp, Oryza sativa
aatgatgacaacatgaagagaatagcggaaagtaaactgaacataaagaaagtgaatctgagttgcttgttcgtgggagctattcccagttatgaaccaagtgatatgttcgcagatagtctacagaggtcagagtaaaatcacatctaaccacgaagcttcaaaatttggccggataacgctcagacaataagaagtccaacagtaaaactatttgggaagacgtcaaagtatatcaagtgggataagttggttctcttgggaagcataattcaaaggcaaagttatcgaccctcgaatcgaatagcagaagtagctagcacccggagaccagggaagctaatatgaggcagttaggggcaagtggccaaacatgatatcctagtaatgacaaagctgatgtcgacgcatgtcacgaaggtggtaacttgtatgaggttgacgccaaagatatgaatgataagaagttctagaactgaagccccatcctcaaccaccgcagcctagtctgagtcagttaaaggtgcaaccagggacaagtcgggtgaagagaagatttcatctgcaacaggagatcgagccaagcagtccagagtggagaagtttagttagacaagtttgttatagaagacagagcggaagaagtcagacaagaagagaagaccgcccaacctatcttcttgctggcctcctcgaatctcggggacgagattcttgtaaggggggtggatttgtcacgtcctgataaattcatcccgaattaaaattcattctctaaaaggaataatagaattaattaaaattcgaaaagaaattggcaaacactaaaatacgtacaagaaaaattcaaaagtggcccggagaatttttgtcaaattctccttggtctaaaaggagccctcaaattttagtggaattttcagagcacaaataataattgttaagaaataaacaaagttaaaaaggatttataaaaagaaaaaccctaaaagaagtccttttccccccctcccttcttgggccggctcggcccagtccctccctctctctctcttcccccgcggcccatcggcctcccccgcgcgcgcgccgctgacaggcgggcccgctccccgctctcgctgacgggtgggtcccgcctgtcgtcttcctcctcgcgccgcgccgccgctcgcccgtgccctagcgcccccgccgccgcggatttcgccgcatcccgccgtcccagcgcgcattaaagaggggaaaatactccccgcgattccctctcccgtttccccctctttttcctctctctc

SEQ ID NO: 33972 - DNA, 612 bp, Oryza sativa
aacatgtgagaaaaagtcaacggcgtcatctattaaaaaacggagggagtagaaaatagtattggcgatttgtttgaaaattaaaattctcatttttttgtctcgccaatgaagttgaatttggacaagactttttatactgctattgaacgtcatcttatctacatgtgggatttttttccatgtagatttagataacctttactccctccgtcccaaaaaaagtcaaactgcgggtttacgtgccaacgtttgaatgtccgtcttatatgaaatttttttataattagtattttcattgttgttagatgataaaacatgatgaatactttatgcgtgacttctctttttaatttttttcataattttttcaaataagacggatggtcaaacattggacacggaaatcagggttcgtctttttttgggacggagggagtatgtcgtggtttattcgagttttcatggtttccacagtatattttcgcactcaactaacaaatgcactattagcaggggcaatgcctggatggatcattaccttcctgctcatcctacagtttatttcgtcgctccgtggattggtaatcttcagcttcgttgctcattttt

SEQ ID NO: 33973 - DNA, 1169 bp, Oryza sativa
caccacatgagcatcactagttcgagcccagctcagcggatgcttcaaagacaaaaaaaaaaaaagcaacggcgttatctattaaaaaacggaggtagtacttgaaagatatgttagttttagtctcagaaaaacttaaccaatttggataagattttctagtttccacatgaccattgatatccatcttatctacacagtactacatgactacatgtgagacttcttttgtgtggtttatatgagatttttgttagattgagtttccacggttccaccgtatatttggcctagttaagtaggaagaaagtttaacgtagacaaactagatgaattacaagcagcacgacaacgagacgtaccaggcgatggttgaagtcgacggcgttactgttgccactgatggactatacgcgcgtacacctgaccgatatatatctctatcaagtttggaatctacaaatgctagaacaacagcaaacaagatatacattggtgccttggtgggtttaacaatgcttgtacccacccaggatttataagatctggccatttcattagtatatatgttactattatattgcatgtgctttgcatttcattagccaaatgtgctaccatgccaaaagtgcatcatgatcaaccatttttaatagtttactctatttctatgcaaggatgtactaggtatacaattgcttgtgctagccacgtaatacaaacaaactaaagggattaaaggtgacgcactgatatataattttttgtacagctactacctctgagcaccacatgagcatcactagttcgagcccagctcagcggatgcttcaaagacaaaaaaaaaaaaagcaacggcgttatctattaaaaaacggaggtattacttgaaagatatgttagttttagtctcagaaaaacttaaccaatttggataagattttctagtttccacacgaccattgatatccatcttatctacacagtctacatgactacatgtgggacttcttttgtgtggtttatatgagatttttgttagattgagtttccacggttccaccgtatatttggctagttaagtaggaagaaagtttaacgcagacaaactagatgaattacaagcagcacgacaacgagacgtagcaggcgatggttgaagtcgacgg

SEQ ID NO: 33974 - DNA, 1625 bp, Oryza sativa
ataccagccgatgccgatagggttttgagcaatcgattatatatccaatgtggataatgatataaagacaatcgactgatgataatgtaataaaacaataatatgatctagttgaaaccaatcaactaacaataatatgataaaataagtgatctgatggttaaagtatacatcagcgggaggtctattgtcatagaatacacaagattagataattaatgaagcatttgttgcaattggctaaaaccaacttgtattcaatttttataagccgattcaacgtccaaataactcatcagctgaaatcccgatgaaacccttattataatcaaagacaggttagcctttatgatttaagcacgactaaggatgatgcatcacaaagtatgctaagaagcaaaaagtctaaaaatcaagtcttcgacaaattttcaggatggtggataccttagctaatctaatcagataatttagctgatactagcataaaccctaaaatgaatatcagccgatatgatcaaattaaggtgctaagctatattaactaagatatatgacaaataggtaggcaaatatataaaccgaaccagagcgatccaagagattgaagcgatgcagctttgaagcacaccaatgtaaccgatacaattgccaatgccggcggtacgtaggacttaccccttcgccggagatcgaaagtcaatgcagccccgtgttaggtgccatgttctgccggatgataaataaaacctcgggaaagagggtggcgatacaccaagagtaattgtatagatctctgtgatagtttacaatgacctcgggtgtacatatttatacccatggatagatactagtccttattggacaagaaagaaactttcataatcataaaaggaaaatataaaatccttatcggacactaaacacacttttctagagagataaaaggaaactaacaaactcttcctaattaatagataaactgccaagccacatcctccttgaactcagtcacttctgaataaacttcctttaatagtttaatttccttaaccaaatctactaaggatccgattattggtgacttgataattctcatcagccgattcgaagatgttgaagccaatattgattctaagctgatgatgacttcggagcttacaaaattttggcgttaacaccgcggcaacatcacagaggagcaggagcagctcaaggagcagcggcggctagggggcgaggacaatgacaatgccatggcataggaggcatggttgacgttgacaggcgctagcactcctcccgctccctcacttgacgaggtggaaggctgtgacatcctggcgcaattaggatgaggcccgtgtggcccatgtgagctgtgtgcgcaagtttcgtaccaccttgctagcactggtggaaccaacttataaggcatcttccctccaaccatgtcacttccgagttaacccttttatacgaagcgaggatgaaattgtaagtggagaggtatctgtaagtgggccagcccgtcggatagactggctacacggttctggagggagggctgttacaaatggtatcagagccgaccctcgcggttgcatgtacgggtcagtgtgtgc

SEQ ID NO: 33975 - DNA, 1734 bp, Oryza sativa
atttttatgaattttcgcaaaccagctcttttcctcatattgactttctctcttatttctcaaggatgaatattttatttttggatcctcaccaagacaaaatgtgctagaatttatccctactctaaggctgatatgggagttccgtagggacaaactgtgacatacctgcatcatatatattgcaaagccaaaaatacggactcaagaagatcatcagccatactcctagatcaagggtctttatttgtggtagaaaatagaaaagtaaaatattttgtggaatagtggaataaagaaatgattctccttttttcatgtactttctctccattttgttttcttggcatgaatatggaaggggcatggctatattttcttttcatcatgctcaatgttttgagagcaagctttatttcctcttttttttttcttttccatagccatgcctttccctccttttctcatttttttttgctaagacctttttttttcttctaacagaagaaagcatagtctaatgtaggagtttatttgaatggaattttagtgggaagccaacttccagtgtaaaatcttagcttaattatatatgtggaaatggaaatgaccccttgatcatgagagtatgaaagatatctagcacgagtcacacaaatttgttaaagcttaacataatgtcaagcagtcatacgcataataaggtttatcaaagatatacttgcatacgaccttggtaggaataaagaatgaagtcaattggaggaatgagcttttaaaacaattttattttgaaaacaaattcccaagagtcataacaaaagttgcaagaattcctttcatctttaatcatctctcatatagcaaatacttagatgtataagggtccctaaacatggatggttgttcataagcacaggttcagctgagaataaagaatatacaagatcaaccatatgaaaaatttcattagttggaaattttatcttatacttatgcttgaaccaattgtttcctgaattttcaactctagtactataccatggtggagatatacaaataatggacgtgctcgcctgcttacctgtgaaaattgagaaggattggggccagctttggttcggccgaaccactctggcgcctgatccctcagcaactttctgcagtgtatagtgcttccaggtgttcagacctttcatcagttttcagagtatgtgcacgtcagaagctgggatatctcccccacacttattcaacacctgaactttattaaacctaaaacaaaaaaaaaaactttggcaaacattggggttaacaccaatgagccacattatttatagcaagtgcttacatgattggaaaaaaaaaactaagcacctactactttattcatgggagaggagacatctattttgcataatctctattctccttacccatttctacaaatggatgcttgattttagcgcacaaaccgcgactaagggtatcaacattattcctaagctcagcgagttctacccgtagctccgcgttgcggtccctaaactcaatattctccttgtggagcttcttcacttatgatgctagcttatgaaccgagggctccggcgactttacttcttcctcttgaaattggccggccccccttacaattggaggggggcgtcaaatgacgcttcaccttcataagtggagggctacgggattccgctgccccctccttctccgatg

SEQ ID NO: 33976 - DNA, 658 bp, Oryza sativa
gttttatttataaaatatgtcgttaggttttatccacttggcttatcgtacagtcgagatggctatgataccagcttgtcgcgacagggaaaattgccttttcccgaacgctagtgtattaatccccgtcccaggaaaagccggggtacaccacacaaacatgatataaaagacacatctttattatatcgataatatttacattattacaaaggcgcttcaggcctgacaatcaaaaaataaacagcagcggactagcgagcctacggctccatcttcacaggcgctcaactggggtataagccaggactccacctaagacttcttctccaaagcttctcttactgaagaggggaaggattgagcaagaatgagtacaaccacagtactcagcaagccacaccggagatgcacaattaatgcaaaggagtacaaggggataataacataggggttatgttttgcagtaaacagcatttaaaagtcacttagttgcccaaagccattttgtaaggacgatcctagagctacacaatgttattaaacaaggccgtgaaccctcacgaacctgccttaacccaaggcctacgatgattcagaccgaattgtcaacccgaccctgggtcccagctcgtcccaagccaacccaggccaacca

SEQ ID NO: 33977 - DNA, 808 bp, Oryza sativa
ccagatagtacgtgaaatagacagggcgtaccgaacgctcttggaatctgctggctagtatgcagcgccttgcagttgatcactgacggacactaagcctgagatatgcacagcttggaagctacaactgaaagaacaacacgggacaagatctgaacttagtggtagtgtagtttatgcatgtgctttacattcaattcgcgtctatgcatgtgctttacatttcattagcccaacaggcttatagcccacgttcgaagctaacctgatctatctttttaatcagttgattctataaacaatgacaaattaggtgaacctatttacataccgttagcgaccatggtataaacctgatggttatattttaattaatgtacatgtgcgataccaggcaagtaatggtataaacatggagtacaatattccaatggcaattaggagtggcagcggggtggggcggggccaggttgggcaggaacgcccccacattccccccccccccccgctcccggcctcacattggccaccgggtgaataacctgagccacccccgatcctgtagaggacccgacagttgattgggccccgcagctcctatgaggggaagggacaaagggtggttgccgcgtcactctttgataggcagggcaagccgactactcgaaggagaaggagagacggagggtggttgcatcatcacgcgctaatagcccagggccccgctgggttacccgaaggtgaatataacctcccccaccggcgctcacccatgggtgtgaaacctgacttggcctctgcccccatt

SEQ ID NO: 33978 - DNA, 1302 bp, Oryza sativa
gctgacggcctggagcagcctcctgcctggctgcctcctgggcccctgcaggctgccgcgccggctgccgcacgcggcacgccgtcgcccgtcggtcacggtgcgcctgccggtcacgggcttggcgccttggccttggcggctcaccgcctcaccggtcgccgtcgccgccgccgcgccgcacgctgctgcacgccacggccgcgccgcacgccgccacggctcccgccgccggcagccgcacgctgcacgcagcccccgccgaccgccgcacgtcacgccgccgcacgcctcctcccgtcgccgtgctgtactgctgtgttgtggtctagggtttgcaggtttgggtggccaaggcgccaggcgggtggggaattgggggaaaattgcaaatgggctgatatgtggcccaattagaccacaggttgagaggaaagagggaggcgagtggaaaatttaggcccaatagagaagaaatggggaaacaaggcccaatatagcagtttaagctttctttttatttttttaatacctatatgaactatatagtatatatacctattttttttttccaaaaatcttgggtatacatctgaatacccatgaatacatagtgggcccgcccctgcctgttatggatttctcgtaaaaaatacttatggatgttgatatatttttgggaatagataatgaacataggattggtggataatcgtttcagatgtatttgttggtctatttttgtaaagtatccttaacggttaaagcggcaaacattgtatgctgaactactgggttgttggaggtggagctagacatcctatgaaattttaccaactggagcagatggtatgacccgagaggtgccatgtttgatcggggggagggggtgcgactacaactttaggtgagcatgattccatgcataactcttgacaaaggacaagaatcacttgtacaaccaaacttgaattatggttgcatgatcagatgcaattgtccgaggtatacgatgtgaaccacaaggtataccagaaaaaaaaggtagagggaagatctcaagctagcaaagatgtaaagtcaacaatgttgtcacgtcctgataaattcatcccgaaataaaaatcattctctaaaagaaaataatagaattaattaaaattcgaaaagaaattggcaaaccttaaaaagcgtacagaaaaaattcgaatgtggccaggagaatttttgttaaattctcattggtctaaaaggagccctcaaatttttcttgaattttcagagcaccggaaatatttatta

SEQ ID NO: 33979 - DNA, 1079 bp, Oryza sativa
tcatcatattttacaaagcagtcggtatatcacttggatcatattattcagggattcacaccgcatatgctacatattaatattaagtcgcttggttgactataattatcaaaaccactcggttggttggattatttattccttgactatatgtttggtttgttcgattaaccacattgtcgggggttacacctattaggtgcatctagtcgatgcacctgactatatttttcagccctccacagtcttcagatttggtaaaagtactcgggagaccatgacgaagatgattgaagcactcggctttggagtaatctagttcgagagaaggttatctttccgactgtgaaggtctcaggggctactgtggagattatgggtaccccatacccacacggcatggttatccgactagttataggggataacttatatctatgtaatatgtaacagatcatgacttgggtgttacgtttccttgtatattacggaacggcctaaagtcctgatttaggaaacagataccgtattggttaaggtttctatcttgtaatcctgccccccatcctatataaggtggggggaggccctctagggggcatatatatgagacaacctgatcgtcagatcaatacatactcggcggattcaaatccccaaacaggagtagggtattacctctcattgagagggcctgaacctgtctaaatcctttgtctccacatccatccacttttaggtctcgtgcgctaccccgttttattattgccgaattcatgtttcgacagttggcgcgccaggtaggggttgcgtcgagtttcctatcaacgagcgcgatggaatcaatttcatgaagtcgcggacttcgtttcgctttgggagtcttcactttcttttcggcgaccacttctttaagcttctttttttttacttggaccaaaataatcaaggggaaacttaatctgaattttatcaatatttaacaaaatgaattttaaactcaaaataaactcttgctattttttggtggtggtcgcatataaataccccgcactattgaagggaatgacgcttgtcat

SEQ ID NO: 33980 - DNA, 577 bp, Oryza sativa
gcaaattagcctccactttacacagagctactagcaagatgagtaagattcagctgggcatgtcaagtgaaataatgcagccgacttgaggcggccaaaagttattcagcagaaagctcaaaagcggttgtgaaaaatgagctttgacgaaacttatgcctttccattgtcgtgagctcatgattctgcttttgctgatggacgcatttgaatagccaaaaccgaaacttcgtcccctcgattagtttgatttgatggattataagtgaaggttatctgaattctggagatgtctttttccagctcaaaagtgtttgttttattaatctttttctttcttaccgaatattgtttctagctgcaatttttctcttaatcatatgttttttcatcatacttatacttatacatgatgttcctgcagactttaaaaaattgtcttgaaaggatcttgcaaattttatagcatatatataatataatatagagtaatagattaagcgttaatttctaagtgggtttcatatggccttatgggccatgatttttggactgggctgatgatgttcaaggccta

SEQ ID NO: 33981 - DNA, 594 bp, Oryza sativa
tcaggtttctgaattttccagtgaagaagaggatgtccacccaatttctagaacctgaaaccatattctgacggctgtgtgcactctttgggtgcagaagcccgaggtgctcccaaaataattgtatcacttgatagaattttactgagattaataaagcttccattatctaaaaaaaaatattctgacggcaaagttccaacgatcctgacgcggctggcacaccaattaatggcccaaaatatcaagattcattcatagcctattagccttgagaaaaaggattccatttgccattgttaagatgacaagtagagacagcaagtggcactcataacgtgtagaaaggattcctgcctggatcatgagagattccaaccaagactggttgtagtgcctgtaattgcacgcaattcaggaccagtattactctgacctgctcttcattcttcagactccagaattctcatgcacgttaattcttgggttaatcctgctagctgcctagctttgtatagtactcatgtattaatatgctgtgctggggttcatcaatactacttagtattgagtgagaatcttggacaaaataat

SEQ ID NO: 33982 - DNA, 1413 bp, Oryza sativa
agttctagcacggactccaagacgcagtgtgtgtatgacaggtgggaccaggtattaatagtgtagtatataactattgtatgaatgagctattagattggctatagataaattggatctagtagttggctatactattagggtatatctagagataattaattagccccttatatacatggggctgccttttaagctaaattaaattaataccactctatgcatatccagagtggcgaagccaaatacaccgataaatctagacgactataatgacatttttcaattaccaaccttgtttaatttctgaacacacatccggcaatcagcaaatggagacgcgcggccggtgatatggaacccggccggccgcttgagtggtctgggaggtgactccacggaatatgatttttttttcagtaaagtcagccggcagcaagctttcttctattatatctacatcagtaaaaatgtaaattagtaatattaatctgcactgtgacaacttaagaaaacattaaaaaattatagtttcacaggatccggaggcacttaattataaaatgacgcctcagtgtacccgcgcgcagtcctagctagtgatgtacatatgtctctgtacgttcaatcttattcatgtttttcttagttattctatctttgatatgccactcatgagaaatagctatatatatattttagtttggatggagtatatggttgccgtatcaaaattaaagtacacaaatgatttggatgtcagctttgcaaaaacttttattaaaactggtttaattaaattgcctttaaaagagtttttttttgtctgattttgtagtaaaaggtcactactacataaaagttttttccatataagaccccagtaggttgcaggtgattataagtagctgtgcctataaaaacatgccccaccatgggccggttgacggtccgcatgcgatattggccacattattgcatgcggcattcctaagggaccgcatgtgatgccgcatgcgataatgcggctattatcgcatatggtcagcttaagcagccactaccataatactattatcccatacgtctgcttaagccgaccacatgcaggcaatgatggcccatatatcaccacctacctcaagctacacccatttgaactcaaagtttctctctcctaaaccaagcaacaaaaaggggggggggatatcaactcgaaatctttgcttgaatttgatatagaaggtaacgcacttgctttccttcttcatttatctccatttattttaaatttcatcagtgcaatgcggcaaatttctcatttttatgtgagtttttttttttttttgcaaaatctagctcgaatagaatgtttcgatgagcgaattgttgatgtaagcgctattacatact

SEQ ID NO: 33983 - DNA, 1240 bp, Oryza sativa
  unsure (1)..(1240): unsure at all n locations
attttttatattttagcccttctaaaatatatgttttacatataggtccccagaaaactaattatagatatggtatggaaccaccttggtgctacggatattggcaccaagatgggatgccttaagactaaatatgttgaacgccgaggttgttttggtattgacgataggccgagtattgagttgccatcaatttttggaaaagaaaaaacctaacaaatcgatgtatcctagttcattctgataacttttttagtgaaagcttaatctgagagaagaatgtcgatcattcactcctcccaatacctaaattctcttgatttgctattaaattttgaaaagaggcaaaattggattgtgactcattatttgtaattttttccccaaagctaaccaacaggatttaggtattcatttaaaaaaacaggatttaggtataatgagggagggacatacatcctcccccatattaagaaatggtacctannnatnnatnagcggtaataaaataagntacntcgaatttgtaagttttatcccaataaattagcatcaaatcagtaggatttggacaaaccctagatggtagactagccccaaattgattggcgccgtaataaaaacgtcagcaccatatggtgctgagatatcccacctcggcatccctgagagtctatttgtaaaatacgttttttcagagtgtgttaaaaaaatattgaaactggaggaggtcccgagccacgcgtccatgcatggccggggagatattatcgtcgcaggctagctttgtagttgtatgtgcctatcaaccagccggcatgatctgctgtagcgagcaggacagacagaggctggacctgggttggaccaccatgttgtggcctatctcctgcttggtctgtgtaccacactactagtttagttagctagtagatgactagaggtgcatatggttttatactggagcattattggatatatattgtatatatagctagctaccgtataaagaatccatccgctgtcaacgttctagaaacttctgtttctctacacgcatgcatctatatcatggggtcagattcaagtggtattaatacaacgacaccgttctatgtatggtaataaccagctacctcagtctcatatgtagttgttactagtatactcaagagtgcatgcactttttttctttttatggacttttttcttagattacccatccgattcacgatccgat

SEQ ID NO: 33984 - DNA, 618 bp, Oryza sativa
tatgccttagaggcaatcatagagatgattgtatcatacactatgtttacatatttatccgacattgttctttgaaatagataactccttattggttaatgaatatgtgattcttttatgagactcttatgttgtttgttactatttctaaaggatccctgatcaaatatcatatgtggaacaaatatgtttatatgatcagcacatgtattaattgatgatcatgtcttatggattatggtatagacataccaaattaataatgtggacacatgttggtgaacatgttattggatagacccaacatgagacactgtaagagccatatgtgttgtgtcatcagtgatctcttttagtgttggtgtcgaatccttagacctaagattatcatggttctcaccatgtgtagtatcttacttagggattgctaaacactactccgtaattgggtagttataaaagtaattttcgggtatgctatgaaacatgcactgggatattaatatcaacatgggatttccccctcctatggagagatatttttgggccccctcaatgttgtacattatggaagtgcatggccctccccaaggggaatgaggagcaatcacaagttat

SEQ ID NO: 33985 - DNA, 2026 bp, Oryza sativa
aagttacgaactgcacaatggaaagtttgttcctgtcagattaggaaattgaataggtaaaaatgtatgcacaatttatatcccaggcatataatacctaccaaaattgttgtttaaccgatgggaacagcacagagaagcaaccacgttttgcagaatcgtgtcttcctcatgtttgcactttgtggagatcattggagaaaaaaaatcgcggatcctggctctgtcctggaggtaacccattttacagattgacatcatcagcatggattcctggaagcttgaaagaacgttggcaggcatattaggtttcattagcagtgttctttaccttaaaaatattgtactacatcaaagcaggctgagggcatgcgcacaaagattcccacatggtatgaggtatttttctctaatagtccatccaattcattacatcagtctcaagaaaaacaatacactctaaaattaactgcgatgtcattatgttttattgaagaagaataacaactacatgcaattgtttttttgccacaatagagaacgcataaaaaggggagatgaacatccaaattttaaagcttcgaaattcaaaattatatgattagcaaagctcgacttaccttagcaatggttgaaaaagtgggatgacagacgatgaaccaacaaaccaaagcccccaaaagggatttcactatacagaactaaaaagaaaaaataaactactgctccaggataaagattaagtaaaagtaacaatacgaaggcatcaactgtattaatcctcgatataaataaaaacaatctatgtgctttactgataagaactaggtagagatcataattctcaataagctgtgcactcccattgaacaaatcaaggtataacagaagcaaaaagaactactgccttccaaaagtaggcaaatactccaagaactacataggccaccgacagaaatgaagaaaagaaggccagtacagatggtttcaggtttaaacaataagataccagagcaaatacagacaacatggaaagagtaagggacacttgatttcagtggctgaataaatagttaagaggcaaatcaatccccagaaaaagaattagatcatgaattatttttttcttcaccagatcaaaaccattttgttgtgatactgagtgtgcataacaaaacttcacggagataatatttttggttaactaacatgcattccactgtaactgtatcaagcagacataataatggaaccatcaaacctatgactaggaaactacatccaacatgcatatggcactgccgaccttattaaatcataattttagtaagtttcactttgacaccactacaatataatggagaactaatgcaaagctttgctcattttgcccattagatatatgctacaaacctatcaagtggatccctctacatattttttttctttccttatttgatgtaactgcttttagattccgaaaagacctttttttttccttttgtgaaaatggccagttgcagagtgccatagcagaactacaagaatagcatccagaaatagataaatggtactctctctgttttttaatgtatgacgccgttgacttttgagatatgtttgacgatttgtcttattcaaaaaattcatgtaattatcatttattttcttgtgacttgatttatcattaaaggttcttaaagcatgacttatatttttttatgtttgcacaaatattttgaataagacgaatggtcaaacgtttgttaaaagttaatggcatcatatataaaaaaaaacagaggtagtattaaatagaagatgaatatatgagtaaaatacactacatgtcgctaacctgtccacctgcttcacttaggtccatgaagtttcaatctacagtttaaggttcctaaacctatctaaaccgttcactagaggtccgatattgccccacaccacctacatggaagccaaacagtaccaggatagacaggagtgcaccaacatgcacagtccgatcaca

SEQ ID NO: 33986 - DNA, 1006 bp, Oryza sativa
aattctggttgggggtaggattgcatacaagatttgagtatcgtgcatgacaggccagttaccatcaacttgttgactaggagtctagtttaaaccctgtctttgaactcggccctgattgttcgaattatgtggaacctcaggtttatctttcaaggtggcattgatattcttcaactgttggattctcagacttcctaagttaacaacacaaccttgatcacattcacccaagcaaggatgcaacataccacaaaaattatcttgggggcatttaactttttccactttttaagatatgataattaaagatttgtcactcgaagtctataatgtctataatatgtgggtatagtggtaaatccttaattatcacttataaaagtggcaaatagttaattattccttaaaaacgggggttatacattactacctctgttttatatttttatattataagttgttttgattttttttcctaatcatactccattttatatttttatattataagttgttttgatttttttcctagtcaaactccgtttcatactgtaaaaaaatagttaacatctagaaaactaaattaatttcattaaaactaacatttaatatattttgatagtatgtttgttttgggttaaaaatattgtcatatttttttacaaacttggtcaaacttacatttgattaaaaaaagtcaaagcaaattataatataaaatggagggagtagtaaacatgttctacaaattaggccacgcttcacatacaattctatgagcaaatcaattgagcactcggcttcccaagcacaaagctgacgaaagatggccaatataactggatttttcacattttggtccttttaaaaaacttatttagcaaataaacccctgaaaaaacttatcccagccatgttggtgccctcatcccgccacctcagcatcgcctcgccacgtcggcagggggacggcgccagccactctggtgctccaaaaaggacc

SEQ ID NO: 33987 - DNA, 1501 bp, Oryza sativa
agtttcttgtttcatgccacgaatcttaaggcatgagcagacttgtccaaagtctcgcagatgattgtaggatttttctagatcaaagccagaaaaaggattttccctaaccatactgattagttgtgtaaatgggctccaataaaggaggtggctcatagaattcgccccgaggagcagacagctcaaaaagaggttgctccatggtcgagaagagtgacaggaatacttctctagtatagcagagcgaaggtagaaataaaaaaaataaaaaggatatgaggatgaactaggttcagaaatgatcagcaaccgttccccggcaacggcgtcagaaatgcttgttggtatttaatacggtcacagataaaatccgcaagcgcacggatataccgatgtagcactttccctacggagtattccaagggtatcgaatccaagggaacgtgtgtggtcaaatctttcttcggttcatccaaggacaccaagcaaatgataggctaggatagagaggatttactagtgagaaacagtgtctagggaaagcttaactttaatcctaatgcaatacttcaggcactggcaacccgctgtttccagatgtcgctctactacgtacccggacagggaggacttaagtgatctcgagggctgtcatcacctctacacccacctcaaacgttctgtgggacatgcagcaattactggataacaattacctaaacaccacatctaagcaattactatctactttagtgtttataactcaccaaagcaatcactatattttagttgattacagtgaacaataatcttgtatgctatttaggaactaaccaagagataattctcacaagataaatctaaatttctcaggaagaatattatattgaattcagagtaataaacagaataaaagaaataggagaagattaccgacaactctggaattcttccgacttcttctactctactttcttcctattctagtatacaatatagtacaatagagcctcttataattcagctcaagcttggagtgtgtgagtgaagtgaagaggtgatgtccttttatagggcagtaatgacggttgtgagaaggggaaatgtccgaactgccccgcaaccgtcattggagagcatttggagcgtccacgccaaaccccagcctggatggctgagattgtggctcggccgaaccccctggttcggccgaacctgggctgggcccaactggcctagctcttggcccatcttctcccctggacctcctctatccatttctcggagttttgggttgatttactggtatttggatcaagttcacaacccctccttgtatagatacatgattctcctcactgtagtctgattttcctcccaacatcggcgtttatcgtctgcatacaaatatataccaacacttgtggaatatatgagagtaagcacctatcactctgttggatgttttattatctgaactttatgcagatgttggcgg

SEQ ID NO: 33988 - DNA, 2056 bp, Oryza sativa
ctatttgtatctaacaatctattatgtgttttgatttcaggaaagtcagactttaagactttgtcgcagactctacaactactcgattactcgagaacggttgctggagtttgacaaggattacggaataaagcgatggtgtacctgccgagacgaaatttcttgacttcaatccaaattcttgattacggcaagataaagaattaagtcgtatactccgcaccttctcggtcatccgagaatgtcaagcgagcacggcaattgttattccaaggtcttcggtcgagaacatcaactcattcatttgcattgaagtcaggagctactgttagggttatggataccacatatccaatagtaatcgactaagctcggaagggcccaccatatatcaaatcatatatggaatcatacctcgtatataaaagaagttctagataaggaaggacgagtagagttctatatggaaacaataaggactactcgaatcgtatccatacttgtctccctagttctacttggacaaggggacatctatgggtataaatacacaaccccctaggaggagggaagacaaaaaacagagacaccagtcagaataaacaccaacacacggcgccaaacattgatattggagatagcctagatggactcaatatggtgcctgcggaggccgacaagaggaatctagtgctatataggatctcgacgagttcgtactcgaggaggaagactaccctatcgtcgactacgtgttggtgatccatgccgccaagttgacgacagctagataggttatcccaattattgtacttgtgtgattcaaatgaataaagagcaacatcggcttcgaccaactggagtagggtcgttaccttcgtgtgaaagggcccgaacctacataaaaatccttatctctatttcttttacctcgacctcgcatataccctggtaccaacgatccccataccatgcaaataccttagttgtgacccaaaacgtcgacagctactttatataaatctgtgatccgttagatcattggtttctcttctttggaacccacctaatgataactatcatgtgttccctttctatgggcaattaggattgctttatatatatatccgggtgaatcatagacccaaaagtgcacacgggtgaatttattcggcctcagtgcatcggcaaaactagccatattaaaatcacattgcctataataaggtttttggattcatatattgatttaatttatttcataaataaatcatgacattacatatgtaaactagcataatcatatcatacaatctttggaagatcggttgcacaacaggaatgactcgcggtatcgggcattgacgacaacaagcaacacccgagagaagaggaagaagagccattgtggaggaacagcaaccagtcacgcaaagcgcttgcaaaaacattattgtcatcttctcctggtgcaggacgtcgaaggcgaaggttctggagagttgctctctcgattgccggtgcacgccagcgagcgggatggagtagactacaagtgacggtgcaatactgaggaggaggcaaaccctatattgattttgtgtgtgttacgtggaggtggcggcgcctgcataatcttcactccgctcctcgcaccagattattcactgtgtttctaaaaacaaaaccgaattttgtgcagcaaaacaaaattacaaaagaatactgtatctgtgcaaaagtgagggaccaattttgacgaaccattcgacacgcatgtcaccacgtatgcgccgcgcttgtgtattcccgttgttctctccacctcacacggtggcggccccagggttttaaacttgtgtattagaaatggggagaggaaaattttttgttcatacacctaaaaacctaataactagcttgtatagtatcacacactaataattatataatatatagcgtatataacataaaattgagtattagttcacacaatgatagaattgatcatcatgtgaaattgtttaacatatagaaatactaataataaacatat

SEQ ID NO: 33989 - DNA, 1514 bp, Oryza sativa
gagtgccgctgcaacgcacgccgccgcctggctccttgcaaatttagggtttgggattggggattttgggagctgcctgggaggggatttttgtttcgaaatgggctcagttgcggcccaagtagaatgcgggccaagtgaaaagggggaaggagtagaaaatttagacccaacacagcagaaatggtaaaacaaggtccaaatgagtagtttaactctttttctttaactttttgcatacatataagaactatatagtatatattctttttgcatacatataaactttttgcatacatataagaactatatagtatatataccaattttttttccaaaaatcttgagtatacatatgaagcccgctgaatcatagctagacccgcctctgacctcacatgcctcaagtggctaggagagtatcatcccttatagggagatcttccactcctagaataggtaaggtggcataaaatccccatgctcactatcccatgagacgaacgttagtgattttttaaagaattaatatttgaataggctaagtcccacctatcaacaagctagggtcacataacaggtttattagattgggttcgaatatatgctagaaagtgcgcaacatatttttttcgataaccagttattaataatttattttttctcttttttttcaggacagaaactgaaggctagcttaggagcctagaggagtggtacccatacgagcgtggtacccccaataaatctgtggtcagatatataatattagccaaaatctaatccgcgtgcgctctccgttttaccttatcgcgcaacacgttcatcggcggtcggattccacaagtgctggtgcgtccgaacatagcctggtgattcacggacgtggcatcatctaaagggatccaaattggaagccatgtgatgttatacactacgccggcttcaaaaataattttctcttaaactaatcatccgatctacgatccgattaccgttgtgttggtaagaattgaatctttataacaagatctcacatgattatattttgatgaaaaaatagaaattatttttataatatatctaaattacttttagatttcactaaattacttctcagacacataaaagtatattcaataaagcctaaaagtaatttacatatattatagaagtaacttagaaaaaaagaaagtaactttatcatgacattaaaagtaaatcagttacggaggtaaaaacatgagtctatgtagaaactaaatttaatcagcataaattacatcattgactaaaaatgattatataataaacaactcataacacgaatgtatagatttctttcgatgtcttgacaagttacttcacttttgttacttctataatataggtaaattactttcaggttttattaaattacttttatgactaagaagtgatttaatgaaatctaaaactaatttagatatattataaaagtaatttctatttttttcatataaatatagtgatgt

SEQ ID NO: 33990 - DNA, 584 bp, Oryza sativa
tacgatgatggttttgatcctcattggggttgtgagttctttagattctgctggaatgaaggtatgaggttgccatctattgaaaactgccctgggtgcagtgatattgtcgagagctcaagccgatcatataataggggtaatcggctgaggcagacaagagtttctattcatcaaagattgggtcctgtgaatcaagatcatggctaagaagacagtgtggtcaggaagaatcaatggtgtccttctggtactttcacaaagaatcagaagagaagggttcaaagattgaggaacagagaacgccttcaggaggttgaacaagaaattaatcatcggctgaggaaagcaaagccaaggcaggagtggcgtgttaagaatcaggttcatgtagccgatgatgttgcagccgatgaggcaaagaggttggcaaaagggaagagtgttgtgacggcactgattaacatggtctttaccttgccagccgatttcgggattgatcaagccgatgtcgacgaggtggaagaggaatcggctaagttggttctatcaccagaacaggcagtgtttgagaaacccgaggg

SEQ ID NO: 33991 - DNA, 1181 bp, Oryza sativa
gataaaagtctagtggaacaccaccctatggttgatataattcatctcggaaatcaccaattcaatgtagtgttcctatgattaaaattatgtggctagtcacactagtggacagtaatgtgaagaccaggattaaatagaaatttagtggaaggagtagtagattaggtggtggtttggaggttgaaccccaccttcccacaaccagtactttgtgccagataagttaaaactaaaatacaaataattaagtgtgaacacattttcttctttctacttggtggcaaaatgtgccatcgacaatgttagtacccattaatggtttaaaacaaaaatgaacatggataattaatatctcaagcatgatatattaattatggctagctacttgtaattaattcggggattgacaataacaacatgttttcaccaaaaatataaatacacttaaagttaaactttaagttgcttgacatcggcaaaagattaacattcacatcgtttatgcttcaccttataagttgtagctaaaatttaaatttaaaaattaattttacaatcgatatattttaggatttttttattgaagtttatttctcagtacgtgcttttaaattactaagaacacaaaaacgaaagatttattcacagactcataacccgctactgtttataatcagtataagcgaatcgatgattgtgtaaacgaggaagcatgaacttacaaagcgcaaatcaaacgcccatagtaacataatttcagttccaccagcaaattaatttaaggacatgtttcttagctgccatcggttggctggtcatggacaccgaattaaccatacaacttctctcttctcttctctctctctctgagacggctcgcaaattatggtagcggcattacgtccacgccacgaactggtccttaacccgcgccgacctccacgatcatgtggctgtcaactgcaaaagccaaaggtgacaggacacgatgattgattaagataatcacctctacccagatagagagagagagagaaccacgaaatgcttaattaaaacactggtgtgttaggtgactatgcacgtacacgtaccctgttaattatcgagtactttattaaaggttgggctaggctcgaagttgatactatcatctctgcaaaacaactttgaggtta

SEQ ID NO: 33992 - DNA, 829 bp, Oryza sativa
cggccaggtgcattcaagatggcagacggcgatggtcgcgagttagcaaattcatggaacattgatcaattacgtaaattttatgtgtaaatcaatagtatccatacttgtaagacatcttacgacttcaaaaaaagttgattttaggtaaagactacaatcaatgtgttccttcccgacgatcccttaccacgacgacacatagcgttgaaacctatcctcatgtccctttacgccgtcttgacaaggcctctgaggaacctaagtgaacttcggcttgggacgcccagagcggataaggccttgtcagatcatgtagggacaaacgaccatgtaagatctgttcatgtaagagctctcgccgtgcgtattaaccaagccgtgtaatcggaaactgagttttccaacttcacggctaggggctaggattagtgctttttttcaaccgaggcaagtcaagggtccaagagccttatcctccgagaacgcttctccaacgacaaggctgggggctagggagagtgtatgactcaaaaccctaaaccctaaaccctagtcagatagattccttttctatttcatgagtacttcttacaatttataactactccaaaatatattacatgtctccttgaagataatttttacaggatacaaagactcccaggacggctaacgccaatccatggattgaaagactttctcggcaagcggcgccattgacttcgccagattgtctatctctgcgggagtcctccgagaacgtgaaaacccttcttggaggaactcgaggtgcagctgcgggcggtgatctcggacacaggccagc

SEQ ID NO: 33993 - DNA, 672 bp, Oryza sativa
ccgcttccgacaaggagcgtcgctgctcgacccgtcgctcgccggtagctggtggacgccaccggccgccgccgtctccgcgaggagggactggctgctcgccgcgcgtgagagcttcccgccgccgtgtccggcagccgccaggcacgacatccgcgcggcgcgctcggcgatcatggcgtccgccgcggcgagcagggaaggcacaggcggcgccggcgcgggcttgcacggcgagcccaccggcgtgctgtagcacgacgcgtaccgcgacgacgacggcggcgacggcaccccgccgaccccgagcccgccgccgcacacactgaagtgcttgctcgtcagctcggtccttagtccggcatagtcacctaacacaccagtgttttaattaagcatttcgtggttctctctctctctctatctgtgtagaggtgattatcttaatcaatcatcgtgtcctgtcacctttggcttttgcagttgacagccacatgatcgtggaggtcggcgcgggttaaggaccagttcgtggcgtggacgtaatgccgctaccataatttgcgagccgtctcagagagagagagaagagaagagagaagttgtatggttaattcggtgtccatgaccagccaaccgatggcagctaagaaacatgtccttaaattaatt

SEQ ID NO: 33994 - DNA, 998 bp, Oryza sativa
cttccggtatgacttgctgagtacagtgggtagtactcagtcttgctctctttttccccacaccagagctgaagatcttcctagttggagctgttttgtcaaagttggtttcgtcgctgccgtcaaggattgcctgtgaagtggagtcgcccgctgctgaagtcaagcttcccggtttagctcgcttttatcttttccgctgcatttgtaatcttttctatttttgtaagacgtggatctgtatgtcaacaattgtcgtttgtgtaccctggctggtcctggacagggatttaatgcacattcagcttagaaattctggttcgagaatttctgggcgtgacaagttagcatcagagccgaccttgaccgtagggcaagccaactagaaaacctaggagccctctgaaccctttttcatatgcatatgcctttttcacttggattttgtttcgggaaaatttggggtttgcctctttggttggtgggaaaaaaaatcttggtcgttcattcggatcggatctttaaaattagctcagtctagggttttagtaaaattttatttggagtttattcgacagtcagtcgggaatctattgggggttatgcattaggtcgtgtctatgttcgatggggcaatgttatgcgcatcattttccatgcaactagtctatgcattaatttattgtttagtcagttgcattagtgtcttttgtctcggttcgtggaaaaggttgttccatgcataaaaatcaccatgctaggttatttatttgagtcatttgttgctttgtttaatttggatttgagcatgaattggttcctatcccttgtctactttagatgtcagtcctatccctcgattgcaagcgccgccccgagcttcagagtcgccgcccttagctttatcgtcttcttagtctgtttgcttgctagttttcgtgtttaggtttgttgcttgagggttagtcggtggtcgatatcatgtgtcagtggtatga

SEQ ID NO: 33995 - DNA, 1498 bp, Oryza sativa
gatttatatgttataattttttttaggttttccgttttttacataatcaatatagaaagggcggacaccgggtgtggaacaggagggagctagggagtacgtatgtacgtttgtacgtatgtgtataggacggtgatttagtgatttagtgagagatcatatagcatgaaaatagaaactaatatagcatggaaataagagagatcatatagcatggaaataggtgagaattaaagggatagaggggagggagggcgtgtatctctgatctcccgtacgcacggaccaagcgggatgtggatttttttttaccaaaaaatagaactaattccatgtattattgggtccaccaaataagtgtaaatctaataactaaaaatctgaaatagtgggtccaccggtttattagattaccacgtggcggcttaattaggagcgtttgtaggagtccaatgtggcggcatgagaacgtttgtaggaagtttaatggacttttaatatataataataatagatagatagataaataaattgcctacgtatctatccaggcttccttcctagttttgttaattggagggaagaaatttgccaatcgactaggttgtgtagatacgtgtagaaatggggttttgatatttgcatgtcgcgctttgtttattaatttcgggtcatgggtattcctgctctgatacgtgcattcaacgcattgacaagtccttctatgaaaagcttaaaaaacatgaaattgagttgactacgaggcattgacaaatatatcgtacaagaagaatcacgtttttccccgtttgcatgtggcattttatttataaagcaattaccctccctttttcaagagaggtacctatgctgaggaacatatgtatagaggaggtactataatttaatttatgagtgaagtgcacgagcggtccctaaacttgtgcgggtgtgtcatctaggtacctaaactctcaaaatgcattttcggatccttgaacttgttttggggtgtcatataggtccaaacaggtccaaacgagctccaaccctttccatgcgctcgtgtggcatgccgcgatagttcatacgtgttagttggacccacgtgtcagccacatagaagaaaatataattagaaaaatatattttctcctctcttccttaaaatttttatctttttttctgtctacctaagaggagaaaatatggtttttaattttattttttatatatgcttgacatgtggattctactgacacgtaggcgtcaccgtggcattgccacgtcagcgcatcgagtgggttagaacctgtttggacctatataacacacatgcaagttcagggacctaaaaatacattttaggagttcaaggacctagatgacacaccggcacaagtttaggaaccgcccatgtacttcactcttaattttattaactgaatactagaataaactctaccattacttgattgtaaacctgggcttttaacca

SEQ ID NO: 33996 - DNA, 684 bp, Oryza sativa
caatttgtggaaataattttattttggttgagggaagatcgagtaatcaacgttggaacaggacacatatagatccttccattcttctcttccaataaattgggattgctccgctgctgtctgggcaggaatgcagctcgacattgttgccttcctgtgcagggtgaagcaacaggtcctcatggaccgtgtacttccatctgtggcatcggcatgtgcccagccgaaccaactgcagtaccaccattcattcgagcttgagaatgtgcagacgtgcagatggtcgagctcgtcagcgtgctgacagccacaagctcgagcctcgaggatggcatccggttggcgttcattggaggaggaagaagagaaaggagaggggggctggaggtggaagaaggagagggcacggctggtatttcacatgtttttttttaaaaaaaaaggaaaccgatgagattctaacagagttgttgacggaatgctaaatatgagaaacagagctaactttcgatgctattctagtaagctgtgaactttcgatgctataaaagtaaaaatgggaactttcgatgctacagaaccaattttgcctataaatatacccccgtagtattagttttcagaagaaggaaacagaaagaagatacaagaaagccatcaataaattgtaaattcttaaagaaa

SEQ ID NO: 33997 - DNA, 542 bp, Oryza sativa
agataaggatatgatatatgctgatgcaggactacggccacacctcatgtattattcacataagaaaaactgtgattgtgattatgaatacgaggacgtgcttctggttctgtcggcccttcggcaaagcggagatgagacgtgggaagaggagttggctgagttcggtggtgggtgttggacccatcacccacacacgaaaaatgaagcagtctattagcgcgtgattaataaagtattagctattttttaaaatatagatcaatatgatttttttagccactttggtatatttttttttaaaaaaacaccgtttactagtttaaaaagcgttcatgtgtaaaacaagagggagttggaaatggctggtatcgaacacagcctaagaggactaaaggaggtctctgcggtgccgtgggaggtggtggtgtggtttgccgctgctccggtcgatagggagggggcggctggagttcgccggtgtggtggagagagaggaagacgtgaggagatgaggggagaccaagggagcacgggcagtg

SEQ ID NO: 33998 - DNA, 736 bp, Oryza sativa
agaataaaactttgatatcggtttttccacgtgtacccacgctgtcaacatgttacgaccaagtgagcccattcaggttttgcttgagatcgatttacgagtggaattttagtggtccaaaaaatacacttaattggcttgtttataatataataataaattttattgttccattcatttcaaattagttatcattttagtattgtcctaaggcaaacgtatctatccttgacaattaatttctagaaaatcgtataggttaacaacatgtgaattatatattatgaaagtatatatcaaggcgaatctacaaacataaatcttatgatattaaactacatgaatgtctagaagttgatggcaaaatatacaaatgtttaaattaaaacaaacctagaataagaagtaatttgaaacagagggattacatcattaaaatgaataaatatttgacttgagtggctagtaactaagctgattactgcttataaaaaaatgcaatggttgaattgatatgtatcatgggtcttgttggcatattaattatgattggttaatgtaggttttcgtgggcacaaaaacgccaacatgcatttttctttccaggtaaatttacgacatcatttttatgcataagtaacaaaaaaatcatcattgctgtaatagaccacgtggcttgtttaatgcaccaagtctttgagccttatgatatgtacctcggattttgaatttatcg

SEQ ID NO: 33999 - DNA, 660 bp, Oryza sativa
attttattttttattttcaatttcagttgtttcaaaagtgtgttcctacttgaactctcttttaatttttctaattttggatattattttattttttattcgaaattttaattaatctcgtattgggttcttatatagattcttctttcaatattgcttattttaattccgaatttcagctaattttaaattgtattcctacttgaactcttattttattttcttttgctaatttcggatttatttatatttttattccgtattttaattaatctcgtattgggttcatatatggaaacttctttcaacattgcttatttttaattccgaatttcagctatttttaaattgtattcctacttggactttcctttccttttctatttttggattttattttttttatttcgaattttgattaatctcatattgggttcttatatggaaactatggtacatatgcattaagcttaagccaccaattcagctgatgatgaaccggatgctactggcattctagctccctacctcttcataggcgagctcctctgtgactaccgactgttcgttccggtcgtctaacaccccaccctgtactacttgttcggctcggggtcatcagcagccgccgccgccgcgccgtgcaacggtggcggcagc

SEQ ID NO: 34000 - DNA, 742 bp, Oryza sativa
  unsure (1)..(742): unsure at all n locations
gagattgaagacacttgaaaangctagtaacaactgacttatgccgaattcgagctctgtaccccgagatgcttcaagaatcacgcacgtgtgaagagaaggtgcctaaatcaaaccaagatgaattaggatgtggggatttgcaacaaatcttcttatggggagacatctcaaactcagagtgacatttggggtggtttttgcaattttctctaaattaaataagatggttcctagccacctaataaaacacgaagacggcctgtatacatcaatagaattttgggaaccaccacaactccggatctgatttattcttttctctggagttaaactgaccacgtttacacttttaaagatcattaaatacaaattatgcggatcgggtatccttactgtcaagacacaaaagatcatcaatccgtatattatcagttgattcatgatctcatatttaaagaggtggtaatgaatatattcataatcaccatcacttaaatccagaagatccattttcacatttatctacattgagcagattataagcagggcattcgcataatcaccggaagttatatatttatcatgcactgttattaacgggtgaacacaacaacgtttcacagcccgaatccgattagaactcgcggggtttggtggtcgctcaccatacctggaaaggagttccatccaaccaaacaccactgttttcacacattccgtcataccggtatgcacttct

SEQ ID NO: 34001 - DNA, 740 bp, Oryza sativa
tgaactaaagaagttgaaaacccctgaaatccacttctaattatacctcggtaccctgctaaatgtgattcttaagtatcgtattttgtaatgtaattggaagacttcgacgatgaagaataagaagaagagggtgccgttggagatataatgtaagcctttatgctattttctgaaaatgctcatatcatgattgacagaatcacagaatgctttcgcacactatttttatctttaagtgattaaatactgggatatcaaatggttttaactacattttaattgcttttgtgaagatcggtatgatattcgcagaaatggaaaaggttgtcatttataaatttgaattgtaaatcactggaatattcttcacaaccttttcctattttatcattttcatgctcggcacataatttgacctgtttaagttaattgtcaaacttacttattagatgatggctagcttttcatgagaccaacagctcataaaagggcatacagaggccaatggagtaggaaaacaattggctccaaataatggcatggagtggactcaattaaattagcaaacattaagtatgtaagacaaacatattacattttcacgtaaattgttaaaaaaatgatgatagcacaagaaattggatttatgaataacaattagattaggcataagtcaaagaagaagtctgttgaatattaaaatataggtataaccacatgtgtggccaatgtggaat

SEQ ID NO: 34002 - DNA, 825 bp, Oryza sativa
acaggagccgaaagatggtggaaatagcggaaaagaggcggaaaaagggagataaggggggaaaatgcgaaaaaaaaaaaaagaaggatgataacgctgagaccgcctgatatagcgcgaatcgagctcgggacccttccccttgtagttaaccacctaatagttggcagaaccgggctgatgggtcatgtgtcgcgcacagcaagatgtgtgggtcgagtcaagtaaagtctgaggagtcgatttaaaatatggaacgagcacaatggatcccgtggagggtccattaagatgactcaattagcaggagctggcgagcaggtgggcatataatggggaaaatgacagaaaaaagcaatgcacaaaatgcttggaaaagaaattatccattcacaaaagatcatccaatttgggttttatacttacgccctgtttatagaggcacaaactgcctctatatctattctcgcgacaaaaatggagaaaagcatatagaagaaaacaaagactacatggcactgacagtgcttggcaatattaactatttagtgctttgattgactgcagtgtgaaactatgagttgcctttgtagggccatgacttattgattaaacataagaagcattacaatcttcaagcaagagatgcttgacacagtctggagcctcagctaaccaaacagcactactgccgtagtgtataatagcatgctgagctagctcatgtgctaccttattttggtctctcttaacctttgctacacaaaccccacccagtaaactcatcaactcatttggatcacttatgcagccagaattacaaga

SEQ ID NO: 34003 - DNA, 660 bp, Oryza sativa
attattattatttcataggttagtttgattggatgcgcgtgcgcgtgcgtgcgtggagaacgagttacagtggagtacttatataatcgtgtatactgttctcacaacacgatacatcagtctgaattacgaaagctctcgagcataagtaagcttaataatgttgtgcacatgtaactaagatcatggactcgtggatgtgtgtggttgcccaaatttattttagttattaaaagaaaaggaaaaataaccgtgttcgtctatttatatttatgaacgaagggagtttgttacaatgatttattcgtgaactgtttctattcttcaattaatcgagagaaagggacacaaagtaacactcctttttgcccacgaaccgaaaaaaacactgctaattagtcatccatggatccatcttctcccttccgacaagggcaatagagacgacgacggttgctccactgctctccggccgccgtgtagtggtggtcgcctcgtcggcacggtggtcaacttggcccatctatgtaagtcggttgatcgtcggcacggcgccattaattaattactccggccgaaagtgaccatatatacgtactgtacaactctccggcatgcagatttgttgatccgctataagttaatatcactcgcgttgtt

SEQ ID NO: 34004 - DNA, 730 bp, Oryza sativa
tcagccttttagaaccgaaaaactccgatagccaaaatgttaatataaaaaatcacataaaccattttgtgcacataattactaatttgtcatagttagcatgagctacaaaatgacctgagcctttcttgtaagttgtagatatcagtgatatgttatagcccatcatttttcccttatagggtatttcccatgctccattaccagaaggaataagcctacttcaccccctaaagtacgaaaccggatattctaccccttaaagtatgaaaaagggttcaaataaccccccagagtagttttttaggtggttttgccatgaaaatgattacgtggcagcggtattggcttgcatgacacaaagattagtctagtaaacccaagttgatctaactattgcttttcactcattgatcggcaagcctaatcccttcatcctaatataaggcatggtcaaacttggtacggttggcttataatttatcatgtactataatataaggtttatagcaagaaaattataatcatatgaaagtaaattcaaatgtcaatccaatgataattttctcaacaaataaaatttaattcatattatactaattattggtcaaatattttagaagttgagtcttgaaatgcttgcgcgccttatattatgggatggagggagtatatattaacactaatttacatcattctcagcccgtttcacttgtgaataaaatgctta

SEQ ID NO: 34005 - DNA, 615 bp, Oryza sativa
tattagagaagtgtcattgttcattgcttgagtcagtaaaatgtaacagctagtttagttttcattttttagcaaaagaagctccatcaatttagtccattgagtgatcgtcaaaagcatagaaatttaggtatcagataaataaggataaaatgtgaagtgcccattaagttatgtaagcaacataagtgcatacaaagcatgtaatacacaaaaagtctcctgcagaagttcagattctattgacataagccatgcaacaagtcactccaaggagtcatagaagcaactatacaaatgattcttaacttcctgaagcttgtgtctaatattagaatttagaaagttattaattcatcgatcatggcagaaactcaaagatactaaacttaggattgttaacaaaaattcatcatttttaatgcaagatgagacatagattagaattctacaacacgaacttaactgttatgcacatcaagatcaaatcattttaaaatttatttttgactaagaaaatattgattcagcccactttggaactgagtcaaacccatcttgaagttttaactctaaatagtaccattatttcaccaacaggttataaacctttac

SEQ ID NO: 34006 - DNA, 742 bp, Oryza sativa
  unsure (1)..(742): unsure at all n locations
tgaaatggttgaaacattgaaactctattaggttgttaaagctcgccaccctttgtgaagaaattccatattccctacccacaaatttttacaataaagagtgcccttctaggaccatctttgtgctattatgatgttcttcctttctataccatgttcttgatatattacatacaatttgaagttttcttgatgtgtaatctcgtggccaatttagagagaacgtcgtcaaaaggagcgtgaagcactacaagccaatggttctctacaaactgctaaatgattttattcctaggtatgtgcgtgacactccttgagaaaaatctgtttgatggaagtgttcatttttataaccagtttaggagtagcttcacaatttggtggatgtgaaaggaaggtgagaatccccaatttatctggtaaaaaacttgagatatatttttgttcaccctagtgatagtgaacttgcttttggtatgctttatttatgcatgcatttgtttaactttgaattgacattgtatattttaaattttcaagtgttttattacttggttagttcgatgaaaccctggattcttcattgatatggagtgaagaaaattttataggcaggtaatattgtgatgctcttcagatatgagtagatctccgcactccaggtcttgcttcataatgctactcaactgcatcattacatncttgtgaaattaccgaggaaactagatctgatgaatattgg

SEQ ID NO: 34007 - DNA, 747 bp, Oryza sativa
tggagaatggtgaaacgttgatatcgtcaaataccatctggtaccccaacgatgtagtgctagaaggcatgacggaagctagatagggacgattggttgacagggatccggtgagcggccgtcttaattgttatgctgttttttaaaaaaaaaaatttggttaattgcatcgtgtatagtataaactaactgaaattatcctttggacgatatacaattacagaggaaaaaatagtctcgtgcctatgatatgttaggtatgatccacaatgatctcaatatgagttgcacatgcgtgattactagttgcgaataaaggcacggcctccacggggcgacaatgagtataaacatgctatctatgtcaagtgccatatctctgaaactacagcttgtcaattgctatgtcccagatcacatcatatattgggttaaaactggtaaatgacatcatcatatatttctggtgtcccttttctaatggctacttatacacaagcgaagaccagtgtatcattcgctactgatcctcaaaaattgtagcatttgactactcagcaagaggtatacagttcttctccacaagcttgaaaagcaaagtgcggaaggcagaattcatttttagttgatttaagtcaaactagtttcatatactcacggtatgaatactgtgattaaatgtccaaccattggttattgtttaaactggagcctcagtcctactgtccaaggtttaaactggaccat

SEQ ID NO: 34008 - DNA, 752 bp, Oryza sativa
  unsure (1)..(752): unsure at all n locations
ccgcgnattgatttgagtactgattgaccanatccgaattcgagctcggtacccttagacaagtttttatgttttgatttttctcaaaataaaaatgccttatatattttataatagatggagaaacaagttagtattcctttatcatacaataatactctattgtcataatatatgacgtttgttttttcttgagcaaactttcaaaatttttcccatcaagaagatctcaacggcagggcaccgttggcctgacctatatatacacatcttttaaacgggtcttaagagccacgcaacacgtggcttatgtggctagtttaaaataaagctacctataccgcttatgttttgtttcacaagtaaagatatttatccatccactctctcatctcaacctattataactattcttattttaatctccatttattttttttcacatactttttctttttaatcaaccgtaactaatacatgtatctaactttaaaaagataattgttacgagtacaataaaactggaacgattttagtactatactaaatagtatggttatcgattgggtggaaacatcttggatcgcatatttaccgcatgcatttgagactactaaatatcgtcctctaatagtttatagcatgcttttttttaaaagaaaatgtttatgttttaggatggatgaaatactatctgaaaacancggaggnataaaaataaagttttgtaccgaacttttgtgaactaaata

SEQ ID NO: 34009 - DNA, 744 bp, Oryza sativa
  unsure (1)..(744): unsure at all n locations
ctgtccaatggtacgcctnnnnnnnnnnnnnnnnnnnnnnnnnnnnnnnnnnnnnnnnnnnnnnnnnnnnnnnnnnnnnnnnnnaatcgacgacacaaccgagctgtggtagctgtcacaaacagactcgacacggatcctcgttacaccacctatacgctaagtgaactggctagcatattgcggtgcgacatatggacacattgacaccgtgagtgataaaagcattgtgctgcagccagacaccatttctgtcataacaagctgctactctagtacacactatctacgccaaaatcaccgacgtagagaagttactctaaaacaacttatccgacatataatcatatgacaccgttcataacaaaacactaaaacgcacatcaaatgagggtacagaagcttgacaacaacgatcgaacatgatcctattccgtgaaagatacaaaagtgctcatatgatatggagaagccactaatagatggcactgcgtttcttcataaacatatgacatgaacattcgtacatcttctaagcaaatgacgtctcatacttaagaaggctcaccgctacagggaaagcatggcatggcagcaaccgcgagcggattacagatagcagctggttcaaagtgctgagaatacgcgtatactatcaggaagctgatgagcgagacgcaatctgctgtatctggttgacagaagtcgatcgctaccattatgatgagatcggaccgcagtggg

SEQ ID NO: 34010 - DNA, 644 bp, Oryza sativa
  unsure (1)..(644): unsure at all n locations
ctaaagtcaactactcttctgtttgcatgtcaccttgaccaccttggatctttttctcatgtcttaattaacacgcagaatgccgaatatacaatataataattagatcatgctgcaatgcgaatatgcacttgttaatttgtgtgttttggttatctttgtcacgttttcttgttgacttgggtgcacgaatcaatttagctcagctctactttgaaaataggggattttatagccagctgaagtgcgatttactcagaaataaagaacttgtgtggatggtaagaactttcacatttaatttctagtacttgtgtacttatgttgaacttctttccataatctaaagaaccgctgtcaaggttgtcattatttttaaggcgtgaagattggtggttcggctgagattaatttttggcggcacccgaaatgatataatacattagcgcatgtatcaagcgttaactattactccctccgtttctaaacatttcatgtcggcgacttttttaaatatgtttgactgtttattttattaaaaaaatttaaggaattattaatttttttcctatcaattgattcattgttaaatatactatatgtatgggtaccgagctcgaattcnccctattatggggccggat

SEQ ID NO: 34011 - DNA, 1043 bp, Oryza sativa
cctgcacccccaaggcagcaaacaggctagaaccatgcaaatgcaaattaagacaagattgtaaccatcaagacatagtaaatatatctgatgtcaaaataataacacaaacaacataatgctatcgagtctgagcacacagatgtatattgtcaggagcttcaggtgtgtggtgtgtctgtgttttccttaatatgaagactagtatatttaaatatttcaactgcttagacagtgagataataagggtgacaaggggaaatgcttctcacttctgtatgctcaattatgctacctttctcatcccgtaacctagcatatccaggaagattgcatcatcagtatatacaacaattattatatttgaagcattggatgaacaaaaaaacagtacttaggggttaggatgtttcaaatagattgcttgaattatgtgaaactaaactgtatgctattgaaataaagtcattcccaacagtggtagtagattacatattgtccatatttgacagcaaatatggtataagatagaaagatgaactggcaattgtgatgtgatgtctaccaagtaccaacttggatccttcccaaaagaaaagtgatgaagattgaaatcctaaaatgaattacctttcacaagatttgacaacgttcgcaccagcttcaggctcacatttacgtgtcttcacaaatttttcttcaggtttgtaagcaacatcctgaagatacacaaaaaacatgttacagaccacaaaggataacatctgtccagtttggtaatagagtgatttgacaaacagaaaaaaggagaactttctaacagtcaacatgccgaaaagagatacagagagtgcacaaaagaattttctttagaagagtcagataagaagtataagattactaacgaccaattgaacacttcaatgttttgtacttcctccgtttcacaatgtaagtcattctagcctttcccaaattcatattgatgttaatgaatctagacagattcattaacatcaatatgaatttgggagggctgcagg

SEQ ID NO: 34012 - DNA, 2703 bp, Oryza sativa
atattataagtcgtctgacttttttcttagtcaagctttgttaagtttgatcaaatttatagaaaaatttagcaacatctaaaatgtcaaattagttccattaaatctaacattgaatatattttgataatatttttttttgttgaaaatactactatattttttttataaacttggtcgaagtttgactaggaaaagttcaaaccacttataatatgaaaaggatggagtacataagagtatacaacacaatagtttgttcactgctccttaaaaataacatcacaattactgtccagcgtccacatctcactccaacaaacgtcaataggcagaaatcaagagggccacacgaagtgacggatgatacacagaaaaaaacgcgcataaaactggtgttcagtatcgcttagttagaaaccagaatccaacaggttaggaagcagagggtttaccctgaggtaagtgagatcgtagagcgcatacacctcggatttgttgatggtgatgatgaggggatcccggatgggcatctcccccgcctccgtgccgttctcctccacctccgccacccgcgccaccagcgacgcctccccgccgctttgatcccccacaccgcaaacgttagcgaaacgaacagtggcgtggagagaaatttggggggaaatgagagagagagagagagagagagagagagagagagagagaggcggagagtcgagcgcgattaccgagccactgggcacggccaggtcgacgacgatcttgctgtcgcaggtgaggcggtcgcggccgtcgtccgagccgccgcgggcgcagctctccaggcgggacttggcgaggacttccactccgccggcgggcgcgaagttgttgacggccgcggcgaggagagcgaggaggaggggacgggatgagcgagcggcacggcggcggcggcgaggcgccattggtggttgcccgcggcggagcgagagcgaaggggagcggggcgaaactgacagagaggaggggcaatggaagaagattaaccgttttgagttcaaaatactactccctcgtcttaaaataagttttcttttatcatttattctaaaataaatttatttgttagtaattattatatcgaagtttataaaaacatgtaatgaatacattaaaagtagataaaatgatgaataattaatttaagattttaaaaagtaaataatattttagttacttttcaatttcttttgaaggaccaatacctataggtgcattgattcataaaatagagtaggaaaaaattacaatactaacactgtagttaggaaagaaaaaaactatcaccgcacactatgttatttttagttttgcgttgatatatacgatatgagtaaaaagataaaacttatttttgaatggaagtaaaacacgtcttgcatcttgtgtggctgttgagtggtttgatggctttgcaacttcacattaaccgcaccatttggaagtgaggatgtattgatcaaaatcctaataattttctgtgtgtgtgtgtgttttttcaaattttgtgttttacaaattatctgatttttcatgttttttttcataatatataccattattcaattaaaccattttactttcacgtgaaacaatatccatcaaacgagctctacgtctgcatgtctgcatttgtacttctcttattaatacaactatcatggtggattgcacatttgcataactagacttagttttaagattcacgatttgtcgtgtaatgtacaaacaccatgctattcatgatccacccagcgagagtctcgccgaaactcacatccatacatagagctcctagacatgtatgtatgtactgtctactttttgttcttttccatgtatgttctgtctattttgtttttttccttgctgatttatgctccctccgtttcacaatgcaagtcattatagcatttttcacattaatattgatgttaatgaatctaaatagatatatatgtctagatttattagtatcaatatgaatatggaaaatgatattatgaaacggaggaagtaatttgctggtaacataaatatgcttcaggatctctgcattactagtaactagtaacacctgtgcttacatgagttcgatcataattctcatattttaatgattcgactaatggtgcaaaactgcaaatacttcctttttaatgtggtaatttctagtaccttcatatagcaaaaaaaaaaagggatgatcataattctcatcttttaatgattggactaatggtgcaaaactgcaaatacttcctttttaatgtggtaatttctagtaccttcatatagcaaaaaaaaaaaaagggatgatgcttccaaaaatgaacgccgtccgtggggatcgaacccacgaccacgtggttaaaagccacgcgctctaccactgagctaggacggcgttttgaatgaaaagaaatagatcaactataactacaatgatcgtttagaattgcaccatacatcaattgctttgtctcttcagatcaagagcatttgaacagaccagaatgcatagaacaacttttctgcaatgaaggcatttgaagcaagaagtaacgggaaagcataaaaataactagaatgctcaacctatataaacttcagtggccgacggaacaaatttacaggaagaacaaatcgggctgcagg

SEQ ID NO: 34013 - DNA, 686 bp, Oryza sativa
ttcatttttaaatagtgttgttaaccttcaaattgtttgatcattcatcttgctaaaataacatgtaattattattgatgttgatgtgacttgtttttatcgttattagatgtcctttaaagcgtgatctatttttttcatatttgtataaacttcttttaaataatactacgacgtgtgattaaatgtttccaaaatccaaacatcaagaacatcctatatttaaaggcactaactcggaaaatttgcttgtcctaaatctcgagaattaacaatagagactaatccaatatgggtaccgggggactcaagtcccccctttgtatccccatcgaaagaaggagagagggggaagggaaataaacggaagaggaaaaatagtagaggggtaaaggaggaggaagaagatgagcccccccaaccaaccctagcactaaagcctcttgaaccggtgaccaacatggtagcaaatgaaataagagaagtataccaacgatgatgatgtagtatgtagagctagcaatagcaatggacattgattcttacttcctccatccccaaatataatgcattattgtgtggtgaatgggaaggtggttggtgtcgaaggataaggtgagaagaaaaattgaatagtgaataattaattggatatgatgtactctatatttcttatatttaagtaa

SEQ ID NO: 34014 - DNA, 726 bp, Oryza sativa
gatgagcacaagaacccggggtaggtcaagaaaccagtcacaggaatcacgtcgagaagtttttggcccatatgccacctcgggaatgacggatgcggggacccctatctgtcgaagttgcctaccgacgtagtgctgatagatatggccgaggtcgcgtgagaacgcgttcccgtaggcgcgtaggcccacgaagtagatcgacgggggaagagccttcatcaggattgcttgcacccacggcgctaccgttgtgcctgcctctatctcgatgaagggtttgtcctggagaggattgaacgcgtacttcttctgaggagacgggagcgggtcttgccactttcgattctcttccttgaacgctttcggcgtggtcacgagatactcattaaacgtccgccgcacagcatctaggtcgatcacctcaccgagctcagcgaaatgcgcaccctctaaccagcggagatcgaatatgccactgttcatcctggccccgacgaagatcaaaaacaccgaagcgacgtagtgtcgatcgacatgccactggtgatttcctcaaaccagccgggaaccatggcctctggggcgaagtctgggggctgctcgcctgccgacccgaagaggaggatagatcgcgccacctcagcaggcgcatggcgttgccccggaaactgttcgaagaagatgcgagtgagcaccttcgaaagccgctcgggggtgcaggaa

SEQ ID NO: 34015 - DNA, 576 bp, Oryza sativa
acaaatttgcgtaaataattacctgataaaatagccataataacagagaggctgggatgcacgtttatcccatacttcagaataagtaaagaaatgaattagatcattatatgcttcttcaatatgtgaaaggcctgtttccatggtgttatttacagaaggtaaaatagattcgatcatctcagaacaaaaatatattaggctattgtgcactccttccagacatgaaaactaaaagcatgctgttttgtacagatggtctccagaatgtaatgtactccacatgaatcgtatatcgtatgtcttcatagctgaagggagcattataaagtagtatgggttctagaagtacaaaaacataagataatttgccaactgaaacaagtccaaaagtcaatagtttagacagtagcttatttgtagaatcagcaggtgagttaatcagttaatatttacagtattgtaatttacatagaacaatggtaaatcacaactaatttcataccaatcatctggaaaacgtagacagtgagctgtgttagcttttcctttcgccactttatcaactgtaaaata

SEQ ID NO: 34016 - DNA, 590 bp, Oryza sativa
ttttttataatggaattcaatcaagagatatatgagctgattaccaattatgacgaacgaaaacttaatataatcagtgaacacttgcgattttatatgttaatttattgggattatgaacacgatgcatggaatgcataaatgcaagctagtaatgaaatcatgtggaaattgtgcgtctcaattaatttgtacatcatgcccatcgtttttatatttgaatagatgaacttggcatcatttgaaaggcgtgcggcctacaagagaatgcactttctttttgcttgattgtatgctttgtaaagttatcgcgtttatttcatgtcttatttttatgttttcgttcatgatgtaatgactaaagcagctagcaaagacatacgctgtacagtaggactgaggtcactatttgcttcgagcaactgaacaaacagtgtgcacagatgagtatccctctgtgctagtaataaccgtactataagtttgataaaaatctactgcaagcatctaccgcccctatatattaagattgcagctctgatgaatgacattgacccaacgtgaatctttgcagaagccccccccccccc

SEQ ID NO: 34017 - DNA, 609 bp, Oryza sativa
agttgagtattcagctgttgggaaaatttagcgatggaccacaaaaaaccaattacaaaccaataaaaccattacaacatcacacatgattaaaacttttttcgctacaaaagaaaagcaaatgcgtgcacagctcaccatcatacactctgctcaagtccatatgcacacacacctaagtacgcgagcatttgatgaagcagtcaaggataaatcaacaaccatagaatagctagttcatgctaacctgttcatagtgtaccctgggatgagaatccttttgtgagcggactttacaccaacactccaccacacaccaaaattaatccctcataattaatctaaccacacaatatttgatgaaatctgcacaggaaagtttgaatatgtttggtttcttatagtatagttctcccactttctccaacacataaataatcaccttccatcatttcaaaaaagtactgttattctctatttcgtcatgctcttttctctgtgcagataccaaagtaggccacatattagcaaaggaagtgattagcttgcagtaaacccctttttttaaaaaaattactcatcaataatgacttcattgtgaaaacgttg

SEQ ID NO: 34018 - DNA, 645 bp, Oryza sativa
ttaatgggctggaacgtgcatccagggatgacaaatgggccgtaaagcccttttatctgtctttcttagtgggctggaacgtgcatccagtgagatgttgatgggccgtaaagcccttttatcatctaacttttttttttgccggcgtctccaccgtccgccgtcgccggcgttgccgatcaagcttgccattgctcgccgtcgctgcgcctgctttgcgaccggcacatagtgatgctttcaggaagcatacgttatcttccggttagctccataaggtggtgggctagacggcctgggttcgaagtccccttctaattatttaatattagatcattccctaatattcatgtttttttaaaaaaaattcaaagagaaatgctttgttgaatttgttgaaagaataactgaagatcccccccgaaaaaaagaataattgaaggaagaatttatgtacaacatccgtcccaaaataattgtaatccaaattgtttagtaaatattaaggggtctgttcgctgcagctaaattgtagttgttgtgtagctgcgctacagtgcatgatagagaaaatatatgcactggctgtacagcgcagccagttacagctgcatagcagcgttgccgaacagagccaagtttgag

SEQ ID NO: 34019 - DNA, 561 bp, Oryza sativa
atggtaaatacacctgaactgaatggagatgaaagacctctgctgtaaaagaacaaagatgcatagcaaaattactgtggtaaatacacctgaaggtaaggataaaaaatgaacgtagccacgtagataagtttgacatcaactgttaatcaaagtagttatcaacttatcataggatactatggtgacttgagttttcagctactgaatcactaatagtacaatagtgtactaaacaagtcatttgtcaggttcagtacattatagaaccaaccttacagtacttattttattgcgagcaaccttgaattaacaagagggattcctataaaaaaacaagaggctaatttccacacggagataaaaaaagcacagatacaaacagacaagttggtcagcagtaggtgagcagcaacaagtgccatttgttctacatgggaagcaacaaacacagcatgtggcgtcagatccatctggaaggatttccggatagagtttgggcaattcagttgaaccctcaattctacgcataacccacacagagaagtagaaacattgaat

SEQ ID NO: 34020 - DNA, 630 bp, Oryza sativa
cggtaaatttaattcattttcaatttaccatacatattataacattgtcaccctttgagcgtgcgcttaggggctatttctatttgatattcttttctgagcgttgatttcaggaaaattctattcaacattgtggaagactccatgtccctatggttctacaccaagatcgactaagacgagtacgacaaatgtcgacaaagctccgtcgcagactctacgccttctcgatcgctcgagaacggttgctggatctcgacaaggaatatggaatgaagaaatggtgtacacctagacatatagcacataaaagcttagctaagagcagagaataacaggagctacattattataataaaacaagggcatctgtataaagaaaaaaagtaccatgtcttgaagtcttgattgtgagcacgataatagaacaaatatattagttgtcatacctccaaagcatcgataatgaactgcttcgaatcttcatcaacatgtctccagtcatcatgattgagagggaaacccttagttcttacaagtgtaccaacaacatgtggaaactctttagcagctttccctactggctgatcaaattcgttgaactccatcttgatcagtggctcgtcttct

SEQ ID NO: 34021 - DNA, 727 bp, Oryza sativa
attttactccctacaatccaaaatatatagaacaacaaccttaatctaaaaaccaagaaacaattattatcatctcctaagttaaatcatcgtgataaatataatactgcatccaacaaaattagagatgttgaagattgaggatttaaaaaaaataataatttggtggtgagaagatactaattaattgtatgtatgcacatcttatattatgaaatatatgaaaaaaaatagttgtgttttacattatgaaatggatggagtaaatattagaagttattatattttaggatggagaaagcacggagtatttgtatttggttcccagtcatactttatcaccattgagggctcctctgacgtaaagttagagggacatggtcaccgacgtatgggccggccccacctatcagggacctatgtccctctgactttacgtaagaggagctccgtccatttgtcaataaatattgttacacttgtttaagttgagacaattaaattcttggtcgtacattagcaagtctaagtgaatcttaccaaacttttttaagttgacccaatatattaaaaaaaaatcttgtcacaactatagctacaactaaacaactgccagtgtgattaaacttccctaatactagatgcaacaaaatgtgactgataaccacaaacacccccttacattggccctcaggtgacaatggtgacgttgaaatatcgagcagaa

SEQ ID NO: 34022 - DNA, 584 bp, Oryza sativa
ataaaaaagagagataatttaaagtatactttttttgtgtatttgaagcacgggagtaccaatctttttggaacttaattgtatatactccatccgttccattttaagtgcaaccataaattttcgtgcctaactttgatcgtccgtcttatttaaaatttttttataattagtatttttattgttatgagatgataaaacatgaatagtactttactcgtgacttatgtttttaaatttttcaaaaacttttgaaataagacggatagtaacgcgaaaaaatcatagttgcacttgaaatgggacggagggagttattagaagtgctctcccatgccgtggtgctagctagaggtagatctctctttatcacacctacctagcttagctgccttttatgtcttctctgccctgtcattttactgtcaataatcgaaatcgaaaccaatcacactcgcgaccgaccgacgccctagcctagccacttgacgctgtttccaaaaagaacggatgaactttttgatagatcatatcgatcgatcattaattggtccatcttttacgatctccattgattgattgat

SEQ ID NO: 34023 - DNA, 576 bp, Oryza sativa
taaccattccgtgagcgtcacatggcagacaggtgggccccgtgggagttagccccaaccaccgtccactctgctgcctttttcgcggtaaaaaaaagcgagtaaaacgaaaggggaaattcacctgccccattgtgaatagtcccgtcgtccccttcctcctcttcctcctccctctctcctttttcttcttcttcttctttcgaggagaggaaggaggcagccgcgcgcgcgcggaggcgggcaacctctcctcgactcctctcccccaccgtttcgtcgtccccgcgtgagaggtaaacgagctcctcatcgatcgatttctctctctctctcgccgcgaattcgcttggtagccatgcacgcgcgcatggagggaaaccttttctcttttgttgttgtcgtcgtcgttggtgcatgtagcttcgccgtcgttagtacgtgacaacctccggcgacggatggatggatcggtggcggcgaggcggccgcgcgccggccggcattttgctatttttttttcatcatgatgacatgagcgcgactgcgtacgtgcttggtggcgcaagaagggga

SEQ ID NO: 34024 - DNA, 512 bp, Oryza sativa
tcagtagataacaccgagcaattgcagtcatgcttaagaaaagctacaatcaaaacaacgaacaaaacattgcatacctccatgttgaaactacatccaatcactgggttacatcttaacattacaaggaatataagaggctaatcgctgatgtgctatgcagctcacttcatttcttgcttatttatttatttatttatttattttagacaaaagaagcttatatcaacctgacaataataatagctacgactagcaacattaaaaatatctcatgtcttatgttgccaatgtaaagtacaggggaggtggagtgttagaacgaaccaaagtagtccagatgttgaagcttgagtagaggagtgccatggccaaaggcggctgtgccaacaatggcatcataggtccagcttgttggggctgcaataccatgtcaataaggtggaaggcctgcgcacaaaggcagcagctccatcgcagctctggcatgtgggtacggcatcacagcgaca

SEQ ID NO: 34025 - DNA, 710 bp, Oryza sativa
attcctgcagcccccttttcacaggctcaacactagcagcagccgccatcgccgctaagccgccatgtcgcctcgctgctgcgtcgtttgcgtcatgccgtcttgtatcctcgtcgatcctcgcccaggcgttgccctgcagcgactcgacggcagctgttaccgtcccatccatcgtcgccacaagcaagtgtcggcggcctgcctccgcctccccaagccgacaccatcccagccacaaccgctcccaatcggtgttgcatcgtcgtcgtcctagctggcaccggccgctagccccgccatcgccgcccctagccagcactacattgttgttgtcgtccctagccagcgtcggcggccagccccaaccgtcgctccgtcgtcaccgccaacatctatccctgcccgggtgcttcgagtctccgctcacccggcgggtccccagcggggctggggaagggtggggttttccaccgtctagcaatgcggggctggggcgggggataaatgcagagagcgggggccgatcaatcacctgttgctagctcctgctcaaaatacggagtgcaccaccggcagattggccgcagcaacacgaatgccacgggaagaagtattgacgaggtaggccgaaacaagtggttaggatttcaattccaaaagaaataagtttattttccctccctccctcccaaaaagaaataaaatcg

SEQ ID NO: 34026 - DNA, 897 bp, Oryza sativa
agcccattccactacctaaccatctctttaaggttggcgaattccctcctcctaccccgatcttaatatgggatcctaacttaagtcgccactatctcgctggctttcaaggagaaagagtgacaaggatctaatggtgaaggattcatcagatattcaactcaaatttgtgtcaaatgaaggttagcaattctgctaaatatcccatattataaacaagcgtttctcaaaagaaaattgaaaaataagtacaataataggcaaatggatctaatattcttttttcattggaatggatctaatattataatcttgaccccgcaaaaaaaattctaatcttgagaaactcaaaatgtttttgaacactgatgaaatttgaaacgaggtgccagtgtgccacaaaacatgtatattgccgcgatatgcgccatgcggccatgccgccatgtgctcctcccctgatgcatgggttcccagatgacagtcgaccagtcgcccagccaggagcagccttcctccaggcctcgtctcgtccttccacaccacgtccaggtcatttccgcctccttttttaatagaggaagagcggaagacatggcgaagcacgtcgctggaaggacatgatctacgcacacaagccattatagctcggggaagagactcacagagaggaagtgctcccggtgcttccctgctcgtttggctgctcgccggccgcgtccgccatggggaattgcttcggctccgatgacggcgaggtggaggccgtcaaggtgatggcccgtcatgcgctgccacaaggtacatatatgaatatcgacatcccgatgctctgcttacaatatcactacgttttctttgtattcgtgagatttattttgttcatcgggatctgga

SEQ ID NO: 34027 - DNA, 1835 bp, Oryza sativa
aaaaattataatggcatggttccaaattacccctttctaaatggctcatgtacagtaggcgaccaaaaccatatatgttgttgcacacacatataatgtacattccattatagctatgctattgatttaccttttccatacattaaactggggagtatatgacaaatatgtatattagataaacactaattataaatttcgacctcctgtaattgatcattacgggaccacaattacaaataatctgtacctataacctcacagatctaacatatagagcatggataattattaagccttttataatttataatgacaagtaaaatatgatcataattaaaataatgcctcattggaaaaaatgataatataaattaatcgatgtaattatttgtttgaccctaaatccatccaacaacagaacccttagtataagaccatttatagatgtatgcgtagtcgtataaccctcccataaccttgtagcttgactaaaccacatattagcaaaatgtgtatatcatatattgtgctagttagtaccaatagagccatcatgacaatataaaagactaagaatcttggcccttagcatgattagaatccattagcaagccggaatagtatgagcaaccctaggttcgacaccatcattatattttgcttgtgcacatttgattgttgtttgaatattggtttttctcgcgtattatagaatttgtatatcggttagtcgtgaggcagcgtatgcagcttccaggaggtgaagattgatcaagattatatcaagaataagaactatcctgagcaggcaagtcatcaccccattccttgagcatgttgatcccaattgtgaaattgttttgtttacaaataaaattgcatgcagtgatgaatatcctacttgttattatgccatgcctttgattattgcttatctcattattcccttgtacccataattacgtatgagtccctagtcacttatgacgaatgcttagtaatgctaatttagattcatgcattctcatatttatcaaatgctttatgcttgggcaactaccttgggaaaggtagttgagatacggcatgtggagacatgagcgccatattgccatgacattgatgagatgatttgtgaaagaaagttaaaaactaaacaaatgttttcgactagggcggctggaggatttgggtggtgtccggtaaaggctagtgccgtccctggtcaattaaggaccgagccatgaagctaagcatgaaacgactccagtacaaccgtacttctcgtatgggtatagacttagcagagtaaatagccgagcggaggcagtatccctgcatagtggttttcttgatgtgtgtgaggcaaggcctatggtggggcagccattggtaggaccacgaggggcgagtgcctacagtggtgtcaccatcggtaggactgccatgtgtaaacctaaacttaactataacttaatgcatgtgtgagtcttcccttcccgggagagccagaactcctctcactgctagaaaccttggacgcctagagtgcatgaggactaaagttcatggagcgggtactgccaaagtggggttattgaaaggctttgccgtggcaagtctcattcgttgggacgtaggctcatgtgttgggcaagtcgcggagtacgggtaaagtgtacatccactgtagtgtgagtaaaccaaatctattcgaatagtcgtgctcgtggttattgagcaccgggacatatattacacttggctagactctaatttcttaatctgattgggtggaatgttgcatgatgattttgtactggtagatcaac

SEQ ID NO: 34028 - DNA, 711 bp, Oryza sativa
attcctgcagccccgataccgtcgttgatgtcacccctatattatttttattttcggttgtatgagatcgactgtatatttctataaaaataaattacatcctaaatatttttaaaaataaaattgaatgaacagtatttttcaaatttaattcgctgctgctccacttccgcacggggcgcaggcacacaggctttgggaagcgatgcttgcaaagagtggcagtgtccggctgttggcaggcgggcgcggctgaatggaccgatcactcgagacttggcgcttgtcgcacataaatggctgacccgcttgcatgtactagccttgatccgggccaccacgcactcattgcatgtccgaattggtaccaaaatctacggcacacatgacaaatctacagcagacacgatctgacgtacggtccaacatcgaggtcatgcgatcgcctttttaagcgttgggactgtttgggatggagattgggagataatgccaaaatacgataatgtgagcagcgcacgtatttgaaaaattcaaatacattttttgctggcaaatgccttataaaagaaaataaagatttaatcgtacgcgaaacatcaacatcgataataaaattaatatttgtaactattatatatatatatatatattttccaatgtgatagcatcttaagatttcaggtatgatgaatacaatacacacacatt

SEQ ID NO: 34029 - DNA, 656 bp, Oryza sativa
taaaattgatattgtacagtagagtagatgtcaaatagatatatttaacatgttttgtcactgtagcaaccacataaactaagtataagtgatgtctcaaatgaatggatgtataggaaaatactagtacttatttaatattcgatggccatataattaaacccatgacttataggttagttaaatcaagtttagcctcatattttgtaactaaaatattaatactcatagataaatctttaacttgtttatgagaataataacatagctagatgtggaggaatcaccaaataatttaatcaatgcaataccatatagaatagcacgtatatacctaaactggttaccacttattagtaacccaacaaatccagtgcttaaacttgcccatcacatatataatatcactcatagaaactagctaatgtataatttaactataatatattcaggaatcacttggagcattgggtagtacaccttctaaagtgaaaattagaaccatgccattataattttcactttagaaggtgtactacccaatgctccaagtgattcctgaatatattatagttaaattatacattagctagtttctatgagtgatattatatatgtgatgggcaagtttaagccctggatttgttgggttacta

SEQ ID NO: 34030 - DNA, 899 bp, Oryza sativa
agattttatgcccaaacaaggcaaccgggcggagcgtgagaggtggagagcgtatagtggcgcagcatcgagtggtagtagaagcaggctagcagcagcgatccatgcatgccgcgtcccaggacgcgcagccccacagttctgcatgcgccatgatgccgttctctatccctccatcgctcgcttgtccggcctcctccttttgatctcatcatcggcaactatagttacattgctgctcctacctagctagagtaggaggggagaagagatatcctgggcatgcatgcattgttggcttggctaggtgcttgtggaccttttccaagctgaaaaagctaaaagggttctctacttctctagcttggggattttgggatgttcttggcaggctttgcgggagaactgctggtagtgttgacatgccatggcaagggcgaaagcgatggcttgattcactgagcgccgtgtattgcatggattgtctgggcctagctaggttgcaacttttctagtagctggacagtggatttattgatcatctctctctctctctctctctctctctctctctctctctcttcttttttttttggcaagacaccaaggcaaagagatttatgctagctagctcatcacaataccaatgatcgagcacccacactcagggtatgtcttttttttagacggaggaagtatttactgtcataccgcagaaagaaattgtgggttccggccggtcatcatgcgtaattcaagtactccatattcaacacagcaagaggaacttgtagtcttgtagacagctttgtcagctgttgcagcagacgacacggataatgaagagggagacgggtatctaggggaagagacgaccaaaactgacgggctgcaggaat

SEQ ID NO: 34031 - DNA, 680 bp, Oryza sativa
tattgacatgctttgttctgtatcagctgctaggaagagcagtctggtggcacataactatttgggacatttaagaaaattttggtcaaactattaaaactttgccatcagttttatgttggactatgttttaacagtatattttccaagggaaatctatgcatactatttattttgtttttatgaacattggagagaagttatcgatgcttaaagttttaacagttttgttccaatcttttcttagacggtaaatatttatgtccagaagttgattatttcgttaattgtgtgctgtgatcccattgtctaattgtgtacgatcagatcccattgttcaacaggtttgtgattttgtctgaagttgacgtcatcatttatttccattatatgattacgtttatcaagtactcctgtggcgtgtagttttgctgaacctggacagcaaatttattttacctggccctcgttctgcaattgattctcaacagccacatttcatggtgtactttctctaattgaatcataacacctggcagtcactctcacgctagctgtgtttgtgacggcccgctgttactgtttgctccggcttgataataatcgtcactcgtcgttttggacacggtctcaaaaaaaaacaattctgattattattttttattataatatgtataaaa

SEQ ID NO: 34032 - DNA, 728 bp, Oryza sativa
catgtcaatagggtcggttcaccttggtaaagttagtagtcatccttaagaaaaacataataaaggagtgtaacataatgcaaaactcgcaatatatggtgatcaaacaatacgaacgatactgcacactagagtactatattttgaagccagtctgaacaaaactggaccacttagaattatcaataatcaggttactgaaactgtctagctaagaaagtggacaaaaaacagaaaaaaaaagagagataactgctcaatcgtcatttagaaacaattacaagtttaagtgtgctaatcaattcaataacagaagcatagaacaccacttggtgtcatatatctagaaccttttatgcactatttttttaattcatggatgcaggtgcatgaagaacacaggcatattttttgtacataatgaaaagcattaagaaattaaattacaccccatcatctgcatatatcagatgcacacagcccaacaaagaaaaaactcacatgaacatatcatgctatccagtagcaactggtcatgaataaccgaataacacaaaattcttagacagtactctaaaacaaaatgatgtaaatgatcctacaaaaaaatacaagtaaatactgcagtcttctccatgtctattttgatcgagaacattgctatgaactttgcataacatcattcggttatcatacagcaagtttgaatcacttgtaggggctgcagg

SEQ ID NO: 34033 - DNA, 1475 bp, Oryza sativa
caagccatcatacatgggtagagtgaaattgcttaattgtgtgcataactaagccacaagatctgtttgcagtgcgcttgtgtataggcaattaggtcttccatcgcttgcgctatagcttatcagccgcaagcatgcaaccaaaatatttagatctcctttggattaataaaagaattaatagaaaaaaataaagaacctcaatacactgaaaaaaacactaaaaaaacacttacgataactttgaaatgatataattgctgccaaggaatttcatttatagcaaagcttcgttcataggaggatttttagggtgaaatactttgattttaaatgatataattgctgcaaagggcccctttgaatcgcaggattgagaaaacgcaggaatatgaaaaacacagcattttgatataaatgtaagtgtaaaacaaaggattgcaaaacacgagaaaaacacatgaatggttgtttgattggaccgtacgaaaaacataggaactagaggagagataaaagactcaaagaaaagttttcatgaggtagaatctatcttatgttataattccttcaaaacttgtatggcattatgcaatccataggatttcataggatttaaattcaaatagctatataggaaaaattcctatagaaataaaatcctctaaaatttttatgaatttccattgaaacgaaagagccttaaatgacatcatttaaaaattcctatgtatcccatatggttgcatttaattttgaacgaatcttgatgttgtccctcgaataatactccctccgtcccacaatataatagattttgagtttttacttgtaacgtttcaccactcgtcttattcaaaatttttttgcaaatataaaaaacgaaaagttatgcttaaaataatattgataataaagtactcccttagtcccaaaaaaaaaagcaaactgtgggttcccgtgccaacgtttgactgtccgtcttatatgaaattattttataattattattttcgttgttgttagatgataaaacatgattaatactttatacgtgacttatctttttaattttttaatatttttttaaataagacggacggtcaaacgttggacaccgaaatcagggtttgtcttttttttgggacgaagggagtaagtcagaaataaaataaataataatttcaaaaaaaatttgaataagacaagtggtcaaacgttgtagtcaaaaactcaaaatctcttatattataggactgcatgacatgatgtgacggccaatctaaaaattaatcttgatagacaaaacctactgctatttccgaactaataataattgtcgttttagacaaagggcctgtttggcacagctcgagctcgagctccacacctcctgtagttggaactcagtcaaacagtttcagctccaccaaaactagaagtggagttgggtggagctctctcacaaaatgaac

SEQ ID NO: 34034 - DNA, 2316 bp, Oryza sativa
tgagatgtacatgttttatagagagcatcttgctttactattgtgggtgctctaatacttagttttattattaaacttgctccgttggaagatagccttaaaagaattttgcatcccaatgcagccaagtattaagagataagggacgcaactatctaaacagtaggcggtcgccgtaggtgccgcatttgccgtaggaaggcgacgtcatcacctgaccttcaaataacactgtttactacccatgctcccagctcgaaatagctgcgcattcctccagagtccatacaaatatggaatatggccttggcgagcacggacaagtaaaatatacaagcagctggtgtaataaacaagctgtgacacactgtggaagcagcctgtggacaaccaaggtacagccgtcgactgcactgttcctaggaaacgagaaggcaacggctttgcgctggagagagtcaccgtagtccgcggccaggggaacagggggcacgcatcctgtcgggcacccagccaaccagcgctccttctgcacgctcgcgtggtcgtattccagcgccaccaccgcgtggcagcttggcagcttccttccgcctaaaataagcgccacggggactcccgggcttggacctccagaaggtcgcgagatctcgaatccgcacggtcgcggccctcgctccgcgcgaaagcgcgtcgaagcagaccgcgactgcaagcgatcgaactcgataccgtacatggccacgtccggggatccaggaacttcgggttcgcaaacgcaaagcgtggaaactggaaacccaaaggatttgccatacggaacggaatccgatccagccgagcgcacgggcgcgctcgttcgccgtgccgagccgtgcgccgcgcggctagtagccgtggcttctcgttctccgcgcgcgtccgtggcaagcaagtcccacggaatcgggggcgagttgcaaggcttgcagctgtcgagccgtggagcgtacgtgcgttcatcaaagttggacaaggcccttttgcttgccaagtttcgagtcatcaccagttaagcatgccccaggtggccaggtatggaatggatcaaatgaggtagaaatagcaggagctgggatacgaacacatgcgtgtgatctggccatgacaactactcccttcaatagcatctcccaaatactcctttgatcacaaattttttgtaaattttatagaatgtattaaaatgcaatatgacgaaagttgtcaatgaaacaagtctgagtggtaggaccagcaccgcccatttcgaccataattgacggcacctctaagctgaagtcatgattctaaggatagaggggatgacatagtagtagggtagtagttgtagtacatacgcatgctacatgcaatgctggggtttttttcttaggttgtgttgagttcacactgaagtttgaaagtttggttgaaattgatacgatgtgatagaaaagttgtgtgtattaaaggttcgatgtgatgaaaagttgaaagtttagaaaaaaaaactttgtaactaaactgggccttagtcaggcttctcaccgtctaacgctgatcaattcaacgatatatgatttttcggatcctttttcgttgcaaccaacaaaccaaggacatgtttactttgatgccaaaaaaaccttactaaattttagcatttggcaggatttcttatatagttaccaaaatttggcaagaaactaaatgtagccacttttttttgtaactttaccaaaatttgataaggttgaaaatgatatcaaagtgaacaggcgtcaataattgtggatgtcagatcaagcagctctatacgtcccgattgcatttcgaagccaaggagataaaaccagtagtcctctacctgcctgacactggcacacaggttaggtggtcgtgtgatcgattagagaagcaaacgaagatatgccgatcctaagtcaaaagattcctcaaaccaaaacttgctctggaccgatcacaatagctctgatgtcatgcccaatctacctcgagagcgaccacatgaggaatgaactctcaacgctcccttttgcacacgtggttttatctcatagaacgccatcccctgcatgtcaaaaggatagtatgtgctgcaacggctgcaccgtggaaaaatggagtgcggagtcgaaacttctctcaccgacgcaacaacacacactttgcaacccgtcgaaaaacggccacgccacaaacaaccgcaacacaccatagccccatcggaatcacccgatcggcgtgattggcggaagcatcgatcgatcgacc

SEQ ID NO: 34035 - DNA, 1227 bp, Oryza sativa
ttatccttttccttttttatgtataggtgagattccatgtgtgctccctcctggtacctagtaccatgttcagaggcatgatacctatccgattcctccttggtatcatgcgcgcacagcataggctggtacctgatacttggtacccgatacccggtacctgcaggtacctggtaccagtatggtaccagttgcatggtgtgtggtacctgtggtacctggtaactggtacctgtggtacctggtacctatggaattgaaaggattcaaaaggatgggacgggggaattgataccacccatacaagccggagaaaaaatcagcaaggaaaccatcaagcaaaaaaaaaaagaaaaacacacatgaggaagggatgcaagcgacgatgaagcattgccggtgtgcggggggagggggtggaggaatcagtcagagtggaatggagtgcgaggggtacctgcaaggtatcgaaaaaatggatgcgagcagcggcgcagcaccgccggcgtggagaggaggatagacggaggggaacagccgcggtgcagcactgtcgcatgggggtggagggacagaggagatcgcggtcctcgtcggcgcgagagccgtgccgcgccacgcgttcctgaggcagcgggagcagctccacgtggcgctgccttccccggcgccggcgaaggagagcgggccgagcgccttccacgcctgacgcgccaccccgcacagctagccgccatcgtcgtctctgtgctcatgagggtgggagagagagagagagaagaagaagaagaagaagaagaagaagaagaagaagaagaaggggataagatggaagaagaggataagatgctagtggtcgtagttatcccatgtgtacgggataccgttgactagtttttctgttttttttactagtaccatgcccatgcattgcaacgggatttgaagatagaatgacaaatggtttttacatggttcagtttttttccaatcgggtttttttggtgggtcaattttcccgtgataatttttcaggtggttggttttttttaggcacggtgggttcttacctggggagtgcaatggttagggaggagaatgattccacttgtaaatagtagagatatccattactcccttcgtactcgtaaaggaagtcgtttaggacaatgtttaagtcaaaccttgagaacataaatcatgaataactctcaagttgttgagttt

SEQ ID NO: 34036 - DNA, 718 bp, Oryza sativa
caatggcattttatggattatctctatttgtaatatgtgatacattggcatatgaagcttggtgataaacgaataaaaatcagatatgaaaagaagctagatcatgttagacatatagagtaccaaaagccaatcaccacaagagatagacatccttgcgattggtaaagatcatcgagtgttgtaatatataccaacaaattttcgatgtcatctatgacagtggcaaaccaaatttcatttgaccactggaatttcctccttagatgattgaggaagtgccttcaagcataaatattccaagaaaatccaccggatcaacctagatatgtctagtagatccattggaaaaaaaataaagggaacgaggaagaggcagacacaatgtagtggtgtaggctttgggtgagagatgtattagttagtggttagtgataaagtgagatctaatgatgcatgaggtaactaataggaagacaaaaggcattgatctaacggttgatttgcatagacgcgagatgatctaatggtctagatgatgtggcctcacggttgatctaatgtatcaactatacaggaagaaaggattagaaatgatagagtatatataatagtactagcattaacagtgagtgttactgtatgtttcaatacaagctagctgtatataagggcgtaacgctcattcaggctccctctgagagagagcgcgtgctta

SEQ ID NO: 34037 - DNA, 669 bp, Oryza sativa
attttctcagccaaaagctgcaatctaccaccaaaactagtagaaactatcaaaccatttctacaattggcattgaatctgactagccccaaatctaaacaactccattctaagagacatttcgtcgaacaacctacatgcgcaagtcagactcgactaactcgtaagctacacgtgctatagtaaacttcctaacagcgcctcaccgaatggatacaactacgggagtgtagcttgcgagttttgagtaaaaaacttcccctcaccttgagatggctcggaagctcggagggagctcggaggcttagcagcgccagggaggatttcacagccttccaagaggagggaggagaataactctgcgatggtctccgccgattcccctccccctctgccttctcgcgagtggaggagactacggcgctgcagctggttggagttcgaggcccatctccatctccgccgccacctgtttcgagcgtgccgccccgcggcgagcccggcggcactcgggcaccgaaaggagaaaaggggagaggaagcggggtcgcgaacttgggcgtgggctgctctgtttttttttattcccagcgcgtatgcaccgttcgattcaaagcgaacggtccaaacaagtccaaagcaaggacgggccgacggagcagggcatct

SEQ ID NO: 34038 - DNA, 640 bp, Oryza sativa
tccagtatagagaggttaaagtcttaaaccatgaccaactagggttactatgtttcatatatatgctcattggctcccgctaatccaaccccaattcgactgtttttatcgattaggaacgttacgttacgttggttatcattatgtacgtacaggactgcagaaaaggccaaaaaggttatcttctcgtggctgaaggctattaactcgctagtttactagcagcagctggcatagtacgtcccggctacaacgccagcaatcccaatcatacacgcatgctcctccccatcaaactttacgtacgtacacgaggtatagtacgtacaagaaaaaggcaagaatattatactaatcgcgtagaactattacaccaatcagccaaaaagaagcacgggaggtggcactccagtagtcgtactcgtactgactggtggtaacgccatgagctgagaaaaggctactccattccagcaatgaatggacgacggaaagtggttttttgatcgtcttctcgcctccatggcaggcatacgcatccatcatttccaaggcagctggatgcggagcgggaagcccatcacgtctcgcattgatcctaaccacgccggccggcccgtcgcaacggaacgcgggcgcc

SEQ ID NO: 34039 - DNA, 1092 bp, Oryza sativa
cctgcagcccctccccccaaaaaaaaagaaaggaaaagaaaagaaaacaaatgccaaaacgtcaccaggattacaagttgtgattttaaaatttaaaattgattcattataacgctgtctgtccgtataatacaacaaaattggcactagtttgcatgtagttttgctctgcatcagctcccaccacgtgaaactgtgaataactggggcatgcatgaactgagatttttctttttgcttccacttacacacaactctgcattacaatatctgaattcagaagaacaaagtgcatttgtaatctctcacagatgcatgttcaccgaagtatattgtccccgaagcacacactcttgtgactcactctctttagttaatttcaattgccattctctcgcttcggaatccgtgcagagaaatatggcaagtgtagaaagaaattgccagtgaacaggtaaaagccatggtcccagacagatcagagttgtaagtgacttatctacacatacgtgcatcacttcctttttgcatagcctatagccttgttttgagaattagacaagagttattttaagagctattttttagcataaggaaatagccctctaataaaatagtcctaaattgtttggattcaagggttattttgagagctatttagcctttaatgcaccttcccatgaagagagatagaaagaaaagacattttttcagtgggccccacccgaaatagccccaattagcactccttgggtggaatagtttttttatgtgttatttccaaatagctctcaactagctcactcttttgaatctttttgagctatttgggctatttgagggagggctaaaaagtattacttggatccaaatagggcatataagggcctgtttacttcgtgaaatgaaaatttttggatgtcacatcggatgtttgaccggatgtcagaaggggtttttggacacgaatgaaaaaactaattttataacttgcttagaaaccgcgagacgaatcttttgaacctaattaatccaccattagcatatgtgggttactgtagcacttatggctaatcatggactaattagact

SEQ ID NO: 34040 - DNA, 5173 bp, Oryza sativa
cgccgatgccactgcctcccttgcctgccgcggggcgtcagacgaaggcgcgcgatgccagctagtgcgcgcgccggtagcgatcatcgccgatccagtgaaccgtttctattcaagcctttttttttcaaaaaaataaaggtatgaattaccccctcctagcgaactcttacggtcaaccgaattatctcctctgaacctaaaaaatataaaaaaacagacatattcaccttgaacatttaataccggacaaattaccccctcaacttaatatagagcggttttgttttacgtgtcatacgtgtagaatttcagtcaacattttctgattcggggttaatccgtgtggatttgaccataggcgtatctgattttcctttgaattgaatttctctatttttctatccaaaattccatgatccaaaggagtctgaaaaggtttcagggctctggttgcattttaaagaaattttcaggattttggtgttgttcatgtgtatttggaacacaggaagagataaaattaaaaacacaggaattttagctacaccgatcatttcacgggataaaacgtgggaaaagaaacacatccggtcaaaacctctttctttttttttttttgaaaagagagaatatattaatgactgaaattggggttacattctaggttgagtagttcagtgagttctgcaggagaacttaacaaccattcaccgcagattcctgaacttactactaatctaggtagcttatgcgctactccgtttgattctctctttatcttgtgcacctgcacctgttgtagacactccatccatcttagtgcctccctgatcgtcccagcccactccgatctcaactgagtattgtttgctagtattacaacatactccctctaaaataagttaatctaatattagatgtgatataacatatatataacactctctctgttttatattataacttgtttaatttttttaagttaaatttatttaagtttgaccaagtttttaaaaaatataataacatttccactacaaaataaatgttgtatcaaaatatattgaatattaaaatttaatgaaattaatttgatattgtagatgttactaatatcttctataaacttagtcaaacctaaataattttgactaaatataagctaaataacctacttcctccgtcccaaaatatagtaatttttaactatgaatctggacacgaatcccaaaatatagctaaaaattgttatattttaggacggagcagcataatatgaaacgtcggtaatcaacaactaaaaacatgatttaatagaagtagataggacagttctcacttatacattgtcgtgctattttttatagtcctaacatcacgtcaaccacgtcaaatgagtgatgtgcagggtttacagtaccaacggtagccggttgattaccacgaaaactattggctaagtaggatcgagagcataaaataggcagttttctgattaagtttaaataaattcaaattgaattttaattcgactatgagttttcacttctatcattgattttctttttgttgctatgaagttaccgtttcagcttttagccacgcgaatcatcgatattgctttgtcgtaggttttcatgaaaaccgagaattcttgtctcgacatcggtttggtgaacctttggtgatgagatcgttggctcaccatatttgcaagggggaaattgctgcatgccgcacggccaccgtgacatcatttgattaagagatccactttaatttggtgcggtacagtacatggtgcaatgagaggattggagtgggtgatgctcactcatgagcctggtgagtggtaactgacggcctgacggggcgccagtaactgggtgaggggatggaatggtccgaagcctacccattgctacgtgactcgtctgaagctctgaccacgggtcggtgactcggtgtaacttctgattacagattcccgaagcctacccattgctacctccctccaaaaagtataagcatttttaacactaatataggagtagatattaaaaatatatattaaaatgattggataaaagttataataattaagaaaagaaaatatataaatagttaaattcaattcaattggctgtgattggttgagagtaatttggatgtttggttgatgcctaaccttaccgtaactagttgtgtcatgatggcataagtgcaacttaaaaatagttagtcacaagtgtgatatacttagcttcaactttaagagaatgacataaggctaaaaaagtatggcataacatagttgcgataacgaaacaaatacatatataagaagctattgcataactaaaatatgacatggtaaagtacggtaaccaaccaaatacccttagatcagtggaaaaatagtttcattttaacatatgctattttattagaaatatcttcatcttgtcaacataggcgtgttcataaatggagaaacaatatccaaccttcatgcaacaaatcggcggcctatgatgggaacatggttcttggggcctgatccaaaaattgttggaaaggactatgattgcctttgttcgggagctgaagaatgtgtggcccatacccgtgaaatctctacatagtggcatagtgcggcataagtccagttaacatcccctatcttttcatctttactcctcaatttataataccgggttaaattaggtcctccgacaatatcgatggctggttttagtgaggtgggaagttgacccggtccacctgggctaactaggcgttcacgtgacaaaaacaaagtggctcccacatgtcatactcttctctctacccctctttttctcttgagatgtgccgcaacgccccaccgacgcatggggagccgctctagtccacgtgcctggatccccaacaagatgtcgccgaggacatggcggagtccattattggcttgagcacccacaattaggcgctccgctcagccagcccgtgctgcaggcacacatcggagaagggacaataccgcgttgcggcctctaccatccgcccgatggtgccatcggttgcaaccactccacccaccgcgtcgaaggcaccccgtagggagtagagtgtcgggtgtaacgacacatggccgcaaaggtggcgggagacgctgacactactgagatgcaaatggattgctgcaccacaccattagggagtgcgtccatgccgttgtcaccaccacgctcatgcacctcagaggcgtggctaaggggaggccgtgaggcattaggaggagagtactgctagctacggccgtgcagagcaataggagcacagggtgtggtggaggaggcgtgatggggttgtggcgaccaccgctgtagccatggcggcgaggagaggtgggggcgtgttgatgtaaaaatacgaggcctgtgagatctacttaactcgattaccaaatttggtcgttaacagggtgtctcggggacggccaggaacacggcagcagacaccgacgacggcacccttaatggcggtgagctcgacaatgccacggcatccgtgcctaaaaccatcaagccactaactcggtgatggcggagaatagaggggtggcagctaggtcgcatcctcatatctcccctacacattccttaagatcagtgcacagctcagtcactaccaagtaccagcggtgtcaacaaactcgtcgtaggcggcaacacatgttgaggctctttgtcggcctcgcccaaaggatgtggatgagagcgacacgagggagtgggctgtcgccgccgtcagaaagggaaggagctcgggaggaggcggccacagcttttagcggtcatggaggggtagatgttagtagggcgatgaggccgttaacaccgacgagaacctcgttgttcccacccacctcattgtggccaccgaggggaataacggggaacatatgagagagtggatagaggacgatgttaatgacatgtgggccctatatgctacgtaggtgcaacatcggctaaaagaaactcctatactgctttaggatttcttctacatcggtattgtaaattaggggttaagatttgtcttgtagtttagaactcgatggtaagatgagggatgtaaagtgacttactccgccccatagtgctgataggaattttcccaaaatatgcatttcttctttctcgtgtagaactgaacattactgtatattgatgacccaataaggaaatactccaaatataacgatacaatactcgatcatcttaaaatataacacacaattagacacacacaatcatttgaatatattattacattttaggacgaataaagtatataactaagcttgtattaggggtaccataatggtaacagtacagtaatcacaattcaagcatatttttttaaaaaataatttttaattattttttttaaaaaaggctatttttgagttgccacgcgcattaaccaaaattattgtcgatgtaagagcaagaataatagtgatagccccatcgtttggcctaaacaaccaaagaataagccaaaatttgaatttttgaagttgattttaaaatgcttttaacgtaatttttgttaatgttggcttttaagtcgctacgaacaaatctacaaaagttttacttataaattaattttaattttctaataagccaaataagccaatttggaccaaatgggcaactgatgagagcctaagtatgtatgaaggagagagaaatatattaaatgcttcaagataaataatgctctctacccttcatgataaatacatgaaatacataagtatgagaaagatataggagaaaaaaaaaaccaagtttatagctactaatattggtgtactaactttcacatgaactaatacaatgagctctatccaacagcaaacaacggacttcaacaaaggcggcaataaaccaatcggtgaagcagtgaccctgcccacagaaaggctcccgttttccatccatgggatcggtcacccaaaacccaccggatgacgacgcggccgcctcccctaccccgcgccacgccaatccatcccacccccaccgtgcccatcccaaccgaaaatattcccagcatattcccccgagatcccgcatcccccctcccggcc

SEQ ID NO: 34041 - DNA, 1114 bp, Oryza sativa
cctgcagccccaagctactcgcgggaaagttaaataggatgatgggaagaataactcacaacgtatttacgcttgcgccttgcgtggtccgtgttttcacgctgatcagtagtatatgtttgcattggtttgctagtcaggccgtctcggaccaactgccgtccggtgattatttctcgttggtttggtcgtaacaaaaggtcacggctttgtctaaaagaatccgaaaagtgtttttatttctcgagagatatttagtttaactttttttacaacttatatatgttgaattttgccttttgtggattggtatatttcatattaatctatattttcatatattgtttttaaaaaattttctataactatttagatgacataaaaaaagaggggacatcttctggaaggatgaaaatccatctacaaaagaacttgatgttggatgggtcaatcaaagcatgcttttggttaagggacgggattgggttgggtcgaacctatttatttatcagggtatttggtttaaaaataagtaagatggaattgtacccatctaagattcggattggccttatccctaaaaagttgacataccaatccaactcacttttcttccttgctggcatatgagctgcaatataaaacataggatcatcaactctctcgtgccttacggatagacggtatcaccccaccctaaaaacagtgatgaatttgatccaacccaccccacccacaaaccaaacatatgtaaatgaacttgagtaataaactttgttttttatcaggtggctcaatggaccaatatgtcaggattaattattccaccaaggatttctttattaagacccaaatttctccaaataatagatgattaccccgccgtgttgctgcgggaaattaagttgtatagtatgtacaaataagctatattatattttgtaaaagaaaataaaatgacttcctatgttttatataatttacacatgattgcaaatataatgcaaggtgaacatattttatataattgatacatatgaattttgaagaaaaaaacgattgaaattgtatggttttatgatagaagaaagaagagactattttagggctgcag

SEQ ID NO: 34042 - DNA, 1619 bp, Oryza sativa
cactatgcataaatctaaaatgcaagggatgatagttgttgaaatggcatgttcgacaaaagagctatgggacagaagacaagtgctaatgatagttgaaaaggtgaatgcaaggtttgaagaaataggatggtgttagtgcaagcaacacccatcgcacacttgcacgttcaattatacttgaaaaaagctacggtctagaaaaccttttagaattagtgtagctaacaacttaacgtgagttaactttcaccataattattatttaaaattgtaggtttaggtatatgaaaatgatatcggcaggtttgctataacaaaagatttcataaaattattagtacaaactattttaatatctttataaaaggatgaagttagaaccacggggctgtttatttgtgctacttgtggctgtgttacagctaccacaacaatatccacaatgaaaaataaactacgattatatagttgttgtggctgtgatgttgtaattagcacaatgatcagagcctatacctttattgtttttaaaagcctaaaataatatttctagactagtaattcgagttttcattaatagagtaccattaattaaccggtctcaatttatgaactaggaagcttgcgctcctgctcatgcgaaaaggaaaaaagaacgagggaaactgtgcgaaggcaaccgttcccacgggtaggatcacggccattgcacgttgttcatcccttagctggaatgttgcaagttgcaacacgaacacaactagaataaaacacaagtactctctctataaaaaaaacgttaacctaaaataaaatgagatatagtctagtgcaataataaatttagataaaaatgatgatattagattatgtcttattttagattggatttttttatgaacggagtacgccgctagccgcgaaccctgttcaccgcccgacgagcgacgattaccggtttccaacggacagccggccctcgctgtcttagtgtcgtcaaccctcaggcaacccactccgtcctccgtgttttggcgcctgcctgtgccgcactgcagcctacagcggcgcatgcagcgtgcgtctcgcactagaggagaggcttgctgtcgtctgatcggtttgatccgctgacgaggccggtcaagcccgtaccatccagcggtaagacggaccatcaagacgggcgggaggccgtcaatgccaccaccaaaccgaaccacaccccctgtgcaccgcaaccgcaaaccccctgctcctctgcatcgccaggcgccaccccattccgctcccttccaaaaggaaacggacaaaaccagtaaaaccacccgagtgtgtgcagcgtgagaggctacactagagctatagtgtgtgcgagaagggggagaaaaaagaacatggcctcgtgttgcctcctcgcctgtcccctccattccccgtcacattccccacactcgcgggcttgggtgcggggatagcgaactccggaactatagccatcggtcatccttgtatttttctcccctctcgctacaaaacagccgcggccctgccatatcaagcccagaaaaagaagcgtcgttgcgcgagtgcaaacaaatcaaccgggacggggc

SEQ ID NO: 34043 - DNA, 1340 bp, Oryza sativa
attcctgcagcccgaggagggtactgttcactttgtttcccaaacacataggtgtacattgtacagtgaagaagagtggccttcttcctcctgtcactctctactgtagtgggagccatgctgagctgcttttcacataaccatgcccaaattataatctgtctacagtagtacaaccaaatcatggagtcttggttgtggccccaaatcaccaaagcagaatatacggtcaacttttttgtaactttttttctcccatcttagatggttgccaagtaaagttgaagagatacaataacgaagggaaacagtaaggatagctaatctggatggctttaaaaagatttcgttcagaagatctagtgcctatggagtgtgtgacagcttgtaaatgttgaaacctgagagaattatgcatagaaaaaaacctagcatcataagtgtcttcctagggtacgattgataccacaaatgccatcagtgtggcattgacttggacattttttttaaaaaaagggggagaaataaataattggctggtttgataaacatccatgttattttactttgtcacaaataataatccaagcagaaagaacctcagagataaataagtgatgaattcgctcatatcacatctcatttggggcaaaattttcgatttgagatgtgttactagtaggggcggatctacagtacaagcgtcggtgtcaggcgacaccgacgactttcggcaaaacctataacaaaactgcttttccatatgctataacactatgttttaagtataattagtatactatgacaccgataaacacgttatgacactaaataaccgattttctagatccatcactggttactagtacagtgtagtactgtatttagcaacagaaagtggcacacaaacactgacacgcatggttgagataaacagtggcaggagcccaggaaaggtaacctggctcagagaaacaggagaataaatgattgaaccaagaaaaccacaaaaaccatggacttgcagtgaaacccatagccccagcagacagtagttgatggaattaaagacaaaggcagaagtcacaggcaggccccatgcacattgagcaaaaggaagcccaagcaagtgccggaaaagatagggattggcctccaagtaaattctcgctacagtgttatctccctccgaagttgcaatgagatcttgttataattctctctggaatctctctggccatctccctcagatcttgctattcccaaagagattggcgtggtccaccagtccactctgaaatcgtgagacctgaatgtcaaaacgaaataatggaaagatc

SEQ ID NO: 34044 - DNA, 988 bp, Oryza sativa
gtccctatagttaaaatgtaagaaaacacaattatatattttattcctatgacaggcgggacccactggtaattaaacaagaaggtttgaccctaagtcaaccagggccggtcccacatgtcaaccacagtgggttttggataatgtttccgattaaaaataaatcatttatgaacagtgcatttttacaatttctcggattaactcaaatttgaatctttaaactagcataacttattcattttagctccgattcgagtgaaacttgaacctaaattcatctaaattcataagctttccaatggtatataactcactatttaataaaatatattaatatcaaatgattagattatggtcaacttaaaaatgtgctaataaataaaattgatattgtacagtagagtagatgtcaaataaatatatttaacatgttttgtcactgtagcaaccacataaactaagtataagtgatgtctcaaatgaatggatgtataggaaaatactagtacttatttaatattcgatggccatataattaaacccatgacttataggttagttaaatcaagtttagcctcatattttgtaactaaaatattaatactcatagataaatctttaacttgtttatgagaataataacatagctagatgtggaggaatcaccaaataatttaatcaatgcaataccatatagaatagcacgtatatacctaaactggttaccacttattagtaacccaacaaatccagtgcttaaacttgcccatcacatatataatatcactcatagaaactagctaatgtataatttaactataatatattcaggaatcacttggagcattgggtagtacaccttctaaagtgaaaattagaaccatgccattataattttgcaaagtttgagatatgccatcctgacctacatgtcattgactcatgtgggtcctacatgtcattgagataccgatggcatatctca

SEQ ID NO: 34045 - DNA, 3178 bp, Oryza sativa
cagggaggcgtgcgcgcggataggatcgaggtctcctcctccctcccgctcctctctcctttaactcccggctcctcctatctaactctttacaccttatctcttcctctcctcctttctctcccttaaactcccggctcctcctatcctctaactagctccttacgtacaccttatctcttcctctcctcctttccctccccaatcctccccacttcttgatctgcaacgcagaggcccgtcagcgcctctcctcctttccctcccatcctccccacttcttgatctgcagcgcggaggcccgggcagcacggagggccgggcagccggcggctttgcggcggcgcgccagcgggcagagggccggtcggcctcgcggcagcgtggcggtggtcgatgctccggcgggcggcctcgcggcgggcagcgcagcagcggcagcgagcgtttctttttttttttgagaatttgtgattcggatctgagatgtatttgatttgtgtgtgatgtgaatatgtgatgtatttgtgatgaattttgtcgaagttgtgatgtaatttttttttaagattttgtgatgtatttggatatgatcgatttgaggattcaaggatttggggatgattgatttgggattttgggatggggatggagtgaaatcaatatattaaaaacaatgaagaagagaatagaataatggagtaaccggatctagctagcttagctctatctttagtcccggttgataacaccaaccgggactaaaaatggatttttactaccggttatttcacccaggactaaaaccgggactacaaagggttataaaccggtagtaaaaagcacttctccaccagtgtaaagtttgtacacaaattcaaataatatacagaatatttttgcacgtatacaaaacttttatatgtaagtagaaaaattgtgcacagaaagtttgtacaatattttttctatatgaaatgtattttttacatataaagtgtttatgtctaaagtttttctatatttttttgtccatcatattatttatttggctaaaaggcaatggcctcggttttaaacgggctaaatgtagatacataaatgggctatacgtgtacctgtgggctgcacgcggcccgggggagcaagcatcaatggctaattattgaaagaataatttcactttaggtctttcaatatgttgccgagtctgaaatttaaatttatctctcacacgaaataccaggtatagtccatcccgtaactaatagtgccatgttaactttaatctcttgttagtatagtgtctggttttggtttacgtgataagtgggactcacgtggaccccacatgtcagcggccacctcaatgatagaaaagtacttatcataccctaatgaaataacggtgcagatcatttctactgtttgtataatactactagtagagagcaccagactttcactaaaagaagtattatctctattttttaataaatgatggtgtttacttttaaaataatgtttgatcatcgtcatctattaagaagcggatggagtatttgttaaaaaaaataactagagtttataaggagtcatttgttaggagaaacctgcccttcagataaaaaaaacgtgtaatgaagttcagaacacctgctatgagcatctcaaatatagttaactgaattaaataaaaaaaagacaaaaggagcgagagagagcttgctagtgatcaaatagtactctaaatcatagtcgaattttaaattataagacttaatttaagttgatcttggagttacttttcataacctattctctaacattagcttttaaatcggtaatattacatatgtgaaagatttattataatttttttattgctttatttaattttttacatgcttatcgaccatagctcttttttttaattttagagaagagtaatttttacccagcctgtacatccaaccagatatatacagcctctttttatttttatttttttttattttgtgatatctcgaatagagtggccacgtgtcaacggaaaaaaaatgctggacgaacttggcaggggtggagggcatatggtcttctttctcatgtaaccccctactcttctttctctctgtcatcttcctctctcctctctcatatttctttgaagctacttatattttaggaccgaggataagattataaaagtggttttctttttttatagatcggagcgtgatttttgaaaggaaatgcgtaagggacaattttggatgaaacactgttcagatgcccctctttccttttttttaacatgtacgggatgacacaagaggataatgcccagatcaagacctgtttacccataggtctgcacaaggcctgaatgggccagcaattggaccatactaaacaagcctaagggcatttctcgaagtaataagtctgtcttacctccctcaacacttgccgctgatgaattgtctccctcaaccgcaatatcgagtacaatgcattcccgatcttaaaaaaccagagcaaatcgacttccttggccattttgatagcagtttcgtcatacatggtgctcataaatcccacatgtcagtgagaaaaaaaataacgccccaccccccctctttaccctttatctctatttatgattctcgccaaaccggagtcagatcagtgatgcgtagtcgatgaaacttggaaaggagtgtcccgaagagcgtgttcccaagcacaagcggcttgttgagtttctacatcgcgaacaccttgtcgaggatgcggccggcaaggcggttcttggataggtcgatcggcggtggatggtgtccacatagctccccgtgctggacccatcgacctccactgccgctgaggtctctaggaaggtagacagtggccgacatcagcgagctcgtaggggagctggggtaggatcaaccgggagctactctagaaattgtcatcgctgccttgctcctctcctgccgaccactagcctagacatcacgaggtggcatgggatggggaggatgccggccacaatagccatctgtcgcagttcggacgagatgggaaggcaccaacgatgagttccacacgtgacaaggagggccatggcagggagggtgtgacggtgaagctggatctgccttcgggccct

SEQ ID NO: 34046 - DNA, 1419 bp, Oryza sativa
tctaatgaccatgctcattgtactaatgtttactgaaaaataatttatgaagcaccgtactgttcattagttaggtatagaccttgagctatgcggtgtgccccattacctggtggagtggaacctgatcatgaccaaaactgcaagtgcaaaagcaaaagaattgcctgcgaaaaagaaaagagaaaaaggagatttgactgctgttgtaccctcacagctttcagcatagaagtgtaaaaaagatacgactggtgtgccctttgatgccaccttcttaaatgtatgtttaatgttttcatctgaaacaaaagtgtccaaaccctacaatgctgcttcatgtcgatgaactccagtaccataccatctcttttgattggttctagaagcagcctgttctgctctgttggcaagttgtattcctcatgttatctgatatgtcatgcttgagtcttttactcgggcaatatgatctaggtgaacgtatgtaatccacacctgagttgttaagcttatcttttgctactaggtgaagagaacggtacatcatggagctgatatcttctccttttatcagaggggacaaaacagaaattggaaccggagggagaaatggcaaaataaatgatcttatgccgacccaaactgtgccgtaagccggcccgtaacttcttttgctggatcataaactgcaacctactccactccaggccggtgtgtcctgtacttgtgtaggtttaacttgcaggtacttgctgtgactaccaagcgacaaccagttaatcaccggtaacatcagaccaaaatttaacgcaggcagacggtgatatataagctcagcaaaagcaaagaacattatggccaatgaggtacctgacaaaaacatctagaacactaatacacagcactagttagaattgcatacgtgcctgacagcaccagacgtcaaataccacgagtaaaattattgccacaactccaagtctccaatgtacattttcgacacaagtagagacggtttcgggtttcccaccaaagcttctatacaaaaccagctcactaggaatcaattatacctaatttgaaaaaaatggtggaactattactaatcagggaagcatcccccacaatccacagcaacttgcctttattagatctctgtaatagcttccccacgctgcacgtcctggtctcacgatgaagaactggaggccttaaaagacctttccatgctttattgtttccaccaaatattgttttctttcctacttaggctgtgtttagttcctgaaattgagaagaagtttggaaaaagttggtagtttaaaaaaaagttgggagtttatgtgtaggaaagttttggatataatgtgatgtgatggaaagttgggagttgggggggggggggggggaaagttt

SEQ ID NO: 34047 - DNA, 698 bp, Oryza sativa
attcctgcagcccaacctcagccgcctctggctacgttcagtgcatcagcttgccttttcacgtgtcgttagaatggctatgcatggaaccttcacacggatatagctagatgcttcgaacgagagaaactgccatgcatccctcatgctcgatcgatcgtgcattcgtgctgcatggattggggcacatggacagcatgacacatctcacaagctgctagaagttggcaccaagctctcgctcatgcatgcttaatagtgacaaagctgaaggtttcttgtcaaaaagtacatcgagaaagaaaacctggcatgggttcggcatggttcaatggttgctgttcaagacaattaacacgtgatgccattttagataagtaggcacggcacggtgtaccaactttgttgatatgatgccacgcgggctaaagttctaatgttgctatcgacatccaagggagcccccaatttgatcagtagtacactactctactgtataaatctagtcaaatattcaatggtagccaaccagtacaacttcattttggaatcatattggactagctagctacctagctcaaccagacaagcgaggtgtagaaatattaattccactgtggattttagtagagagacaaacagacactcgtgcagatcgatcgtggaaggctaggtctcaaaatactgactgaattttt

SEQ ID NO: 34048 - DNA, 960 bp, Oryza sativa
catgggattctactgtggcattcatatccctgtgtggatgtgctgtagtataccaaactgctagtcaatggagcggcacggaggagtccttttggaactgttaccacagttgatagtggagctcggagaggaggcctgttgatagctaaggttctgtcaatggtgcgcaacaatcgcgctcaggcatgctctttgcttctctttgcagtgactctctcacacgctctctctcttatctcgctggtttggtttgtcgtcgttgatcgagttcacagttaaattttcgtgatattacgtccctatgatggatactggatagagtaaatgaacaagcagaaggacaaaaaccagtagttgtgcttttgtgcaacgccacttcagtacgtgagagaagtatgagaatatcttggttgggcttcagaccatatataacatgggtatagatttataatttgcacgttaaattacaatagttaaaaaaatattccatctaaaactgatgatttagatatatgaatttcaggagttatgaatacccagattaaagaaatattgaattcgaagttgtgtcaaccaagtcttaagaacgaatcaggcaatcagtaggtcatagaaatacaatcctatgtatagagttacaaagagaacgtaacatagttagttgtaacttatagttgaagtataacctatacttcatctgtcctaaaatagaataagtttcatcgttcaaactttatcccaaatataacaacctaatatttataaaactttatctactaaactatctgtctacccccttgattttattatagccctaactaatccgttcttctaccttaacaatccgaggagacaaccaaatgttttatctctctcgttaatacacgtaccaaaagttaaaacttgctataatttaagatggagtgagtactatatattcatgagtagggctgcaggaat

SEQ ID NO: 34049 - DNA, 2226 bp, Oryza sativa
ttcctgcaccccaaacggatgtagtaatgaccaatccgatccaagtctcatactatacgggcagtggagataaattattaaatatttaaatccagttgcaagaaaaaattaaggtgtctaatggagtgcataattcggtaatcagtgtatgattggtggcttgattcccattctgttataggagaccgtaccacggttttagtgtccgtgatcagcagtagcgttttttttttctgaagcagatcgaataatttgaagttaagcacgtgggttctatgtaatacagcatcttttaatacaaacgatgtggttgggactggaaatcctatggttaaggattaaccttttctaatttttggaagttttcagtagttaaaaaaaatcgatgttttcctgttgaattggcaactatttggtgaagtttcatgtttacaaacgaaatccaagccaaaatgagcattgatccttccatgaaaaagtgtaggagggagggacggttggttgatagaggtacgtactacaaggttcatagcctccatttctgagtctcggatatctgtataattaaagatacgaaatgcctgaatcttttcgttgctcgggaaatgttcagttcttaactgaaacaattcatttgcaaggcaaattgtgaagaatatgtaaaatattgtactagattaattccagtacggatctccaagtttatagtacaaaagagaaagtgggttagtgagaaatacctgtagtcttccagctagttccatgagatggtgggctagccggcttaggttcaaagtatcactccttatatttatttgatattagatcattctctaatattcatgttttttagaaagtgggttagttttctcagtacaccggctaaaccattagagttatccctgataattcataaatgaaaacgtaataacaccatatgcccaatgatcaattataccatgattctaaattcactagtccactgaagacaaagtgagttggcacttgcgatctgtaaagaatgtggaagaagacaattcgcaaagtacaaaaggtagtagttggttagttataattcagaatagtaaaattctctgcatttttgcatcccaaacacccttagagcttattttgtgaaatgcatgttctccgggctcaaagaagacgagcggttaagttctgtaaatatgaagattgcacaaaaaggactacaacatcactgttcgtgaattttgtcgcttttcctttctatatagcacagaagctagttcgagaaagacaagtgatatgttgaggcctaggtgactaggtatagggtaataggaagaggtagatgaaggctttagtttttcagattcagaaaaaggaaaagggaagagatagcatatagtagtacagtatgcttaaggaatgatgtataagggtgaagcgatgagtacacactagttccatgtctacacagaccatatgattgtgagtcagacaaggaatacccagtacagaatgtccatcaagtgatagaatcagctagtgtaggatgagaattccaactcctgtttctttaggatattgtacaccttttttgcctagcaaattataaggtctaaacaaaaacctagtatgctccaacataatactgtatgtcaattttggccaaatgtatgatgatagttgtacaaaaagaattgtataacattgtctgatttttatgtctcatggggcaactaccaagtagccagttttactatagttatactcgatctcctagagtaaccaaggaaggtgccaacaagacgaagtgctctagagtttttttttaacaacatctcgagttcttaaaaataagatctccctcaattgccataccctctcgcaaatacaataatcctcgttttggagtttttgtgagtgaagcatacaaaattcatgatctgaactggttctgataatttcatatgcttgcaagcactccagtgtacattctgtggcgctgtgcctaagaacatagggaaggcaataatttaactggtggtcagttctggattcgaagcttctaaatataccagaacggcggaatccaacgctaataaattttacttcacagatatgagtgcagtattatacaagagtttgtcaggtatcaatgcaggtaaattccagattatgtcaggcatggaattttgcatcactaggataagctgatataatgattaactaccatgcttg

SEQ ID NO: 34050 - DNA, 3598 bp, Oryza sativa
attcctgcagccccggactgcgacgttatcgttcgatatcctttcttctgtcaggtaaatttcattgattagttattctgaacattcaaaaaccaaatccagtacctaaaacaaagatcactcgctaaagagccagtgttctattgtcacatatttacatgtgaaattaattactagtgactagcacttctagtcgaactttaactacgtctatatatatccacttaattattttattgcctatgctcttattgtatgggagactatggagttgtatttagggcaagtgatatgatagatgtgactaccacctctaaatttatttattttattcactcatgaactaaaaggtaactcatacaatgtatcacctctagtacacaaataccaatatgtctaatattctcacatattttttaaaatttgtgtggaggttgcctcttgatttaggggtggctcatctactctctcctcacttctctcatccatctcatcactcaatccaatgtgacacttttaggggcaatatatggtacattatagttattgccctaaaccatacagcacacgtacgtgtacctggaaatcgttagttaattgcagcacaaacctctaagctaggacagctaacttttttactgctaagctcactaatctatgtttggtacattttggacatggattaatattctactagtggctttttaccacctcggcagatgaaacttaaccatggccaggatcgcctgcttatccgttgattcgacgaggcagtcaaacttcaactgcaaagagggggagacattttgcatccttcctggagtagccatcatctgatccagtggccatgccttgttcagtttattactaacagtttacatcacagtaaagcccagcagcagcagcagtagtacgtttggtcaagtctcacctcgagtgaaaacttgctgctgctggctgctcctcacctcgatcgtgcaggtcacgtactgattcgcatatactttcgcacctctttgcccctgtgcttttgaagccttgaatcttatgccattgccagccttcaccacggattacaccgaactttactgcttttccttgcctggctgatcttgtatttactcctttatcttttttcctctcttggcgttcctatctttgtttttccgactgtaaagttgtggcaaaagttgctggatccggatgtgtggctggctgccgtagctagctcagctctgaactgttagtctgcaactgcgagtaaatatttcagcagctggctagctaggacagcttcgaattttcagttaggagcttaggataccccagaagaaaagcttagtacccatgccttgcaacaatgtccggccacacacacataaaatggccggccacacacacagaacgagcaagcaagcacgcacgcacgcactcgcacggactacttcatttctgcaacaacttgtaaagggcactactacgctagtgctaccgggattggaatgcttgggccctgtttggaagattaacccagggctaattttgagaaccaatgtttagtcttgaattggtaagctaaatattagtttagggtaatatgtttggatccataggctaattgagggctaaaagatggagagagagtaaagagagaggagagattgagggagatatggctgctttttgatggtccccacaaaaaattagccccattagcattccttggaggggctaatattttgaggggtctaattcactttagccctaaattagcccacatatttagatccttatagggtaatttagagctaaaaggtggaggctaataattagcccatggaaccaaacaggaccttggagccattgaaatctagtgcctagctaggagtactgtagtagtaattggatctcgcaaaaaacctttgtggaagtagtggtcaagatttgcacgccagccaatgcacaaagaacacaacgaaatcactcaccccaacaccaaaacagttgctcaaagaggcacaaagtgacgatgcccttgtagaaaagaaaaggaattctggtactatacgctctatacaggaatcggagccgtacaccatcagcaggcagagagtgattgagtgaacgtccatatgtaagtagtcatgcagattgtgcttttgacagtctctcatgagtcatgtgtgcatgcatgtgggcaacccaaacacattttatactgcttctgctacacaagaatatgcagctctgtgccgtatccagaagccaagattagcacatgaacctccctaaaaattaaccggacgcatccatgcctgcctctgatccgcggatcatgatggaggagccggttggtggctgaccaccagccttccagagattctgttctttcaaacgaaagcacgagctgcatctgcatgcttaagcgaacacctggcccagtagaaaaatgatgtaaacaattggcttttccgatcaccaggtggtggatgcgactgtaggtgcgtgtgaggctacgagagctggagtagcatgcatgctcacgagtccgcatgcagctggctgcaacagtgcaggtttgtgcgagaatggatcgcaacaagctactacaaaccagcagcgctctaatccgttaggattagatcatggtggtgcggaaatgcaattgatctgtgcgcatgtgctgtaacccaagaaatcatactgcttctgaatcaaggtacatcggtgttggaaagattttcagcaaatcatgatgtgtttgctcctcgctatggaggagagactctgcaagtctgcagcttgtttcttcagtttctctctataaaagataaacgaaaaggtttcttcagtcacaacccaatgggatttttggaggtctaatttttcttcgtgcagtgggctcgaatagtataagcccaaatagtaaagcccaagatgttaagaaatggctaattctggggaaaaagtacacggaaggtccctcaacttgtcacaaagatacaaaaatgtcctcgaaccgcaaaaccagatatgcggggtcccttaactatacaaaaccggtcacccgagatcccaggacagtattgacgtcggatttgtcctatgtggcggctgagtcagcgtgtgacccacgtgggtcccacatgtcaggatgccacgtaggacaatctctttcccctcttctctcccttcctctctctctctcactttgctcctcgtctggtggccgatgacagcaatgtggcgcgacttggtgcggcgccgatgaggatggggttgagcccgggggcaaaccgagcgtcgcggcgtcgagctccaccctgcgtgcgacggcgccgagagagggaaagagagcttcaaccgagcatcgtggcgtcgagctccctgacagaggccggcggggagaagtgggagaggaggaggtccggcggccggcgatgccatcaaagatgctagccacctcgaatctttcctctttaaatccaggtagggagagaagccacctcgaattcaaattatccccaaattttttcctcattctttacgcttcttacatttgctcttgaatccttagagttgtcgatgaggaagtgaa

SEQ ID NO: 34051 - DNA, 1244 bp, Oryza sativa
aattcctgcagcccagagttgtcgatgaggaagtgaagccgatctcgccgccgccgaggaaggaagaggaggaggaggagccgatctcgccgccgcaaccactgaagcgggagatctggcaggagaaggcgagtgcgttctcgtcggtgggctcctcctcctcggggaagagcggcggcgccgagagcagaggtcggcgtcgcggaggccacaggagacggcgatggcagcgtccggctggagatcgaggagatcgcggcgggggatcgccgtcacgagaccaggaagcggaagaaccacctcggtgcgcgcgcgcccctcgcctctcgaattccatctccccctttcaccactgctcatcctcgacgcgatgtccatgccccctgcaggtggtggtggtgctcggcgacgacaacggcgccaacgcccctcccttgctcctgcgtcgtcgccgccttgttcccccgccgccgccttgctctccttcccacctgttggctggcgacgctggcctgcccagaaccccagagagaagagtgagagagatagagagagagaggagaaagggagagaagagaggaaagagagagtaggctgacctggacaagctgacacgtgaggcccacgtgagtcccacggtgactcagccaccgatgaccgtggtcaaagcgccacataggataaaaccggtatcagccgagggacctattgcgaccggttttgtatagttaagggaccccgcatatctggttttgtgatttgaggatgttttttatttcgctgacaagttgagggaccttcggtgtactttttcctaattctggccccaagtcgtacacgttacctgtggcggtatgcttctgtgggcttttctgcttgggccaatcctgagcgtctcttactcttctcacgagaacccaaacgacgccgcattccccttttcctcccttcccgggaaccccggccggcggcgaccggcgacctcccctccgagtcggcgactggtgcctccttttctcccctgtgctccttctcccttatccgttaggtctacaagcacctgatttggcagcgttgatccccattgttgtagggtgccatagaggaaggaggcggtggagacaccggcggtggcaagggcgacatcggcgaagagttcgcctccctcctcctcccatcctatcccacggaaggtgtgaaactctattcgcacatgtgtggcaaattttggtaggtcgtgaagt

SEQ ID NO: 34052 - DNA, 769 bp, Oryza sativa
aactgaatttgcgtggctggtggagaaggcgattgatcgatcgttaggaggaagagacggacagccacggacgaagaagtcctcaacacccaaccacgggaagaaaaaagccccatgttccaaggcgagcaagacaaaggatcttgcatatgcgagctatgaaagcgacgtcgcacccaacacagcaaaccgaaccccgttcgctgccaaggcagaaaatgactcaacgagagaggttcctcaaatctcaatttctcatgcatcaaaacctacgccactgtgctacccgctctaacctaacgaaaatggtttcatgcaccatcatgacgatctaaagtacgcactatatgtatatgcagatatcctaagtgtcgttgtagtaataataacgaaccgaactgagtgctggcttgctaatttgctgacaacattgttgtgtgacaggtacttttcctagtcaagtaggaatttaaatttaaatggtggaatgttatattttgttaagaagagaatgtagatgaagaagttgttacattttaaaataaattttaaaagttaaaagttgttatattttgggataaagggagtaagattcaaaacacatataaaaattggtcatcaaccaaacatctcagcatctcaaatcatattgatcgagaaacataggtaatctatagaaataatcgtttggatgaaacgcaagaaaccacacgaaacagaagaaagatagacacacagaatgtttccaataggttggaccttatgttaa

SEQ ID NO: 34053 - DNA, 1942 bp, Oryza sativa
agtaacacggcgtgtttagcgagaaaatctcttgattttctttttaaagaccaagaagaaaaccattgggaactcgttgagcatacatcaattgcttcacgcgaacgagaatcacgccttccaccgcgcgagcgatattcaactgtggcatatatttaggatgtagtgatgtagtactaccgaattaattgcttagttaagggtcatttgcgaatatgatgttgcgaaaaatatactaaaacataatgagccgtttaatgcgttttcagggaacttttattatctcctttgaaacatgaaacgcatgattaaaaaaacagagaaatagaaaataaaattgtaagtgtaaaatatagaactataaaataaaatataggaaaaatttaggaataattgcttgattagacagcaagaaaacatatatgaattagaggagatcaaaggaaactttccttggggttcaatctcatatttaaaattcctccaaaatatatacagatagaggcatttcttagaaatattgtaggattcaatagtatccatttttttttgaaagggtcatagaagaaaggcagaaaatgttatataatttaattcctacaaaatttagtgtttttccttcaaatcagggcaagctcaatatatatggtgtagcgtgaataacgatattgttagcaagatcttttacgtgcctggagcaatgaagccggtagcaccactgctatccatgaacaagctacagccaagcagagacttaaaaaaagaaaatcacaaagatttgtgctccttttgtttataaacttgtgtgtaagaactgagtttgttcgctcggaatttatgtggttgtatgtaccccattggtgtatagaagccaggttttataaattcctattatctaaaaagaaagaaaatcacaaatcttgaatgacacaaagtttatccttcaactagaacatcaattactgttaggctcattgtttggaggagctgagaaataaccggcgggtattcagttgagcgctgaagaagttacctttattgtctaaattctatatatacttattgagaaccgagagtaaaatcaaagacaatttgagtactagagattctaggagtggagtagctgttgcggccagggttcaatattttggtttgaaattttaggaatcgcaacccccaaccccaaaaagatcgttaaaaaaaataaatttaatcaaaacttgtttaaatttcaagtttttaaggtcaaaattttcgggcaattcgggaaattttgtttctctggatgatcaaaagtatttttgatttgcaagatatagaactttggctgctactaaggctgcatttggtaccaccaattagaaacttgtctctcacgcacgtataacaaagcaagttattactccctccgtcccataatataaggtattttgatttttttcttgtattgtttgactactcgtattattcaaaaaattttggaattattatttttttgacttactttattatccaaagtactttaagcacaacttttcgttttttatatttgcacaaattcttcaaataagatgagtggtcaaacaatgcaaataaaaactcaaaatcacttatattatgggacggagggagtagcataagattaattaaatattagctaaaaactttttaaaataggataatatgatttttttaaaagcaatgttagtatataaaaattttataagagacgcatcgtattttagtaagcgtgcgaaaaaaataagagaaatgttatgggatgttccatacactcgcacgtactacaataattaggttttacgaagtccatgggcatggagtcatggacaacgtattcactaatcattgaaaagaacaggtgcgtgcatatgggaaaaaaaagaaaagagaaatagaaaactaaaaaaggatagagataata

SEQ ID NO: 34054 - DNA, 528 bp, Oryza sativa
aaatggagagctcaccggcgacgcgagggaatcggagctcctttggcgattcgcggcaatcgagcgacgaacaagcagcggccggcaccggggatcgcgatggcggcggtggggaggctatacgacggccctagcggcgactagcggctgccgaaggcggcggtaggcggcgacgcgtcgggagagcggtacggcgacggcgcacggcaagcgagtgatggccgatgtagccctcgcagcggcagagctagcgacggcggtggcttggcgcggcggcggtgctagcggcggcgagcggtggctggaggtggctaaagggcagcggcgacgggtgtgacggcggcggcgcgatagagtgcacggggaagggaggcgaaaaggggaaatgtgagaggaggacccgaggttgctttttgaaagcatggggagggtggacaagaccgggaggcggtcggatttctcgccgacctggaagatggagagagagagtggggggaattcaattggattccgctcttgcgggcgcgc

SEQ ID NO: 34055 - DNA, 653 bp, Oryza sativa
ctacatacgggtacggatatgtttgtccgcgtaacgggagtggttagttgcagggaaaaggctctctctggctgtgtttgcatagcataactatactttctttatgattgataacactcccaaatattagaagctaatggctaacatgtaaatcgatcagctttacatatcatcattcattaataattagtccgtactattttagagcattttaaatcttatgcaatatacgtagagcttaatatataagtatgtcaaatcatttttctcacatcattttcacaatgtttcaaattttatcatttctataatatttaacatatattcatccataaatttcgcagcaaattaccacggggtgtcacgtagtaaatatatagatattactctgcccgtgctttttcacctgtcaaaatgcacatatttttatcgatagctactaatattttgcacaaatatatttcttattatatatttgtaaaaatgtattggaaatattaattatatgagtgcattttcataaaaaatgtactgatattattttaacgtatcaaatcttaatttatcttttaatttatgtctgatttaggattttttttatttcttgatcgtactcatctactctaaagattgtatctatttgtcgacgcaat

SEQ ID NO: 34056 - DNA, 599 bp, Oryza sativa
gctcagttgtagtcatcttaagtcgtggatttgataaggatctataccatattctttacccccatctttctaacttctactcacttgttttatacgcacatccttctcaaaccactaaagggcgtgttttttttaagaatatatagaaaaattactttaaaaattatagtaatctattttcaggttttttaaactaatacttaattaattatgcgccaatgtataatacttaattaattatgcgccaatgtatatttcattttacatgatggagagaaggggttccgaacacaactttaattgtccgacaccaattatttttcttggttgtccaagtactctggctttccattctaaaatataaaatataaagacactattatttttctccatgtcttataatatatggcacgcagtcatgtatatagtactaactagctcatttaaatttgctttgttttaaatcatctaccatcaaacttccaatcacataattatttacatgtttcgaggtgatccaattgatgaggtgattaaatttactttttgtttttgtgttagtggtggctattttttatattttgggataaaaagagtat

SEQ ID NO: 34057 - DNA, 782 bp, Oryza sativa
cgtttgaggtcagatgccccttgggtggagcaggatcccccatgattttgatgattttttcttgatgttaggaaaaacaagttcaaaaacctctaaagtgggtttcatgcttttggctgctttagtttggtccctttggtcaattcgaaacgacatgatccttaggaataaaatggtttcatcatcactaatggctccttttcgtttgattggcttgctactgcagtggaagattctgctgaagctggaagaagtacctaccctggaacaaacaactaaggcgattcaggaagcaattgatgccctgcgaccttcgtgagctggaattggttagccttctctttaggatctgttttttttttctccttcctgttagtgtgttttgctgctgctcagtcagtttgttctgaaaggttgtgatgttgtgagggttgatccctttcacccttctgcttttgttttctgtgcctatatgtcaagctggcgaccccagcgctatataaggatcagtttgcaaatacttcatgctttctataaaatgcagggcctcgcgtggcctttcctctaaaaaaaattacaaaacaactgagaagttatgttggtgtacattccttaggaatataatactgtgagttttgtttcattggagcaggtatgttctgtgcaatcttgcatgctatgtatttcctcatgggatataagatatttgtgaggtgggctctggattggtctgactttttttccatttccggaaaaaaaattgaaacctattttgtaactct

SEQ ID NO: 34058 - DNA, 514 bp, Oryza sativa
aatggccctgtttgaatcaaaagggttattaaatagtcctccggaatcttgctatttagaagtattaaacgtacattcctgacaaaacccattcaataccttgtagactattttgcgagacgaatctaccgaggtatattaatctataatgatttgttatagtgatgctacagtaatcatccgttacccatagattaacatacctatgatccagacagggccaatattgctctaattgtattctatttaacctatgattagctaatcagcctgacaatctctatattgtgagataaatatagatggagggaatatcatatactgaccatagaggtaagtatgtggcactaatagattaattagcacaagaaaaggtttgaaagtaaatagacaagtattacaaataaaagaaaataaagtttttttaattttgttttccgtagtaatgctttaacaaagcttaaaatctttacatgaatatggttactacaggttaattgttcctcaacctttt

SEQ ID NO: 34059 - DNA, 566 bp, Oryza sativa
agctaggagagaggaagaaaaatttatctggaactggaagaacaaaggaagtgaggtggtggaggggagcctgatcccctgatggcctgatttagggttggcgtaggctgcttgagtggtttcgtgcttgactgcttcaatcggtgtgtttgccaccttccattgatggcaaggatgaaggatgggagggagagcaagagcagcaaaggagggggaagaacgtggagcagcagaggaggagagggaagaacgtagcggcacggtggaagatcgatgggcgcggcaacggagtcgtcgctcgtggcggtgtgaaaaaggggtaggcagggattgcgctctctctccaggctctcaaataaggcaacctaaatccccttctataccgagtcagtcccacgtggtgcttctaaattttatcatgcccaaattttgatttctatcacctagtcgccacctagacgcactgtcccgttgtctaattgcgcccaggcaccgtcctgtccaggccgtccaggctgcctaggaccgactaggaccatctaggcggtaaatcgactaattcactg

SEQ ID NO: 34060 - DNA, 511 bp, Oryza sativa
ccatattcatgttaagattttaagctttgtaaagcattactacggaaaacaaaattaaaaaaactttattttcttttattcgtaatacttgtctatttactttcaaaccttttcttgggctaattaatctattagtgccacatacttacctctatggccagtatatgatattccctccatctatatttatctcacaatatagagattgtcaggctgattagctaatcataggtaaaatagaatacacttagagcaatattggccctgtctggatcataggtatgttaatctatgggtaacggatgattactgtagcatcactataacaaatcatcatagattaatatacctcgttagattcggctcgcaaaatagtctacaggttatggaatgggttttgtcagtaatgtacgtttaatacttctaaatagcaagattccggaggactatttaatagcccttcggtccaaacagggccattgtcatcaattacagtaaaatatggttagtt

SEQ ID NO: 34061 - DNA, 671 bp, Oryza sativa
ttataagtgattgatggggcaagtaatagcttctttatgatcgattatttcagcatagagtttgaattaacgtgcataaacaattgatctggtatagtgatagtactcaagcttaattaacaagtggcaggccacttggtggtaataattcatttcaaaatggatagtagtgaacgtgatcatgtactgccgtcggataggagatttgaaccctatatgcaaatctagtggttttaatacatgaaagatatatgaaagacgctggagtctggtttacgaaaacagagtggttcatctggttctttatacaggatgattaaaagtacatttagccttattatatataaagatagtacatttttccttgcgcagtaatttcgagtaccaaatacgacctttacacgtaatttctgataaacttttaatgctgtgtataaattctgataaaattttaatatatatatgaaccaacgaccaatatgtataaataatattcatacatactcattgcgtcgacaaatagatacaatctttagagtagatgagttcgctaagatataaaaaaaatcctaatcagacatgaattaaaagataaattaagatgtgatacgttaatataatatcagtgcattttttatgaaaatgcactcagatcattaatatttccaata

SEQ ID NO: 34062 - DNA, 681 bp, Oryza sativa
ttttttctgccaggtgtggggcccgggcccaagttgctccacacctggctccgcccctgactacaaggaatttatttggtgatcttttttatggtgaatgtgattaatacttttggaagatttttttttttgcacccgttgcaagtttgtgaaaatcctgtcaaaaatctatcagtgtttcgttaaatttaataaaatatacaaatcttgttagaaaagtatgggcaagtgttaaagcttgtatatgtgtttttataaccgagttgacaccgtcaaagctgtgttcggaagggcaatattccaacaaagtacgtggttatagtgagattaattaattattagcctaaaaatgatagtcagattagttacctattagcctaaaaacttgaaaatagattaatataattttttcaacctgctttcacatagaggtcttttcaaaaatacactgttttacagtttgaatagcgtgtgcgtaaataacgaggaaagcgagtgtggtaaagagggtaaaagaacacaggtaagtcatcttggcagagtaggggtaaaccggtgttgaaatacagtagaattcctattgtagaagagagatgtgctcgcatgtgcataggtatctacaggttagaatataattgcccccatgatgaatatggccctgtcactccggtggacagcaat

SEQ ID NO: 34063 - DNA, 545 bp, Oryza sativa
catgcaagattgcacagaacataactgctccaattaaacaaaactcacagtattatattcttaaggaatgtacaccaccataacttctcagttgttttgtaattttttttagaggaaaggccacgcgaggccctgcattttatagaaagcatgaagtatttgcaaactgatccttatatagcgctggggtcgccagcttgacatataggcacagaaaccaaaagcagaagggtgaaagggatcaaccctcacaacatcacaacctttcagaacaaactgactgagcagcagcaaaacacactaacagtaaggagaaaaaaaaaacagatcctaaagagaaggctaaccaattccagctcacgaaggtcgcagggcatcaattgcttcctgaatcgccttagttgtttgttccagggtaggtacttcttccagcttcagcagaatcttccactgcagtagcaagccaatcaaacgaaaaggagccattagtgatgatgaaaccattttattcctaaggatcatgtcgtttcgaattgaccaaaggg

SEQ ID NO: 34064 - DNA, 599 bp, Oryza sativa
ttcaaatttatggtgtagtaggaagagaagaggggatgagaagggggatggagggggggtgatcacccacccattagcgttgcccattcctgattcaattgtgttaagattggggcaattgtgttcctgcccttgctttctgattcaattgtgattttacctcttctttttagggtttgtgattttgcccttgttttttcaaattgaagcttctgtttgcccttactctgttaggatgaattaacggtgttaatttagtagcagaaagactggtgtgccctttgcatttctttgtgtggatgtactgtttttgccccgatatatgatgtggacattaactttgagattgtatggcaactccacacaaatcaatttattgccagttattttcaggaacatgtcagttgcatatattcatcatcacgaagggaaaaagaaaggagaacgcaaccaattgtccaaacaaatctattacctagctttttcatgaacaaagagattgcacacatcaaaaaggagaaagaacagagagcccaagcaaaaaataatccccagatccatctaacagagcctcaatgattcatcgcagttgcttgccg

SEQ ID NO: 34065 - DNA, 1117 bp, Oryza sativa
  unsure (1)..(1117): unsure at all n locations
tgtaccagcgcccttcccctctctctccccgtgccgctgaccggtgggccccgcttgtcggcgccgcgccaccccgtgctgacgtcagccctggaatatattgcgcaataattaattaaggactttttctttattagtaaaaacacagtgaatcttctaaaattcataactaattcatccgagctccgattaagtccattcaagtctcagtaaattcataaaaatgtgtagaatccattaaaaatggctttgttatctgtttcagtagtcttatagcatgttttgcttgtgtgctttgtttgtcacgtagatttcggccgtttcgtcgatccgtggtttctcgaagacgttgctgtggttccatcagtgcgagagcaaggcaagtcatgcaatacaattgatcatattgtacctaatttacaaatgtcccgcatttctattaaatattgcattgttttacaatatcatgtgggatgggtcctattactcagctatatgttgttttccttatgccattgataacttgggtattaaaatgactagatgttggtttaggagatgcttagccatgcttagttcaactagtgcataaaaggggaccacattaaagcatagacttgattattggcaatagctctggattagtgccaccgcaatggtgttggctaattaaaatacactacatggtgggctgtgggtgcatggttttgctagacgtgcccatggcgattaaggaccggttcgcgggatgccctggaagaatttatcgtacttaccacaagccagcgtgggcaacggctgggcttgtagtgtagcttttctctagccgacgtacccaggcgagggtgggcgtgatggagttgggtcgtccggggtgtccggttgatcggctgccggattcaccgcggcacgaaaggggggctgcccgttgcctgctggggacggnggcgaaccctaaggtgtggtgcgatcggttagagggggttatgcgaagggtcctgtcacggcctctttccggtatgtcgtggtgacatgtcggcgcacgggaacgtgtcgtggggctgtgtacttgtgggtacagctgtacacctctgatcagagtaaaactattcgaata

SEQ ID NO: 34066 - DNA, 507 bp, Oryza sativa
aaactttcttcggctgagttcttatcccaatttttccaactcacatctctcgttttcagcacgcacgcttttcaagctgctaaatgatgtgtttttttgcaaaaatttctatacgaaagttattttaaaaaaccatattaatcatttttaaaaaataagttagttaatacataattaatcgtgcaataacgtgtgctctgttttgcatgccggggtgccgaacacagcctttgaaactttttattaccaaattaaatactccatatagcaatgacgactgggagcgggatgcatggtataagcactaatcagtcaagaaaggtgctggcagaaacgcgttactagctagtacgtgtgagtccggccaggagcatggatgcagcttcttgggcatgacggagcaaatacgtatacgtgtagcatggatgcgaccgagcgtgaagactcggtcggtcgggtccgccgtgttcatgttacatgcggcgacgggtttcatgactagaccac

SEQ ID NO: 34067 - DNA, 695 bp, Oryza sativa
attcaggatgggagccaagtgagatgagccaggaaagcatgatcagctctgcatctcagaatgccatgtatgttgacagcttgggaactgcaacaacctcaactgctgaaatggtgaccaataacatcagcactctagaacctgcatcaactgttccagattctgctttgtacagctggaattcgggcatggctgctgatgatcacttcagctggcagaacaacacaaaccttgtaccctgggatcatgctaattgatcattgctatctggagtccgaacaaattaatcctaattgctatcggtttagatagctagtgttgttatgcttttactcaaataataaatatgttcatattgagggagctgtttttttttctctaatcttaggttgtttggctcttatcttttcttaaccttgatgagtgcattttgtagcaatatctactggtcaagttagttattatgaaaaaaaaatagagggtcacatacgtcttccctattaattaatgcaatactggtagctcgtatatactagcactggtggagaaaccatctttcgtcggtcgggctaattccacaatagtcccagttgcaacaaaaagggtaacgggcatatttgatatttgatcatctttagtcccggttcaaatgctgtcaggacctgtcaggcccccccccggtatctttagtcccg

SEQ ID NO: 34068 - DNA, 816 bp, Oryza sativa
atatgatgaatagtagtatcattttttttaatttggcaatgttgcagaggcatggatctaattaacccttataaataggacttcggaattcaacactgagacatacaaccaatatgacaagtaggcaaagcacatagtgtatacgcacaaacaaaactagaactgttcttaggtggcaacttgcattgatgattcacgaaagactgatccaatcgcttagataccctgcccttggtcaccggtcgtcttttttttttcttttgcaaacaatcttggatggatacatatgccctatataaaagttgtagttatcaacggtaacaataacattatacaggatttttcctttgagaccatttacatcatcgaatatgcattataagtgataatatctatcaggaaaaatatttttttgaatttttcaaatgacctcaaatggaaacatgccatgtattgaagttgtagaactcaactagatctacaatattataattgacaatatttttatttgagatagtttataagcccaaatatctattataagttgagatttatattgagaaaaacgaaatgttgaatatattctattaatgacctcgatggagatcttccggatataaaagttgtagaacaagacgttttcatttgaagtcacttagagtgttaaatatatgttacatgattcagagtggaatagtcaaaagtcaaaagaatatagatgagttggcaagggtgctctttgtagagtggaggcattagcttcaaaactcatcaaacacataggtgtgtacaatggttgaaatttcattgatatgt

SEQ ID NO: 34069 - DNA, 585 bp, Oryza sativa
atttcaatatagtatcagttaatgatttatgttttttataatggtttttgaattttaaatgtgaatacgtgttcattattacatgggaaacttgcattgcaagtgcaatatggatggtttaattcacagtggttattacgtgcatgattactatcaatataaaacctttcactgtcccgtacgatttgttaaaaaaaaagaaactaaacacaagactagtggtacatggacacacgaacagagtatatatatacatatatacatatatatatacatatatatatatatatatatacatatatacatatatatatacatatatacatatatatatacatatatacatatatacatatatgtatatatatatacatatatacatatatacatatatacatatatacatatatgtgtgtatatatatatatacatatatacatatattacatatatacatatattacacatgtgtgtgtgtgtgtatatatatatatatatatatagacacacacacggtagcgctacctagcgctactcacagccggtgcgcgccaggaagaaacgtacgcgactcacggtggaaaa

SEQ ID NO: 34070 - DNA, 522 bp, Oryza sativa
tgttatgagtccaaagtataccgttgtagattaataattggatattataggcatgtgagtcgttgacataatacaactctattctatgtagcaaaatctggtcaagaaatacaatagaatccaactccagttccaaagcaattaggagtagttgttaaaccagatcagtagtcagtattcatgtactgattttctctttcctttgaaaggattcactcaggaatgctcagaagcatcaaattaaaaaaaaaaaggtctctgacccggttcaaacaaactggctggctagacaacatcacttccatgtacatacatggtggttgtggacttccagcagccatgcacattgagagaacagagaaaggcaggctagatatttaacaaatgaaaaaaagtttctgttgacatttaatcaaattttgctaaatggcacaatcaaattccagcttcaaacatagtagcacaactaaattttattcatgcaacaagcataatgaaaggcccgctgctaaactggccaat

SEQ ID NO: 34071 - DNA, 1676 bp, Oryza sativa
gcgggtgagggccgagggttttgcgaggttttttggggaatggaagatggagaatgaaggagtggagaggaagtgtcttgaagtagggaaacggaggcggtgctgcgagggggatgggctgggcttggctgggttctcgtgggccttgacttcgctgcaaccgaaagaaggaaaaagtccacaaggactccctcgaatataggatgaatctgattcgtatcccttacccataataccagatatcttgaccctcttagctattaaaactgatgcaatatgaatcctttggtggttttgaaggtggttttcgttgatgtagcatctaagtatcgcattgacttagtcttcgtcatctacgtggcattaaaaaaataaaacataatgtgtggggcccatgggtcagacgacggcgtgaaaccaacgggaccaaggcggcacctagcgaaagaagagcataaggcggcagctacctcgtcagcgggggaagtgctggccacgcacggccggaatcatctaggcgtcgttggtcttgccttggccacggtggggaggcgagagaggacgacggtagggaggactaaccgatggtggttggggaaacgaggatgatagcaaggaggccaaggcaaggggtgagaagggtatgcaacagcaaggaatgctatgatttcccagcggcgtttgcggtgttatcttctccaaagcccatggccgcggctgcggcgtgctcaacaaagagccacttgggcatcgactggagaaggaacaacggaagttgtacccaagggggacaaagggctccgagcgtcatcgtcgtccgtgatttggctcccagggtgctcgacattgcgaatggcaatggcattcgccgagcttgatatctcccccagcaccaaacccttcctcctagcaccaatgcagatttggcaggcgagcgagcgatcccgtccttcctgctagtcctggggcctcgcggaccgcagacaagctcaccaccacctccaatttctcttccacagggcactagtgcggtgccaacactcctctacctatcgtcgtcctctccagcctccctgctgcctactcgtccttcttgctcctcccaagggctctccaactactgtagcgtccctttctaccgatgaggtctgtcggtgaaatgggcccaggggtacacacagtaaagggaaatatctttcccatctagtcgcgtggccacgcggcctcgtttccccccgcccctcgggtagcgaggtggctagggggcctcggggtgcggtggccagggggcctcggggtgccacgccacacccctcgggctttcggggcgtgctaccccggggccctcgcccggccaccacatggtggggagaggaggcgaggcgaaagacgatgctccgcgcctttaatgcgcggcgccccaaccgtcccgcaccgcattcaatgcggcgtggggggacgtgcggcgccgctcgattgacccatgtcaatcgagcatgaccggcttgtgactggtcacaggcgacgggacggggggcagtgcccccatgttctgctctgtgtcaggcggagtgggggcatgtgtgccctgtcccgtcggcacgctgctaggggcgccccacgcgcgtgatgaaccgccgaagtcttcatgcaattaatagggaatgacagggatg

SEQ ID NO: 34072 - DNA, 970 bp, Oryza sativa
atttgatttctctggtgtgatgtcgttcatttggctataatgctatatcatctaaaatttattcattcaccagctaaatgctcgtaatattgtttcaaacaaatgattgtgagtttttttttcattgaacacacccttcatttatatataacttgtcatttaagttacatgaagcacttgacaacttttacattactctggtcataaaattacttttatactgcatatatatgcgacaatttcattatcgtaaagcttcgaattataaatttgtattttagaggcggaataagatatgtagaaagactgttttgtaatactaaagaacttcaggaatgtgttgataaaaggatctactgtagagttggtgtggtggctgattcactgccaccaccattgacttataaaatttctttattcccttatgcacagagaagtgaaaggagtaaatgaaagatcttgcctttttttcgcacaatactgagaaatgttcaagtcaatttctatcccggttttggaagataagaaatacatgaaaatatgaaatcacaaatggcgtattgtaacttacaaatataaatgcgagtttgatccaagaattctacatgattatatataacttccgaaggcaattgtaccaccagaggcctactgatcacctcttgcccagtaatccagctattgaattgtcttttgactcgagtcatgctgtagttgctttaaagtgtcaaatctgttgttgcatcacttggagccaacaaaatatgtgttgcttgccctgccttgctctgattgcattatctgcctgagccatgtgtttttatgtatatgtttttctacttctaggaggttgctatcttgatagctgtgtctagttaacacagtaattgatgccttggtagcttaaattgctacttgtcatgttgctcgtcactcctcaaaagcaccatccagaatgctgctagttata

SEQ ID NO: 34073 - DNA, 933 bp, Oryza sativa
aactatgtgtctaattttttctagaattttatgtgacatttgttaattgatgtgtatggaaaatttgtgtgcatagtatatattcctggtaagtcctatctacatttatcattgtcatcattcttgaggctcttgaaaccatccatttggccttgtttctttctccatgtcttatcttatgtttgcactgaactctcaaggtttaaggtcatacctacaacaaacccagtgaacatggagtgtggagagctaacaagccgggttggttgtggtcacatggactcgtcggctcaacgagtaaccgaaccataaatgcatgcaggagctaagctaggcccagccacccagaaattacgccggtcgaatgtggtcacatccacagctccagacctgaaccgccgatggaaaactctgaaaactgaagcgaatagatgaacatgctgaaaaatcccagcatcaggcatcagcttcgtgcctcgagcccgtcccgatcccgaccggagtactacgagctaccactacctcctccgttgactccggcggccatggccatggctgcaagcacgatggtacaagtgtgtactggtagtagaagtagtaccaatgtacgagcacagtacattcttggcaagtgagcagtacagtggtagtaatgatggctttgctgctgctgctgctgtgctgatgatgatgatgacaagatcatcgtggcctgtagcagcgtagcgtgtcgcagtttgaggagaggagaaaagaaatggtgaatttgtgatgaactgatgatgcatgcagagtaaaactagagcgaatttgcaatttggggtcagattgattgattgggtgatggtggtgatttggtattccatattcacagcggcaaatctcctacaacaagaagtggatcaaaactaatgaaaagaagaaaccaaagag

SEQ ID NO: 34074 - DNA, 4430 bp, Oryza sativa
tcccatatacacggagagcttgagatctcaccctgagcccccggccgaaccggcaaaggggggcccgtgcggtctcccggtgaggagcaccgtgctccgtcaaagtggactcctaaatgtgcgcacgtatccgttgccacgtcttgccatcccacaatccaggacacgacgagcacgacaccagctccgcgcgaactcagcgcgtgtcaagccttactgcacatgatccgaaaacaaagccaaattgtgtttgactaagcaaagtagaaagaaccgaaagcagggaaaactaaaacaaacaaaacagctagatttattcaacaaatccgaacaaatccaaccaaatccgcagatgctcaacccgatcgcgctcagcatcgacgacgacgcggcgccaccggcctccggcttccgccgcgccaccccgccccgccggacgtcctcgcccggacaagctctgacaggtccccggcgttgtcgccgccgttcgcaaggctcgtttgctgcctcgagcaggacgcgtgcatcgacttaggcggcggcatcaggtcgcgcggcgcctcggacgccgcgctcggcccgccacactcctccgccattgccgtgtcgtccttgcaaggcttgccttcaccgtcgccgtcgccatcggcgcccgggccagcagccgcagccgatgccgccgccgcgacgggcgcctcgtagaagaggtccgagaagatgtccttctccagcgagttggcgagcacgaacgggaaccacagggcacaggccggcctcatcttcgtgcaccgccgccgccaacccttgcgccggcgaggacgacgaaggtggtggtgctatccccggccacctgggagcgggaggacgggaaggagcgagggggataaggacgggaacaagacggcgtgagagaggaggacggaagaactaactggagtggcatggttctaattttagaaatttcgagtggcatgtaaccgatatgacgaatagtagtggcattttttcaatttggcaaagttgcagtggcatggatccaattaaccctaaatcaaaacaccatacagagaatttaatgctagaagtctaaaaatttgcttcgttacacatgcacaaggcgagcggtggacccgtcctgcccttgtgcatcgtcaagaccctatactatatgattttcatttctgatgtattttcacggatgcatcatgcatgcgtattctataacaatcacgcaacatcacaggcttgggatcaattggatgtacgccttccgagcaaaaaaaagattttgtagctgtgcatatttttcttggttgtttctcccactgctacagaaaaggttgtgatcaaatgttcatggcctcgcggtacaattggctatgttaaacaggaaatcagtcttaagtttggagcaattcgggttcttcagttagcatgggtcttgtccactggccggcttacaacgcacaaatggacttaattttcctcttgttcttgaatacagattcctggtgcgtcccattctcagtatgtacgtaccaagtcatcaccatttccgccttccataatccctcaaaattgctcatgattgatacccctttaattcgcacacacaacacaatcagataggtgtgaatgcttagctagccccggttttaagagttgaatcagctacaacatatgtaaacattaaagtcatttgtacatttaaaggttatgttaaggaggagagattgggaacctctctcccgtgtacgaaaaacgggtttgtattagcacatgattaattaagtattataaaaaacttaaaaaatggcttaatacgattttttttgttgcaactttcttatagaaattattttgcaaagaaatgcatgtttagtacttcaagaagcatgcgcgctggtaacgagggagtggaggttggaagccttcacttgcaagcacatcataagtacacttaggtacacaccagctagctagcatgtgatttactcccaagaaactagttgttaattagcataggggtaagaacagtccacaaaaaagggtgcaccctctataggtaccatcattagtttcgctatattaatgccggttccaaaaccatcatctacgaggagtttggaatcaacatcaataaggccagtcacaatgggggtttcactggtgtgtcatgcacatttaataggggtaagactgaataaaaaatgattatttgcatgaaatggggatgagagagaaggaaagagtttcatcctggtgaaactcgtcagcgtcgtttccaagtcctcggtaacagagtgaaacccccgttgaggccgattcgtttcattcaccggatctcttgcgtccgcctccgccgtgcgacctccgcattctcccgcgccgcgccggattttgggtacaaatgatcccagcaacttgtatcaattaaatgctttgcttagtcttggaaacgtcaaagtgaaacccctccactgtggggattgtttcataaaagatttcatttgagagaagatggtataatattttgggtagccgtgcaatgacactagccattgtgactggcctaagagtgtttctctgatagtaaaccacaccatgagaaaccactactccgtaatcagtagactagtaaagcacactgtcgatccgaactttgatgccattggaaacatcaaacactcattaatgtcttgtatcccttacgcactaaaattctcggtacatatcgttcctagtgcacctcaatgcctcatttgtttctgattaagatatagattttatcttggtttccgttagtacactttcaaactactaaacggtgtatttcgtgcaaaaaaaaacattctatatagaagttgttctaaaatattagacaaatccatttttcaagtttaaaataattaagactcaattaatcatgtcctaatggctttctcttttgcgtgcccatacttaatctttatcttcatcacttatggcaccacctcgaacttgccatgtctgttagtagttcgtatatatctctttggtttcgagacggaacatgggttgctcttcctcttacaaaagtcaaatacatgcacaagaattccatcatgtagactagaaagttgtctcactttatatgttgagcaaatgagtaatgtcatatatactcacaaagctattaactagtggagtcaagcaacggcttatttgcactccacatgttcatggaggcgacgatcgatcagactcgacttgagtagttgggcctgaggttgatcagttgttccacagttcgagtttagccatggaacacaacttatgctcttggcatcgtgcactaggctatagcccgacgtaacatcatccatgtgggttgttataatcccttccacgacattgtggtcaaatgatgaaggaccggtgctatggaaataggctgctaccgatggcattgttgccgatctccattagcaaactaacaagttccgtgtatgcatcccgcttgtatatataagcttgacgtcgtcatggtattgtccacgacaatgcccatctttccgtggatgtgtggaaatttcaataggtggcggtgtgaagaaaaattctatgacaactagattgtgagaaccaaatcatttttttaattaacaaattgggaaccaaactgtgtttgctaccagcttcttcttttttaaataatggaaatggtttacgtcttcggcctctatcagcaggcacatggtcaataaaatttagtattgagaaagaaaaataaaatcaatagaaagaaaaataaaatcaatatagagtgatggaatacgtccccaatctctgtaaaaagataaccgctgaattaaaagctaagaatgcataggcgtgggaatccaaagctcgggtgaaacagattggacctggagagaataatgttggggctaggtgattgtctgattatgcattatgatactgctgaaaaacagcaaggatagccaaacccacatccaaaataaaagcaaatttagacaagaggtcagagacccggcttttgattgtaagccgcaaaaattaaaagcaaatagctgtcttttgttctgaaactgtggagattatggataccccatatctacacagcgattatatttagactggatataggataccgaatatagatagaatatctttatttgtatctcgggtttgtttcttaacttgtacgtcaaggaaataccctgaggcttagtcggttacgattgtattttatctgtactctcgtattctgataaggatatgagttataccttgtaatacggactccttcccctatataaggaggggtccgagtcgttcctgggacatcaactttcttggagattatacatccaataatacactcggcggattcatccccggacaggagtagggtattacttcttgaa

SEQ ID NO: 34075 - DNA, 1287 bp, Oryza sativa
gctgcgatggagtggactggcactggacgggggtgatcaatggagggggagggtggatcgggttgggggcttttgtttgggaggggtgaggcggaaatgatggctcaacggtggaggatgaaaggtgtggtctacacatgcaaagcgtggaatcgattcgatgggttgatgattggaattgggttttcttcgaggagattatgcctttcatgataattatttctaatatctgttttattagaatataagcttttttttaaggtgtagctatatttatggcgccgtatttttcaccaaaaaatagtcggcgtttatttatattgtaagtctctaaattacgtatataattttagtgtatttataatgtaaatatcaaaattacatatgtaaatcctaaaattacatatgtaaattcaaaaattacatactaattatatatataagttaggtgtaagcgggtgtaagtgaggtgtaattactgtgtaagtagctaaaaaaatcgactatagcatgtgtcgacataattttagctaatccgtttttaggttgtttagcaaatattaaggtttaagccaatttaccctatttagtcaattgcgtctacagtaaataaatttggtaggtgggtgcgatctagttcaaaaacttgaaaaatgagtatataggtacaacaacttggctagtgcatgcattttggttaaaagatcaatattccacaccatactttttatacaatataaaaaaagcagctaataatgccatctcgacaaggatctacatgtattatgtattgctttcaatttgttagttataataataaaataatctatcgatttgaaaccgaaagatatatgattatcaaaattaagtgcatgcaaatagcataatttccgagcgatttgattaatcaacatattcattatcttgggttatgaacatggcaaaacacgaaattgatccaatgatctactagcagttaagcttataataccaggattaatccaaggtgtgtatcaatatttttgactaaaatgcacgtggttgtcaagtttatatacaattctactcatttttcaagttcttacactaaatcgcacgcatctacaccaagttcttgtaccgtgggtgcaatttactccattctctttgtcaccttggtagcctaattttgaaatttaaaatactaacattcccctttcaaacgcctgataactgaaaatgaatgaatttctggatattcaaatgttttgaaatacttgaactgtggaaagaaattggaaagatgct

SEQ ID NO: 34076 - DNA, 1743 bp, Oryza sativa
atgtctggatttataataaattatatcaaattttgaaataataatttttcgatattatgtcaaattgtcatatttgtaaaagttaaattgctagatgcagctacaaaataggggcaaatacataactaataaataaattaggggaaattgagagtatgaatgtcttttcgccaaaaatttaatattgttaacatgtctatttaaaataggggcaaaacttagttttgtttgaaaaaacaggagtgaaccgatataaaaataggggtaagaacgagatttccccttatagtaaacatgtaacatattacactcatctatgtatggcgtgaatatattatacaaatagcaccggtctataccactgtttatgttttttttataaaactaataactgattttagattgtatcaatgacgtgggtttagacagtgatcgatatggttttgtagagtattttccatacccaaccttaggctggcctgaattcgagagcgagccttgcctactaacacggaaaaccaaacaaagaattagtacataattaattttaattaagtattagttaaataaaaactttaaaataaattaatattgtttttttaaagcaacttttctagagaaaattttcgcaaaaaatggtaccgtctactgatagttttggaggcttgtacacgaaaaacaagatatgggagactgggaaagttgagagaagaaccgctccttgcccccgtgaaagagaagccatcctgtacaaccaccatcacaccttcacaaaaggctcactattcattagtcaactaatatttctggaactatctatctatatattggtgatttctaaaaaaaaacatacagattttttctacccttagatttacacccaaggtactataaaagaaaataacaaaaacatatttacttgcatattatttttatcaaaattactatgaacttacatatcatatcagctgaatttacaaatgttattttaatgttttcctttacaggttaaagtccaaattacctccggactattacgacagtttgaattactcccctaaactacaaaacagaacatttaacactcaacttttttggactggatgaataacccccagtacaaatttggttttgatcttacgtggcatagaacgtgacaatataatccaatttttaatcctaggtggcagtgagccagtgaggcccacccatcatcttgtccgccacctcatgacgcctgtcacctcctctaggtcatgttgggtgtgtatgagatagagagatagagagagagagagatggatatgggaggtgaaagaaaggagaagattggaagtaggttgtcaacaagccgagctcaagtgagctttcacgtctaggctcgagctcgacaaaagctggagccgagcccgaattgagcctaatcctccttcgagcttttaagcaggctcgcgagctcgaccaagtataggataatatataatttgatgataaaattttgtaaaaataaaaatttaattaataatattgaagaaaaatattaggtgtcacaccctgagaattcaaaatatgtaaattattgtttaaatggaatttttagaatttatttttaaaagcctagaaaagaagatctaattttaattaataaattccaatataaaatggggccagataaaaattcattaaatacttggttaattctataatcctagatttttctgggatttatttgagctaaggaag

SEQ ID NO: 34077 - DNA, 1397 bp, Oryza sativa
gaggagagagagaaggtggggggagattcaaaatcgaatcccgcccctctcgtgcgctggcgcggccgggagacgcggggagagggcggcgacgtggcgtgggcgcggcgacgtggcgtgggcgcggggaaagcggaggaagtgggtgcggcggcagcggtttcggcgggacggcgcgagcgggagaggcgggaggtgggagacgggtccgacaggtgggccccacctgtcggcgaccccgggagggagggaggcgggcggccggctgggcctcggctgcggccggcccagcagggaggagggggaggaaaggaggagatgggccggcggcccatccgaaagaaaggaggaaaaagagaaaaaaaagaaaaagaaaaagaaaaaggattttttttcctggaattaaaattgcactttggtgatttttaattggttaaaattatttctagggctctgaaaattccactaaaaatcctgttagtgagtttcgacatgtagaactcaagaaaaattccacatgccaaatccgattattatttgcattgattaaatagggattcatctctaggttaaattaaacaatttcttcggacgatttattttatgaatttagagcaagggaggggtacttcagggcgtgacacctgtgcacttgcatatttgctgcgtggcttgctgagtatgtcatatactcaccttgcaatcattcatcagaggaagagttctacagtgaagctgatggtgtggaggattaggtgtagccctggtcaagctgcctgtggagtggagccgtctgcgccgtttatcttattttccgctgcttagatatttattgattgagaggaactatctacctctgtaatgacattttattcgcttattaattagagtaataattgtactctattatcaatttgttattgtgtgcctcggctgattcctggacgagggttcacacacatgtaagcgtttggaattttggatagaaattccgggcgtgacaagttggtatcagagcccccttgaccctaggttatgccaaatggttacccatagaagccttctaaaaatattggaaaagtagaactgttctcctccctttctcttttaattgaaccaaactaatggcacatgcacttcataatctcttttaatggttctcattcaaaaatttattccagtgttattagtaccgtacatctattactgtactaatggctcattttatcagcaaaagttttacaatattgttttatttaatcttgctgcaataaaataaatttagcatgttgattttataagtttctttcatttcttttgaaaccagttataaaaaaatacaaaatttgtaacctggtttccaactgtttcaacttatctcgcaaagcttggtttac

SEQ ID NO: 34078 - DNA, 541 bp, Oryza sativa
aataataaaaggggggtggctatcaagctagaaaagtgtatgggtttggagacaaaggatttatacaggttcaggccttcttataaaagaagtaataccctactcctgtccggggatgaatccgccgagtgtattattgattgtatgatttgggaaaaatcagcatatgcccctagaggcgcccggaccccctttatatatgggaaggagtccggattacaaaagataatctatattcctaacggaatatgaagatagaggtaaaatacagtcgtaaccgactaagtctcagggtgtttccttgatacacaagttaagaaacaaacccgagatacagataagatattctatctacattaagtatccggtacccaatccaaataccgtcgccgtgtagatatgggatacccataatctccacagtagcccccgagtcctttgcagtcgaccatcatagccttctcaaagatagtaatccaagtgcttcaagcttttcatgccaaggcctgccgagtggactgtaaagggcgaaaagataaaa

SEQ ID NO: 34079 - DNA, 520 bp, Oryza sativa
cacatgtgtgtgtgtgtgtatatatatatatatatatatagacacacacacggtagcgctacctagcgctactcacagccgctgcgcgccaggaagaaacgtgacgcgactcacggtgggaaaatcccaccatcgagcaaacaacccagtgtgaagttaataattaacttatgtacatttggaggtgggttatgattccgttcgcgaagagctaaatttttacttatttttagttaatgttagataagagttttacttttaaaaggatggtatggtgatggagttaatatttgacttatacacggcttgtgacgtggatttggtgtataggttattgagttacaaaaataaccttgctgattcgtaccctgcatgattcgatggatgtttttttaactataatattaataaggggcttcgctaatttgtgtgataatggcgtagccacgaatcttcgggattgtacgtacgtacaagctaactaatccgctcagcacaaatatcttcgattactccctgg

SEQ ID NO: 34080 - DNA, 569 bp, Oryza sativa
taatagatggaggtttatttgtgttttttttcatatatataattttcatttcagttgataaggagatagaaaatagagagaagaatgacgcacgctgtacacggcaaggaggaatggaggtttgggattttttttctaaataattaatctaacaaactaaaataatgtgtcagatatttaagtcgaagctgatggtcgaatgttttgttttcttgttagaatttttaggattttctcttatttaagagaacaacgtaatatcttaagagtatattttttccgatttaagagtatattttttccgatttaagagaatgacataatattttaggagcttttataagatgtgtactttttattgtgttacaatgtttgggggggctgttttttaatattactcaaagatatgttcattttacttttattagatataatttaattatcaccaagttatatacgatgataaaatatatatcattatattttatattttataattacttaaatggcacacaaaagttagaaaatatagccccaattaatatgacatatttctctttgaagttgaa

SEQ ID NO: 34081 - DNA, 789 bp, Oryza sativa
  unsure (1)..(789): unsure at all n locations
agagtggagtgagctgcatcgtattcctgcagccctttgctaggaccatctgaaactctgaacgaccccaacccaacccaacactacccaaaccaaagccagtggatggatgtcgttttcagccaagctaacgatgatgcaaagtacttattcgatcagtataaccaacgcccaacancgcctagagaatcggatccatgtagggtactacccagccaggagacacttttctcgctgccatcagatgcatccaaagttgtagcctagaggtggtattgcaaggataacaaagttaattacatgttcacctaaaaaatgttaatttggacctaatacaaccagatatatagttaatggtacaagctagtactgaagtacacaaagaggttggtcaggcatatgcaacattcgcaaaatgtttcagaaaattcagagaatgttttcagcgtcgcaatgacgccaaatgtaatggaacaacagaagcgttaacgaactgcatccgtgcaatacgcttgggggacagggattagtggcgactgaatattcgccttcacatgctgtgcttgatgatagacactttatgtttttacctgggtttatagtacactcactctgatcacaaacagggcaaaatgttcagagctatgctcccttgaaagtgcaggtttcacatcaaagaacacatgtgatgtgatggaaggcttgtacatgtattggaggtgcaatgagtgaactcagctacgagtgaaagttcacattcagattgatgccttccatgctgtaattgat

SEQ ID NO: 34082 - DNA, 649 bp, Oryza sativa
ccctcagattatatatctgtcctgcaatgtcagcccaagaactgatgagaaaatttcagtcaagttcagaattcagtggtagtgcttgtgccttgcatcgctctcagattcacgtaggagatgtgaaaccgtttatcaatttgtacaggcgaagtgtatgtcatgtaagcgatcactcaacctgattgatccttgtctgtcgagaagcaacaaaaacaatgtcacggatgaaagcaagatcgaaaatggcagagtctcagacacaatcacctctcctgaaattcagactcaagacttcccttatccttagcaacttctaacatctgctctctcatcgttcggacgcacgctttccaaactattaagatgtttttttaaaaaaaatattttacaaattactttaaatatatattaatatattttaaaatatattttagttaatgtttaattaatcatatactaatgaattactctattttgcgtgcgggttcaaatcaggtagtagctcatacctagaaaccacacaatttcattgaaacgcagttcatcatggttaactgaaacagtataatctgtaacctgatctgaacctttaatgagagtattttacatgctagtatagtagtagcgtatggatttgcggttgctc

SEQ ID NO: 34083 - DNA, 565 bp, Oryza sativa
ctatccaaaaagaaaagaaaaggaagaaaagtgcggctcacaagtaggacctacataattttttattttttattttgcttactagaatgtcatgtcagcgaaaccagatatccatactgttgtagcatccagattgcacggttttagtacagtttaggggttaagatttctggtattggggataagggatgtcaaaccaactcggtgtaaagttgagggacaacaggtgaacttattcttgcgcattttcggctatcacatgtgggccgtgtgtagctttgggctccgtatttagacgggagtttcactcgacgatgctccctggggcgcgagaatgctaaagcgtaaccgatcagtgaaatttccactttaatcccacaagctttttcgttttcggcacggaatttttattgttggattttgtgcaatggaaataagttcactttcagctcctcatttttgccactgagtctgaaatttgtccctcactgcatgtaacgcttcgcttttcgtgaggcgttaaaaactaattcggcaaaattctaatttcaaaaattttgttctt

SEQ ID NO: 34084 - DNA, 625 bp, Oryza sativa
ccagagacttactccaaaacaaaagttacaattggagggggatacaggaatatttattaccagggagtgcctttacagcacgttgaaatattttaattgcagaatccacagaaccattcttggcatgccacatggcataatcataccatatatcaggatgatggtatagatacatcaaacactgaaaataaaaacaaagcaaccaaacagtttcatctccaaaacatagtggcacttacacggaatatcataaacttagtacacaatcacaaaggataggagtgtgcaactagaattataaataatattgtgcaaagcatagttacaaagccaaaaatcactgtggatctaagcatacaggaagaaaatggcttacttgttcaaatgtaaaggtaacacgcctattagcagttgtagcatcaatcctctgagggttccccctgcaatggaacatattttgaatttgaagggatagtttcggtctttctgagctataggcaagttagaaattaagcaggaaacaagaattcctagggcctgaaggtggtgaaaaactcatatgcttaattgcaccaggtagtgcccagtgaggctcaagttattgaataaattcaagaagcataca

SEQ ID NO: 34085 - DNA, 836 bp, Oryza sativa
tcagaaactattttagtttcagttttcttcttctttttctggttacagatcaagtctaataactgttcctacttttggtcaggggttgtagctttcatgtattcatacagtagctgtactagtatactcctactgatgagaaaggcacacaatgcaagcacggtggtttgtttttttgttttgtttcttccctgcgtttttttttactggccaagaaatgaagaaacgaacagagaggcaaaggcaggcatgcaggtagaggcagaggctgccatgacaagacgcaacggacgcatgcaggatgcagatgcagatgcatgtccacaccaccatttccagaatctctcctctgattgattgatctcccgccacctttgcccccattcaatcagtttttttgccccccccccccccccaatcggatgccctaatcagccacaaaaagagttaaaagttaaattttaaacttaattttaagattgatttaaagatattttcaacgtaatttctttttagcattgacttttaaatcaccaagaacataaatataaaagttttacctataaatttatttttatttactattaagccgttttgatatattagaggatatgagcaaacgatgagactctttctttatttctctctcaaaagaaaaaggcttatttattattcccctcacttttaaaacgtaaagatttttaggattcaaattttatattaaatgtaagcattccaaaactgattctcatgattacaatcattttaatgattccaaagccaatcagatgattgaaagtgaaattgcaacaattcaaaatttaaaaattgataac

SEQ ID NO: 34086 - DNA, 609 bp, Oryza sativa
ctacaatgtgttggtgcacatgaatctgaacacttaaatttccccctgtttctccaacaaatggcaatataaagttccaaacaaatgcgtgatccaacactagttgaaaatgaaaggagaaacaacatggacaactaattacttataaaaaagcactaaatcacgccccgttttaaaaaaacttgaatctgtcaattaaaccgttgaaataaaattaattgtctccgttaaaaattccatagaatccaggtaaaattcagacgtacaaaagagtgccatcattagtacgtgtgagctcacaggagcatgtccctatcatattaccgtgtgacggattatgacagaagacacgagggcatgggcagcgcgaaggctgtccgttgtcctgcgatcccaatcttccttctcatttttgttatgacaataatgatgtagggtagggaaagagatagggataggagagatgttatatatctcaaaaattagtctttgactcctgccatgagttctaaaaagaaaatcccatgacggattggtgagcaatcagcctcactgcccgatgcatgcattcatccagtccaagatcacagagagacagtgccatgctct

SEQ ID NO: 34087 - DNA, 1663 bp, Oryza sativa
tgtataaagtattatttatgttttatcattaacaacaataaaaatactaatcataaaaaaaattcatataagacggacagtcaaacatagaacacggaaacccaggaattgagtcttttttttggacggagggagtatgtcactattactagcttgtagtaaccgtagcccgtgcaactacaacaaaaggacagtcgaataggacctatatacgattcatacacaaagtattgtctccattttaaaatataagacacaaccacccttaactcaaagaccaagaaataattattatcacatcatagtttggattaccgtaataaatagaatgcatgcacccaacaaaattagagatcttgataatgggggatttaaataataatattttagtgaaaaagatgtgttagttaatggcatgtatgcatgcacgcttatattatgaaacaactttaaaaagtaattgtgccttatattttggaatggagggagtagtataaaaggtagtgggtgggggaataaaatagtactccctccattccaaattgatctacatatagttttttgaggttattcctaaatgatctacatatttgtgtttattattaagtatattcgttatttgtgtattggagtaaatgggcattgatgcatgcatccatgcacacaagtatttataacccacatgcactatcttgatttgctattggctagaaaatattagggatgatgcatgcatcgagtttgttgctagaataaatatagtatgagagagttattagcttttcttggtcttggtgtgcctataaaatatgtagatcaatttagaatggagggagtataaaagttggtaggtagagaataaagtaccgtctcagtattccaaaacaccttataattcatgataaatttagaagaactcccttatattatgggatggaggatgtatttgccaccacgatgactatacatgaatagtgtttgcttatgtcacctattggcatccttcaatatccaactgtatccgacacatttttgtccctattgatccgattcatcaccgagctagctagagtggttgcatgcttatttatgccaattctattctacacccttctagttcgagaatacacgtatttatgacactagacatgaatatcaaattaagcattaaggttgtagtccacatataggactatacaatgaatagagatgtattgcgtagctgaaaattaagtagcctagtctgagaggcttggccaattgctagttccacccttgcttaattccaaacaaatttgcaggagatataccatatatatagctgctacaactaaattttccctctttacttaggtgtatatgcaaatgcatgtgcaaatgcacagtagtaaatcgagtcatcggcatcccatttgatcacgtacgacatcaatctgataggtcatgcctaccgtactatcagaaggctagcgaccagatcgatcggtctgctgatatctaccccctccgtctcttatattgattttgacattttgcttctgatgtatgaccactcatcttattcaaagaaaatttgtataaatataaaaagaagtactttagataataaagtaagtcacaaataaaataaataataattttaatttttttaaataagacgaat

SEQ ID NO: 34088 - DNA, 653 bp, Oryza sativa
caatgctagagagtcttatgatatgaaacggaggaagtatttatctggttagatacaaatcatgcttgcctgatgacttgcatttccaacatgtggttcattgaaccttaagcatccagtcatcatgtaaccacgggaagttggaaaaataaaaggattggcaacaacaggagagcatggctaaaaggcagtatctacttccagtcaaggctgactgcttaacctttctcccctttttctcatcctatgttcacacttcccacttcccagtagttagtagtatttaatcacctggctgaagattgtagtgtacctgcaaacaatttgtttgggtgtccttgtccctgatttattgggggaatggatccatcataacttagtttattgattaggtggttatggctgcatcgctttatgtctcatctattgtagtttaagcgcatagtgggcatgaattatgttgccttttgtttattgtccattattatcacgatcgattaatgttgagtgggaacctaaataatccatgattaagtgccactcagagcagcctctagtgctgtcgggcatgactttatggtagtgtgattgatctaagcctgtcttgcccaatcaaactactattacagcctgacacgattgctggtactggt

SEQ ID NO: 34089 - DNA, 572 bp, Oryza sativa
ccgccaccgccggcgatctctcccacaaaccctagcaagaggaaaatcgaggacgctcgctagcgtcctcgattttgcaagtgggggccacatcgctgccgagtggggcccacggcatggcgttcgtttcactgacaggtgggtcctgggtcctgggtcgcttcttcttccgaactccggaaggggaagggccacgtgtcgattttgcaaggcactagcgcccaactgcagaccgtagtattggagtacatctgtgatctgtacatacaagcatttcttatctttgaaaaaacaaacattttataaagcctctttgtacggaaaaattttagacgaatttcgtaaaatttgaagaaactataaagttatttgcatgaccgaacaaattgtccaggaacttgcaatgcaatgcctaacagaacatacaagcattggatgctaagttaaatccatgtatgatatttcttcgatttgcattatttccttcaatttatcttccttctaaattctccatcaatgtatgacatttttaaagaataatgtattgtatgatatttctgcgttgtcaggct

SEQ ID NO: 34090 - DNA, 681 bp, Oryza sativa
ttcagaggtagctacagtgcccagctttagatgtactgtgaaggtccgatagaagatggacggatcagatgagatgctacagtaaatctgctacaccactaaccagcggtgctacagtacattcatccctgtagctacagtaatcgcgactgtgctgtgcattagaatactgtttcccctcacatattactgtggctacagtgaccctctgcgtaatgcagaggatccgaatccacgagagtggctgattatttgtaaagagaggcgcggagacatccttaatttaattttgtatcctatttttgccagatatactccatatctttcctaaggtgtgttcaagagaaaacaaaaatagatattaattaagaagatacataaaatgagataaataattatcatatgattaattaaacactaaattaatacgattttaaaagcaacttttttatatatgttttttttaaaaaaacgtatcgtttaatagttcggaaagcatatgcgtgaaaaacaaaaaaaaaaccttttcttcccattgtgcttgaatcaagtgtaacctaaggctctacactacctctaacaaattaatctcaataattttattttacctggttaatccacttttctttctatcatttttcttaaagtttgcatcaagattatcccttacatgacgggtga

SEQ ID NO: 34091 - DNA, 757 bp, Oryza sativa
ttgttgccaatttttatttctttacactgtgctggtacaatggccgtgcatggatgagccatcatctgcattattttttttgctgctgctgtagcacaaaactgtgctaggaattttcttgagaagatgcatggtgaaatggaatctactcccaccaatctggctgccacccagcccagatcacagtacaatgtttgtaaaaaaatctccaattctccactgctcaacaagccagatgcatgagagtcgtcgtccgatcgcaatccaacggcttagtagtaaaaccatgtaaaattttatatcctctcatcgtctacatgttaacttactgagcttagccaaaatttgaatttaaaaggttatattttaagttgattttaagattttttttcttcttaatctattttctagtatcgtctttcaaaatcgctaataacactaatatagaagtttgaacataaattatttttgtctgattcattcatagtagtcaatgaagactgagacttaattgattgtattaaaataatactacatttcacatgaaaactcctccctccattctaaaatacaacgatttataggttgtttagcaaatactaaatttaggtccaaatattcccttttaatcacttcggttatcaatttttaaattttgaattgtttgaatttcactttcaatcatctgattggctttggaatcattaaaatgattgtaatcatgagaatcagttttggaatgcttacatttaatata

SEQ ID NO: 34092 - DNA, 517 bp, Oryza sativa
catcgactccaccatccgcgtgtacgtcgtcagctgctcctctacgggtaccggaatccccgcgcctaaacgttggatcgtcgttgaaccatcaacgacgacccggttgatgtcgtcgacctgcatggttaatttgttcgtaaatattcgtaaaatttgacgaagagaaagacatgaaaacataaaggaatggtgcgatgcagggtactcacagcacgagcgaagtcctggtcacggtgcctggcatagaggtctctagtgctcgcaacgtggggctgctactccaagggagcgaaggtgaccctagtacgggtgcgtggctggtaccagcgtaggtaggcctggtacgactcctcagtgtgtggctctccctcgtggtccacgacctcctcggttgcgagcaaccagtcctcaacaaaagtcgccaacttggcgggccagtcgccagctaactgctgactcttgcgcgagtacctgcgaattaatgtgtaatattagtgtgaaacgacagatgtta

SEQ ID NO: 34093 - DNA, 1060 bp, Oryza sativa
gcatatgagtttttcaccagctttcaggccctaggaattcttgtttcatgcttaatttctaacttgcctatagctcagaaagaccgaaactatcccatcaaattcaaaatatgttccattgcagggggaaccctcagaggattgatgctacaactgctaataggcgtgttacctttacatttgaacaagtaagccattttcttcctgtatgcttagatccacagtgatttttggctttgtaactatgctttgcacaatattatttataattctagttgcacactcctatcctttgtgattgtgtactaagtttatgatattccgtgtaagtgccactatgttttggagatgaaactgtttggttgctttgtttttattttcagtgtttgatgtatctataccatcatcctgatatatggtatgattatgccatgtggcatgccaagaatggttctgtggattctgcaattaaaatatttcaacgtgctgtaaaggcactccctggtaataaatattcctgtatccccctccaattgtaacttttgttttggagtaagtctctggcaatatggttgccataagcccataggagtcaacattttatgcctagcatgtaaccttgtctcttttttcccctcatatttgctagtcactcgatgtatgagtatgtgacacaattatcctatgtaaatttcaatcatattgagcatgcaccaatattcaatggtaataaaatgataaggttgttagtagggggtgttgattgcataaaaatgaatcggacggttttgtacaaatcaaataatctgagtatggttttcagataaaatggaaaatcaagacatttagatttttttttcatcacatactctggatatgaatgcaagatgaacgtacaatccagataaaaattgacattttagtattctacatgctaggccttgttgcacttgtttgtgaaatctacaatagcattttctaatctggacttcaacttaattcttccacattttttcttcatagattcaggagtactaaagtatgcctttgctgaactgga

SEQ ID NO: 34094 - DNA, 624 bp, Oryza sativa
gactaaagattggtcatctttgcctcaaaagtggcgcatctttgcttcaccatttttgcattggatacattttgtgatagtgacatgtggtcatatttttattcgttataactcctagtataatttattgagcactaagggcatcagagtcgagaaaaccaccactgacaggcatatatgttaccagcctggccactccagagttttctgaagagcagacggattttactaactagagctcacatttgactattaagttagtaagagtaggttttaagctgattaatgtgattccaacagaacagtgtgcttttgtatttgctctttcaaggccagaaatatccatcaaatttgagagagataagggcatttccgcatatgccgcattcacgttctggatagtttctgcaaaaaactgtgtgttttcagtcaagttctttctgagttccacacttccactatagggatgtggacttgtcgcatagatactcagatagtgaccatctatgaaaggacatcatttcagaattcagagctctgccagaaaaacgtggaacttgttattttcattgagtttagcaatgaaatttatagaatccatgaaagggatccctcttggatggt

SEQ ID NO: 34095 - DNA, 694 bp, Oryza sativa
attcctgcagcccaggcattatatggttagtggaccaggagaggttgtacgttgtaggtatcccgtaaccaccagcagaaatgagaatatcgggtgtgtttagttcctgaaaaaagttggaagtttgaagaaagctgagagtttggaaaaaagttagaagtttatgtgtgtaaaaaagtttttaatgtgatatgatgtgatggaaagttgagaatagagggaaaactaaacacggcaatcgtatacatatatcatagctaaccaacgcccctactcgtccttgcgatgaacagtgactatacatacaatgtgtgatctgtgatactccctctccgtcccctaatataaggaattttgatattttactcgcactgttttaccattcgtcttatttaaaaaaattaaaattattatttattttatttgtgacttactttattatctaaagtacttctttttatatttatacaaattttttttgaataagatgagtggtcatacatcagaagcaaaatgtcaaaatcaatataagagacggagggggtagatatcagcagaccgatcgatctggtcgctagccttctgatagtacggtaggcatgacctatcagattgatgtcgtacgtgatcaaatgggatgccgatgactcgatttactactgtgcatttgcacatgcatttgcatatacaccta

SEQ ID NO: 34096 - DNA, 3157 bp, Oryza sativa
gacgggcctcggatggcctccggtctccgtgccgcaccagcctccgtgcagcaggcgacgccgcactcgcctcggacgaggccgcgccctccgcgcggagctccgccgcgaccccgctgcctccgccgtctcaacacaccagcgcatgcctccgtctactccgccggtcgcacagggctcggccgcggcgccgcctccgtcggctccgcggtggagaatggcggggtggtggcgagttttcttgagggggggtgaagtcgttaagaagaggtggcgtcgtcagagttgagggcgcacggggtcggggccgcacggcatcgagcacacccaaggtgctcgtccgtgtgtctccagaaaatatggtttttaatcttatttttataaatatgactgacatgttgggtcctcatcgacacgtagacgccactgtggcatgccacatcagcggatggagcgggtcgaaacccatttggatctatatgacacccaaaacaagtttggggatctaaaaatgcattttgagagtttaggtagctagatgacacacccacacaagtttagggaccgctggtgcacttcactctaaaaaaaaatgagttcttatatgtgatggcgataactagagcgatgttaaagaaggctacccacctacaagtagtagcgtcgatctagctgagtagaaaaaaaaaccgttgcatcaattcagttttgttttactaattaaatgtaaaaatggaatcgtattgcttggaacgcatgttcacattaaaggtagctatgatcatcaaacaattgttggatccgaggaaaaataaaatctcgttatagcctaattcgattgagcagataaagagaaaattttaaaaatagaatgaagaaatcctaaacatatcaaaacacattggtatcgattaaaacatataattttagaggccggccccatattctgttgaggccttagcggcaccttgtctcacacgtgcctaaggacacatgtctgttttgtggtagattttggtgtaatttataattatagatagactcgttttccctaattaacatagtcctacttatttttgcctgcttcatgttcacaaacatcatcggatgttaaaagttatgggtttgatgaaaactttgaacatagtccacatggatagagtgtactaggcggtttgctttcttggttgtcatgtgtactcttaacactgatggggattgattagtggccactatggagtatacaatgacaccccaaccaacccctctttgaccatgtgaaaggtagaagaggtagtagtctaattattcttgcctgatagctagtctccagcaataataagcaaattagtgttttgctggctgctcatgtattttcagattagacatgactaattgcacattattgtatttttctcatgaaacatgtcgtgattttgcatacacgcctttaatttgaccacacaatatgtactatattcgtctatacatataagatttttttctgagatgcgtagtatatataccgtgttgtgtgtgtgtaaggatgaaaattcagtggcaatgaaaggcttttgatggagccatgcatccatcaaaagataaaaattcatttgctttatagcatactagatgataccctacacgttgttgtaggaatcttgataagattaacataagcaaatcgataaaatgatattagaagatattgaatatagaacattaaatcaaataaacatgaacttgaatcaaatcagcatgaactgacaattattgagaaaaacatggcatctaggaactaatgatcataatatgttggtaccatcgataattattgatccatttagcaagccttcgttagtcttttcttgtcagggaatgttaacttgacacatagttagcacaactataaaattggtggctaaacgacttctggattaaatagagagaattatggatgaactaaaggagtaaatgcaagcgatataatatatagcactaaaacaatctgagcgatcaagttgaatccaatggccaatagcaaaggtattttggagtaatctagagagctaaattttgatctaatggatgaaatttgttgaaatgatttaatacatatgagaggagagaaaaatcgctttaattgtacttagtggggatggactttttatatataggattaattttatgcttaattaatgacatgtgaagagaaaaaaagtgatgcatgcatgctcatagcgtgtcgattgtggcactattattgcgttgcattcaagagaccatacacacacaaaatgagaggcagtcatgttcaccgtcacctcttaagtcaacacatcgttgaatgttaagttcattttagttgtgccatctttatttgatgatttggacataatttatagatacatgtgaaagaaagaaagaaagaaagaaaaaatacagttgattcttggtgatacaaccatgtaggcttatgacctacaattccaaacagaacacaaccacctaggcttttagttttgcatatgttatatgtgtgtcttctccaatcgactcaatataaagttttttttcttaaaaaaaaactttctccattacaaaatactagaactttggaggttgaataacgatatcaaggagaaaataaaatgggaaataattgttgcgcgctactcaagatgagaaagtagctaggtgaagaaactgaatgaaaaatggttgtggttgcttaaaagttatatggagggagtctaaaatcatatggagttaccaagacaactatttatatgtgtcataattgaagagtcaaaagtagatggttgcacgggtcaactcccaagtcaatccataatggagtgtactttaagttgataagaaaccatacaacagttatgtcatatatatttaggttgtgtttagttcacgctaaaattagaagtttgattaaaattgaaacgatgtgacggaaaagttaaaagtttgtgtgcgtaggaaagttttgatgtgatggaaaagttggaagtttgaagaaaaagtggtttagtttccaatttttttcccaaaaacatcacatcgaatttttggcacatgcatagagcattaaatatagataaaaaaaataattgcacagtttgcatgtaaatcgcgagacgaa

SEQ ID NO: 34097 - DNA, 1836 bp, Oryza sativa
ttttaaaaacatgtcaattttgaaacgagcctttgcttatgtactcctaaaaaacatctcttttcttataataaatatgcaggaatttcacagtttctttaaaaagaacatctcaatttataaacaagcctttgcttaggtactccttgagaatttttgttctttttttggtttaaatatgcaggctaagattcaatttttcacagttctaaaaaagcatctcaatttataaacaagcctttgcttatgtactcattgagaaattctcaaaattcctgtgtgtacacccgaaagctatcaaagtcaatggtaagcttttcaatttgctatgtgctgtttagttttttcaaagaagcttcatgaaactttcgatcaaatctatccaagtgtggagcgctttaagaaagcaattttgaaattgtggtccgtatcttgtcaagaagacgtagaagcaaagttgatttgaactgaaagcaaccattctttttgtttgcatgtgtttgaattcaaccatgacaagtacatatttaaattcgaaccaaccaggggagagcaagaaactcaaacttctgagcgaatcaatcaatgtttgatttttgtaatctgatagaaacaaggcttttgtcatgagcccatcgaaattattgtttcttcttacgttttctgcaagatcatgcctaactttgacaaaatctgtccaaaaccttttgaatttcttatgcacggccatacgataagctgatttaaattgaaagccaccgtcttttgatttgtgtagggaatgattccgtgaaaaacaagttactacgtttttaaccaaactatgtttaatatttttatataagcaaggctcttatcacaacaattcaaatgttgtctctggaaagtacgctcaactttggacaaaatccatccgaactttgacatttgcattttggttttggtccataaccatatcacacaagaaaacacggggacaatgctgtccgaattgacaaaatctatatttatgtttgtgtggttccttagttaaatcatcaaaactttggacaaattctgacctctcttggaattttttaacaaaactgagaaagctctggaagttagaacagaaatggccttctttttgtttcgataatcttctattttgaattaaatcatgcagacaacagcatgattcttgcttgccctgtaaggacaagggaggtacaacacaaataattccattgaagtcttagtgcccaaaaaaaagaaatattgaaactaaaataatatcacagtctgaaactaaaatagaggataaaacaaattcaaatagtccatgggtacctgaattctttgtggttgccacgaattcggtacggtaggttaataattgttagtagacgtaccgtctgagaatattgaacatgttatacattggagtatattattccaccaagactcattttactattttcgcacaatcatcaatttaagacctcaagtttacagaaaacgactgatttaatgacacttgaaaaattccaaccatttctataggatcatggtatgctttcagcaattgctgacttttgccctaccttatcacttgagcccctataaatagaggcattatattgaacaaatgcattgcactcatctcaagcttttctctctctctctctctttgcactacattcttgaattcacaacctacaaacaatccaagaagatgtcttgctgcggaggaagctgcaactgtggctctagctgcaagtgcggcagcggctgcgggtatgattttaatgtctcattctctagtctgattcatcattttgtttgtctgaagtttca

SEQ ID NO: 34098 - DNA, 709 bp, Oryza sativa
gcggtcgcgcgagaaagaagagaagctagggtttggcgtgacggctgggggggtcggcggttttgtttgcccgatctccccgcctggccgtccgatcgaaccctagcggatcggacggctggcgacggctgggccaaaaacggcccaagaggggcgcgcgcggcggtttcccggcccaggcccacgttgcggcttggggaaaaaggggagcgcccgcgcgcgccaaaagggccgtgggccgccggcaaaagttcaaattaggtccctcgggggccgaaaatgatgaaaagagggacagtagcaaattttccttttattttgttaattttcatgcaaatttcaatagaatttgaatagatttttgcatgttttacctctgtttaaattcgaaccaacgggagaacttttacagagagtaaattacagagttttgctactgttcatatgatttttatatagattttccgctgcaaatagatgaaattgatgtttctaaaattaaatttcgaaccaacgggagaatttaattttaggaacattaattatgtgctatgatgttgtaattttctgaccaacgttgataattgcaatgttacagttatggttatatgtattatgtctagggatggcaacggggcggggcggggccgggttgggctggaacgcccccgaccccgacccccgacttcagcccccgcccccggccccg

SEQ ID NO: 34099 - DNA, 500 bp, Oryza sativa
atccttttgcagaaaaaaacgaggcttatgtgtttttacgcaattattacattttactgctgcttatgcctcgttgttagacgatttgggtaagaagaaggaaccaaaatccaactagcgaatttccttgtgtaattttacgcagggcaaatgaaaatataattagatttgatatacaaaccttatattctatttctataaatacaattgcatttttcatgtaaaactgaaaatatagttcgactttacgtacaactcttacttaatgtgcataaagttgtaacgtataaatcatatacatacagttttactttacatacaacaatatcggtcggcctatattataatttagagctaattatgatcgtatggtcattttttttcttctattactatgttgatatattcttgattaagacctgagctgtagtgtattttattttaaaagaactctagtgttatgtggatcctctgctttgagtgggtgaaccactgcacat

SEQ ID NO: 34100 - DNA, 662 bp, Oryza sativa
tcgagtatgtactcaaaaaactgcatggatcttctagtattatcaggatataacgagcagattaaatatcaggcattatgtaaaccgtaaacaagcatgatttatacagaagaaaatagagcgagcccccagcgttagaccgtagttggcctatcgtcggaagtactcgcacaacggacattgtataaaaaacatgctctaggtaaacataataaattattgatctgacaatactgcatgatctggataggtacgataaattgcatataaaatattgcgtacctgtgtagatatatgccggatatatctacggaattagtagattgattaaattaattaatctactaattaccttaactagccttagtagccattgaattgtcttcggtgcatgtatatgatggcaaaccaatgcatgcctgggcacgtattgagtctgtgcatatgcatgtgcacatgtcagaagcgatcagtacgtggcgatgtcgggcaatggtatatccggcttgttactccgagtctaaccaaaaccgcacttaaacccgatgagtgtagtagtcggtttcggtctctagaggtgtcggcgtcttgtacccttccggcatcatcctcaagatcgtcaatggtccgaaataccgtacagatgccctccgcagcggtgg

SEQ ID NO: 34101 - DNA, 1322 bp, Oryza sativa
  unsure (1)..(1322): unsure at all n locations
tcgatcgataggttcagatagcgcagtgtacttgggcaaagtgggacagaaagaaggaaaagaagtcagatcctggatgttggcacgagggagcttttcggtttcatttgacttgcagctctgctccgtgaaatatgcagtttctggtcaggcattgcggtctacgactttacggcagcatctcatggtcttaaactttgcattttctttttttctttagtacaaatcaaaacgttcatagcgtcggtcagatgtgctatatagttgccaacacgaggaagccgcatagtatttaccgaggactgaattaatcttttttcgccgggccagtagcgaagaattgcctctgcggattttattatctatgactgaattttaccctcggttgtaagttcaagccaaggaactagcaaaactcaagagaatttctgttcgatcccatcattagaagtgaaaaatatcgaaaggatcgaacagaaattcttcattagaagtaggcaaggtgtatgcaaacaaaacggtattaatcaatgtctttttctatttgatataagcttttctatacacagctgcagggttatccactgaaatttctacaccacaagatcgtttcaacaagaaaatttcaatccctatcgaaacaacaacacgttataatctacttagccggaaaaaaaatcaccggggaaaaataatatctctagtttacaagcgaaataaatctacaaattgaactgttgtatatattagcaaaaagaaaaaaagaattgctgtatatatgtctgtgttacaaattagctactagctagcttccaagccatcttcaccatcgatcaccatcagcatccgcagttagnnncgtttggggctgtaggtcttgcaggagtgacctggaccagcaagcttgtgcagatacagctgccggagaaacctgacgacgacggagtcgtcgccggcggtgtcttctccggtccattcctgtcccaccaatggccgcgccgccgcggtgccagacacgaccaagaacaccatcaccatcacgatcagtgacagaacaagcttcctgatcaacacggccatgatcttttacttccctttcgccgctcttctccctgatctccttctgtcttttctactcactttcactaagaaaaaagctaagaaactttactgaactttacaatgttcttctcaaaattctgatatgttcatcactgaattggagcaagcctatatatagatattagagtggcaggcggcggttgcttgctcggtacggtggccacttgaatcggcgttagtaattggagggctgcaggaat

SEQ ID NO: 34102 - DNA, 1138 bp, Oryza sativa
tgcaattgaacaagaagtaaactatattgcattcatctctacccttctaggaagtacacggcgagaaataccataaaccagactatagagtttgccaatttggtgcctaacatgttagtgggggtgggaagggcaacctggtggcggtggaatatttgggtcattgctcgtgcacgagggccttgatggtagctgctgcaggtacagctgtttgaggaactgtatgagaggatgatcgccggaggtggccgctccaacccatttgtcgccgcccagcggccgcgccgatcccgacacgaccaacagcataagcaccgccatcatcagcggcaaaacaaacctcttcatcatggccatactatgagctcgatcggacttgcgcgcgcgctggtgtttctctcgctcagagcttctctcctctcctgtacgtgcagtgtgtctgctctcttgcagctcactgtcccgggcaagtcacgactcacaactcacaagcgcgagttcagtgtctgatctgtgcgagctctgtgcatgcacaagatgatgtcttttttttttaaactaactgcacaagacgatgtcgagttggtcgatttgcatgcatatatatagcccccctgcttcgtgggaactccgtgttggctccgctattacgtgcgtgactcgtcggtgagctaaactgaaaaaaactcggcacgggctgaactccgattctacggtcttcagaagggaaaattcacgcggccttcgcgtgcatgggccgtgtacagatacacccacacacatcgatcacggccactagcaaaactgtagtgaaatctgcatgggcacaagagaagcttacctttatttgcctatgtaaaaattccatgctcatgctcagctcgagttacgtgcgtgactcgacagaagacgctgtgccgtgcgcttctccctactacatacgccgatacgcgggttccaattccacggtcatcgcttcggaaggaaaaaattgcagggtgcggagctaaagaaaacgaccggtttgtcgcgcgccgaggtgaccaacgcgcgcgccggtgccctgtgccgcgggtcgtaaatcgtaatgcgcatgtcaacctgttacgtaggtgacactgggacccggggcctggtg

SEQ ID NO: 34103 - DNA, 605 bp, Oryza sativa
tcattcttgaactcgacctcttctggataaactttttgtaattgattaatacccttaaccgaatccatcaagaatctaactgttggtgaataatagttagcatcggtctattctaggactctgaaaccgatactacctctaggccgatgacaactttgaagtataccaaacacccgtccaacaacgatggcggtgcaccaacaccacttacgagttacgacttggagatcgtcggatctatcaatgcctcggtctccaatgagcaacggcagtgatggtttttgttaaaatttttattcagtttttgtatgtgttcttggatcgaagcatcgactcgatttgaaccgatgtgagcagtttttttttattactagagcctcaaaggtgccggtttgttcgtatcacctgaggggtgccggctagaaaatccggcacctatgagggtttttcaaccgataccattgacgttttcttgtggcaatgtatcttgcacgattgcaccgaccaattccgttttacgtatcattcgtccatcatcgaatggacgataccacatacagtacttgcaggattgtgagaacaaaagtttacaaacaaagactggc

SEQ ID NO: 34104 - DNA, 1265 bp, Oryza sativa
atttgatggatatttctggccttgaaagagcaaatacaaaagcacactgttctgttggaatcacattaatcagcttaaaacctactcttactaacttaatagtcaaatgtgagctctagttagtaaaatccgtctgctcttcagaaaactctggagtggccaggctggtaacatatatgcctgtcagtggtggttttctcgactctgatgcccttagtgctcaataaattatactaggagttataacgaataaaaatatgaccacatgtcactatcacaaaatgtatccaatgcaaaaatggtgaagcaaagatgcgccacttttgaggcaaagatgaccaatctttagtcttgatttatgtggcagaaaagtatgatgaggggaggctctcttttgaggatcttgtacctgttacattgtagagtgcactgcttaagtgtttatttgtcgaaagtctatggaatcttttactgggtattttggtaaatagtattatttttctacagtattttggtaaatggtactacctccgttttaagttataagactttctagcattgcccacattcatatagatgttaatgaatctagacacacatatatgtctagattcattaatatatatatatacatatatatatatatatatatatatatatatatatatatatatacatatatatatatatatattaaaaaaagcagcactcaaactcactctcgttctctctctcatcattgttgaataaagagagaaaacccctgattccccaatgttgaagcgtagatttttcacaatttttcttttaaagaaataggcctgtgtatatgcaggaaaagagcacgtggtggtagtaggaactagatggcactctaagataggtaattaaactatacatggatgaatcttgtcatgaactattattagcggccagaccttttgagaaatcagtttcagcaaaatgttttgagctgaagtaggtgcacatctcatgctagaagagtctgtctttgcacaactataatttgggcaacgtatcctatgcacacactacctctaatgcactccgccaccctagaccatctgattccaatccgacggatacaaatcgagatggtgcatttttgcagaaaacaacccatgtccctccacctaaatttacatgtaacccctcacttggctctcaccttatcttgttcaaccttcttcctaaatcaatccccaatcctcagcatgatgtaggaatggatgccgacgacatct

SEQ ID NO: 34105 - DNA, 669 bp, Oryza sativa
tttgcttgagcacattgtgcacgcaagtgttcctaatttcctactgttccactgcacgagacaggacatctctcacttttctaacagtctcgcgatcatggtgtccatttctagtttgaaaacacgacaggatatctgaacttagttccagcatgaaacttgacctgctagtcactactcgcgactgcaaactaaaagcaggttcattcattcttccattgctgacatggtaactcgtaaggcgtaagagacacatatagcaagtttcttgattacgagtaccgcacggtataggtaacttgacttgtgactcggtagttaaggtaagagtatttactgagtcaatactcaagattatgctcatctgatacagaactcactgtgaagtcagtatgaaaatcttgcgattgacgtctagcggatctgtccctgttatactcgaccgggatcattccaaatttcagcgacgacggacactttgggttataaattcagtgatcttttcactttaattaatttccaaggaccgaggttaatcatgatggactaaattaagaatgttgtttggttttgctggcttagctttaaaattcttggagtaactcacttcagtgtgatttgtgaagtactatatactattctctttgtccctaaaagatctttattttt

SEQ ID NO: 34106 - DNA, 607 bp, Oryza sativa
atcgatctcaaattcacatcctccactaaaacctccctcaaaacccttcatattccccccaccaacgaacaccaccgaaaaacccaagagtataaaaaaaaacccgacacatcaacactaaatcgcccgcacataatacgcatccgatcgaacacacaggttcgccgagcaccgacgccaaactggggaaagcacagcactctagagcgctagtacagctagtaaagcgaacgatcgcacgcaccgagcagtggcggagatggggctcggcggcgactgcgtgggcggcgagtcgacggcggctggatcgcggcttcccttcccttcccttcgctccgccgctgctgcgccgacgggtgctcggtggttttcgtcgccgactcccgcaatataagcgagcgcgacggtagtgagcagagggattcgaggacgaggagtcgcccggtcaatgtgcacgtagcatttaaaggaattaaagcgaagacggataaatgaaggggcgcaggaggccagggccggaggtgtcacgtaccgttgatgttgcttcgagattcgtgcaaagcatggaaaagaatggaacgtgaaggcctatatatatgtgtggctt

SEQ ID NO: 34107 - DNA, 1066 bp, Oryza sativa
taatagcggagccaacacggagttcccacgaagcaggggaggctatataatatgcatgcagatcgaccacactcgacacctcgtcttgtgcagagagctcgcaggtagctattagctaacgagttagctctgaactcgcctttggcttaactaagcagtgagctgcaaggaagtagatacttgtgcaagctctgagcgagagaaacaccagtgtgcaatcgtagaacttgtgttagacacacacacagagagaggaagagctcatataatggccttggtgaagaggtttgttttgccactaatgatggcggtgcttctggtgttggtcgtgtcaggatcggcgcggcagttgggcggcgacaaacgggttggagtggccacctccggcgatcatctgtcatacagttcctcaaacatctgtacctgcagcagctagcaggtccaggtcactcgtgccaaaccaatgacccaaataacccatcatgtactgcctcggccaaccaccactaaaaaacagggtagacgccaaattaaatatcccaccatgtatatatattgccatcacttgcatgctaacaccaaattctaaagtttggttgtgatatttctctataggagacaatgtagtgtatatatataagatctttcaagaaaagacaatgtactgtatatgatctttgaaaaaaaatgcaatttagtctttttggattgctctgtttcttgttagattgtgataaactgcaagtatatgaattaataaaatggcagttttttgtttgtaacttctgttcttcgtactaccttgcccaagtgttaatgtaaatgttgtccaattaattcgatgaatccatccagtgttatgtgagatatataatggatttgatatatatgggtgaaactggaagctagtctgaatatatatcccacgcagtagaccagtagagatataacagaaatgctatctgagtatctgacgggatcccgtcccaatcgtgatagacatgatagggcagccaccaactaatccaccgattctatctccttctaccttatgggctgcaggaat

SEQ ID NO: 34108 - DNA, 749 bp, Oryza sativa
aaagataaattcatttgactctgttcctgtttgtgtttggcttggttttcaagctgggtaatgaaaattgcctgattaaaaaaaagataaattcagtcctaggtaaatactattcggcttcctcgtgctggcagctagcacatctgaccgacgctatgagcattttgatttgtactaaaaaaaggaaattacaaaatttaagaccatgagatgctgccgtaaagtcgtactccctccgtcccaaaaaaaaaaaaaagacaaacgctggtttccgtgtccaacgtttgaccatccgtcttatttgaaaaaattatgaaaaaaattaaaaatataagtcacgcataaagtattaatcatgttttatcatctaacaataatgaaaatactaattataaaaaaatttcatataaaacggacagtcaaacattgacacgtaaatctatgatttgattttttttagacggatggagtagagcgcaatgcctgaccagaaacggagcagagctgcaagtcaaatgaaaccgaaaagcaccctcgtgccaacacccaggatctctgtcttttccttctttctgtccccctccccactttgcccaagtacactggtctctatctgaacctatcgatcgtcgataaaagacgacctgatgaagaaatagcacattgtttactgatcaaggaggagagatccaaattaaggccgaagagcatgaacctgcgcagcttgctttctccgttaatttctcaac

SEQ ID NO: 34109 - DNA, 772 bp, Oryza sativa
cgtcggagggttagccgaccttatccaatgtgttaaatttctctttgatggttttcctggcttggttaaattcaatacataaccattttgatcactgtcatattagcttgtttaaatctatcaggcaattatcaaccttatgctgcatcggttggtttcgacctatgggggttgtggttgtaaattagatttatttaagtaagtaggcatcaataattatatcatcgggggtttcaaccaatgcgttatctggatatatattgtttaagtgttgtatcggcttataaggattatatacaagttggttttaaccgaatgtagcaaacacttcattgtttatccaactatttaagtctatttgtatcagacttccaatcgatccaattctccagcagccaattgttcaacctatcggctaattactgctacattgacatcttgttagttgtagaattaaactaacttgcatgcctgcacctcatcaagatctatgacctgcactgaacctaagtagatcttccaggccttcatgtttttcgcgtcaacaacgggccaaggggagtaggtcactgtttccgttggatggagaggcgcggatcgaagaggctgccatcgttgttggaggggagagaggggcgccgctcaattaatttggggagaggacgaattgagaaaacacaagagagaggagaggaggaggaggagaaaaggccgagaactaaaagaccacatgctcatgtgttcggctccgctagctcatcccaaagttcct

SEQ ID NO: 34110 - DNA, 554 bp, Oryza sativa
cagcctcacggggaagcaaccgcggcctattggcttcgtatactgttgcgaagtagtacgtccacaactccatcggaagaaaaggatgtgaaaccgtcgtggaaagcggatcctgcgagagaaagttgtcgggagaaaaggatgtgaaagttggccggcgagacagagaaatgcaacgcagaaagatgcttcctgctcccctgcctcagtcccacgcaggataaaaatatatacactaccacgaatgctgcatgttttgtacttttacataaacgagtagcgtcatattgcagtttgcaaagtagcaaaaggtaccagtgaggccaaaaagaaaagcatagacattttccaagacgtaaagaactcaacagcacaacacattcacccggagggaagtgaaaccgaatggggaagtagtagttccagacttgcagttccgtggcatatcatacagcccattccaacaagatccaaaccatggaccgtcggcccagacaaccatactaccttgctcgttggcaagtggctagtagcctagtactgggctgcaggaa

SEQ ID NO: 34111 - DNA, 592 bp, Oryza sativa
attcctgcagcccggacctgtctgggaagtttttagcagctacagcttctcacaaaatctccagctctccccaaacagtttaaattgtcacccagaactaagaatctgtagttataaaatatagaaaatgaactagaatccaaaagctggaaaacccagcttctctatgttctcaaaagcggctaccaaccaataaattcttataatcgtaagctcccaaaaagagcctaaaggaacctacaacgagtttagcatgtggcagcccaaagactagcgataacggtggttcagccagtggtgggctagtagtcggtaatgggctaacggctgcttcataaatgcgcataggtggtgaggcgggggggggggggggggctaattggcgagtgtttatccacgacaatcgcaagtgctaattcgtgaccagtcgcacacgccctccccgtgcgactggacacgtgtcacccgcggaaagggggcggcggacggcccggtttctttttttttttttgtgcggtttccgccaatgacacggtttctttttctttttttgcggggtttcccttttttgtttttgggggtttttttcttt

SEQ ID NO: 34112 - DNA, 674 bp, Oryza sativa
cttcaagatgaagttgctgaagcgcatgttcctggagatggtcgtcgccgacttccgggcggacctcaccatcttatgcgtccgtgccacggccttctctattaggtattaatcgcgatacctcagtatcaagcctggtacccgcctggtacccaggtacccacaagtatcaggcctggtacccaggtacccacaagtatcaggccatacataagatggttacgttgactttttaacatatatttaatttttttttgaaaaatgtaattagaagtattatttatattgttgtgacttattttaatgctagggtacttaagcatgacctatatttttacatatttaaataaaatttttaaatgataggaatggtcataggtacattggtacatatccccatgccatatattaaaaaaacaaaaggccagtattaaacagttacagtatacgcactttattcatcgtaattggccacgaaaatcacgagtacataatctactactaaaatatattaaagaactacttacgttatgaatgaacaccgaaaaataaaattaattatgggtactgacacaaatagaccctgacacggtcaatgctagaactgattaaggtaacgatctgtctatcaacaattcaacagtgggtattacttattaggagggctgcaggaa

SEQ ID NO: 34113 - DNA, 593 bp, Oryza sativa
tcatcctgcctcggttcggcttcccagctcgttaagggaaatagtctcaaatgatggagaaaatataataaattatgaaaaataattttaaagatagctcgataaaaaaaaactgatcaaagcttcctttttttttcccacaccttgctcattcaaccatttatgggaagataaacatcgcttgatttaaggaaaaaatggcaaatgttatcataattagatcggatttttagcaaatcgtaaattgttttataaggcatctaaaagcaagcatcgtaacgaagctgccttacgtgtcaactctcaattatcctagctgtcaccctacattaacaagaagcaacatggaaacagacactacaagttgtttcagactattattgctatattggagtatgacaatttgtttttagttccttgtacttggggtaatcaccacctttcgtccaaaaaggtaataaaattttagcaggaattggaaagcttagcgtgccaaggagaaacgatgttaacactggagaaacaatgcatagagattctccacggcagctagtgccattcggtagtcctaatccttgattttggaatagttt

SEQ ID NO: 34114 - DNA, 1019 bp, Oryza sativa
agagtctaagtagaaatacaatttaaaaatagctaaaattcggaattaaaaataagaaatatcgaaagaagagtccatatagtaacccaatacgagattaattaaaattcagaataaaaataaaataaaatctgaaattagcaaaaaaaagatgagtccaagtagaaatacaatttaaaaataaattaaattcggaattaaaaataaggaatattgaaagaagaatccatacaagaatccaatacgagattaattaaaattcggaataaaaaaaataaaaaatcaaaattagaaaaaagaaacgaaaagaagagttcaagtaggaatataatttaaaattaactaaaaatcggaattaaatataagcaatattgaaataagagtgcatataagaacccaatagtagattaactaaaattcgaaataaaaaaataaaatataatatgaaattaggcaaattaaaaagagagttaaaataggaatataattttaaaacaactgagttgaaaataaaaataaaaatatcaaaagaacacaatacgaaaaataaaataaattctgaaatgagaaaaagaaaaataagatatcaactaggaatacaatttataaataactaaaattggtgagaaaaaaataaagattactaaaagaaaaaaccatctgaaacacatgacttgattaattaagtagcaggcctatagagtagcagagtgatggcggttgaagggacatctaaaaactattaataaaacaccaaatagaatcctaatgatgattaaaaggaagtagaacagacaggtcgtgaagcaatcggttaaagcgggtggcaggacttctagaaagtaaaaaaaaacccaatgatagtcatatttgatttttaaaatcttaataataaaaaaatgaaaggtaacgggcgggtagtataggagtacaatggcaaagttatgttcaacttttacaatcctaatgacaataaagagtatgcggcggacaggtcgtaaaggagtatggtggcagcg

SEQ ID NO: 34115 - DNA, 553 bp, Oryza sativa
caccagaacaactaggaacacatgattgaattgcctgatttgctgaaatattcggaacaccatcactaccttcagtttttggttcttgatcgctcagtccaacatctataaccagtttgcattccacaggtttcattgcaacattatctatgtgattgttacattttctttgaggatcctcgttttttgctgaatcgacaatcttgtccaggtaatcttcctctgcagcctcgctgttttcagaagctttctgatcgccgtctttctttaatagtgagagttcttcagggacgttcaaaccagccttggagaagtgcacagcacgcctacgtttttctttcaaggtctcagcctgcagtagaataaatgtctattgaagctttgttttgtacattgagaaaacagcgaatccaagaattatggctatatctactatacttgaccgatagtcccagaagcatggagcagagaatacgcatcatctgaaatcttgtgcttcctgtcatgcaggacaaccatcagaatacactatactatcagtccagacagagta

SEQ ID NO: 34116 - DNA, 609 bp, Oryza sativa
tctatccggacagtcagactacttacggcaaaaagagagatcagtggcagaaagctacatctgaagaagagagttattacagtcttggttttgcaagttcgtaagaaagcatgcactgaccgatcgaccgacagacctcactcgatataactttgcaaagttgcatgcttgtagaccaagaaaacctcgtagctgctttgcaatttcattcacaaactcgtcaaattaattagttgatcagtcagacagacagtcacacacgtaaaaagccaagaactttcagggtttggccttggcatcaggccatgtctcatgactcacgagcttctcccaacctataaataaccgatcgtaacatcgaccattcttcgtgtcacagctcaaaacactgcagagttaattataatttttgtggagaaaacagagcagatcagataacacaactgtgagcgagtatcttcgatctagctagtacaggagttacagtatacataatcgccatgccaacgatgaggaaggttgcagtggccatgttcttcgtgccgatggtcatgtcggcctcatggtcgccggccatggcgaggccgtacgccgatcaagcctccggcg

SEQ ID NO: 34117 - DNA, 607 bp, Oryza sativa
tatttatttcttttatggtagtatagtttttagaagaaaaaataaattagaagtacgattcactttattcgtcttattcgtcttgcttgcatcccgacgcctgttcttgtaccccacttatgaggtcagcaagttgatgaaacctttgtttggtgtaacaagctagctcagtcaaagttttttgttcaagtcgaagtcaaccggccagttcgtttgatacacattctcagagatagacgcctcagctcgcaaaatagagacgggaagaacagagtaatgatgcaatctgcttgactctcgggtgttccataggtgagatatttctgaccatcgatgcaatttatgtagacatttctgtggacatgcatggctgcttttccatcggtacctagtccatcaattccctttatatacatatacagtacaggtccatggaattggacgatacatacgtacatacagtacttgcaaggtttgtgagagcaaataatccatacatttctgattcaacacgaaataaaataatattatattaagtaaggacaaagaaaactagtggaggagccacgcacaaactatgggtttggctgaccccacaatttttgta

SEQ ID NO: 34118 - DNA, 655 bp, Oryza sativa
ctgtgcgtgcgaaaaatgaaggagaggaagtttggaacttagaaaaagaaaacaacctaagtgttatcaacctatcagaattgttgtgtttaataacaagaaatttagtccactaacctgtgatgactacttgattaactattgtaatgtaccctgatcaagattggttattgaactaattaacatcttaaataaatatgtagttttactatatgttattatgaacgatacgattgcttatgttgttatatgataaaagccgaataaccgtgctttgttacggattaaaacaaattattagtgaggttttttgaataattttgtacctataaatgtcatattgtacaggtgaatatgatagaatcatacatgcagagagatcattttataacattaaagcacatgcatggggaattgatagaaaacatgatggccggagtagatgataaattaaagaaatactatatacttggtgaccaccattgttctcttttaaaaggagtatagaaattgtgctaattaagcgaatttacaatattatggtttagtatatagtttaatttcacgatacatatatagttttgtagaggtgtatacagttttgtgaaatagtggtatcttttggtacatctaagaactggtaaaactgctcgaa

SEQ ID NO: 34119 - DNA, 675 bp, Oryza sativa
tggcacgcattatattctctcctctgatctcctcgctgagtctcgctacaagaaagaaaaccccaaatactcaagccgcgtaaaaacgtcgcgcttagctggaacccaccctcttacagcgaggacacttacctacgtggagcaccgtctcgtcgtgacagctacacttccgcaccgctccaggcactactgctactgctcgtctcggtctcgctccctttctttccatcgagagggcgacgtagggtgttttttttttccgatcccactttaccataattaaggttacgtaaatggtgagagtaacaaaagtgtgacgaataaattattattggctataaagtatgataaaattgataaaagacttaatctacgatacatggaacatgtattgaaaaaatatgctgtcataatgataacagtggaccaaacacgtatactttgtatccttttgcgatgtactaaaccctgtattgcataataaagttgtttaagttattaaaaaaaccaaacacatatttaacagtcacatgcaaaatatggttgagaatcaaacacaccccctaatataaggatgtctcctacttacctttttttaagctgctatccttttgtcatactacgtactaaatagtattttaaaaaagttatatataagtttttttaattaaataa

SEQ ID NO: 34120 - DNA, 776 bp, Oryza sativa
tgctctgcctcaagggatcggacgccgtcgtcaacttcccctcctccgcctcgtctcgccgccgcctcgacatccaccgggggggcacggactcggcggcgggcgacatgtcgccgaggtccatccagcgcgtcgcggccgccgcggcggcggcattcgacgccgccgccgccgccgtcgtcgtcgacgaaagctgctcgtgcagcgccgaggcgatgtcgtcgacgccgacgtcgggagcgacctcgctgtccacgctgggaagctccggcggcggtgacgtgctggaccacgcgacgacgccgtcgtcgtcgtcgtctgccgcggccaacgtttgctcgccgccgctggagggggaccatgagctgtggacggagctggacgcgttcgcgtcgccgaagttcatggatctaatggccgccggcggcacggcgttctcgtcgccgtgggaggagcccgaggaggacggcgagctgatgaggctgtggagcttctgctagcttagctaggagcctaggaaatcgatcgtgaatccattcgcccatgcaacacaatactaccattgatccaatcaatttctcctctctttgagcatcgaaagctaggttaattaggccttggtccatggcttcagttcttccatagattcttcttcttttctttgataatatcttgattaattatatggttgtaatttatataagtattttacggtgttacactgtacgggttgttgaatgagactgtgagtgcattggatactggttggatttgtt

SEQ ID NO: 34121 - DNA, 788 bp, Oryza sativa
tctcaagcaaaggtaaaacgtaaaatgttactaataattcagacagtggatacttgtcctttgtggttgcggtggttgccttatgtttggttgaatactgtatatttgttcatggcttttgggccctgcacaagtttatatttataatatttattatattgaatttaggctttgtactacattataatgttctctgaattgcatacattttcttaaaacaacaacaattgtttaagaaatattgtcttattattgttaagcagtacagtcgggtattaaaataagcttaacttctgtctgtgtgaatcatcctccaatgttttacaacgtcttggatcttaatatactcaatttgagtgttcctcgggaaaaaaaaagtcatggttgctgttttactcttctgttgattccaagattgttcttgtctgaaaagttcatattattcattgccaggaaaatcggaggttatcatctggaaagaaaatgcatccattttttgcttctcggaaaatacacaaaggtgctggccaagatattcttaatgttgaggatgaggatatggattcactttgtgcttttgaaagagacccacctttatgtcctgttcatgttttgtacgaactggaggtgtgtctatataaaaacatatattttgttcatctggttccataatgtatctcacctttgtgcttttgtggtccgccttagggtggtttgtctaatgcgactgaacatctgtgtgtgtgtatgtgtgttacaggtcactatgacaattcactgggggtgca

SEQ ID NO: 34122 - DNA, 1878 bp, Oryza sativa
tagagctagggatctggtggagtccatgagcctaccgtagacccccatggagtgctcatcaacagccagtgtctgcacaacatgggtcactggcaagaatcactcaacagttgccagtttggagacacctttatatcaacaactgtcatcttatgaccgtttattgacaagtaccggagtgttcattcttagtttctgactagagagtgccccttcttgtaaactccataaatatattcacacgcaagattttgggttatataggaggacgaaacatatataaccagtgtctcgatcaacctttccccacatttgtatttaaaagaactttcctcatatttacttcgtaaaattgactactattcgacggcgttaatgcctaacataatctgggatagacaagcgtgatctctaatgtggctacgactgatttttctcaaccaactagatgataagaacaaaaggatgttggttttggggaacaacacgtgcaaaccaaaaaaaacataagatagttgtttacagttcttatgaagtttgctctttgttttcttgccaactagatgcatagcgaagtgcagtttaaatgacaatccaagcattcttgtctcaacttttcaaatttgcatgtttgagacaacctcagaagtatcttttggtttcccatgcaggtcacaagacgagatcatcggtttaccaataagcaattccttagatccagcttcagggactcctggcacggctgaatacaaacaagtcattaacaagaccctcatcctatttgaagatgtagatactgtttttgatgaggaccgtggatttatttcaactatacttaagatggtggagactacaaaatggccaatcatactgaccagtaacagtaagcctttttgtctttaggattttgtacatctctaccatccttcgaaatttcatttgattaagagcatactaaagctcttgttattttgttgtttttgtctttatatttcctgaagagaaagatccgccattgcctcatctcttggctcagctagtattggatttcacatacccatcatctgcagagttactttcacatgtcgacatggtaaaaacaaattagttctaggctgaaataccaaaaaactatgctgctttctgcaattattgaacgatgaccataccatgttttcgtgcagatatgcaagtctgaaggagtagaaatcactgttcctcaacagaagcatataattgatgcctttttaggtgatattaggagaacaatgatgcttttacagttttggtatcaaggcaagcagcaatactcaggttgggtgctttgaatgtaaaatccctttcaactcactatatggttgcgttctggttctgacctgttggcccattactaaaataaattaagagtaaatttcataaaactatgtatactttgcacaatctatcacaaaactatagatttaagaactcgtttcacaaaactacagattcagtgtcttcgtttatcacaaaattacaggtactttgcacaatatatcacacaactacatatttaagaacttgtttcacaaaactacagatttaatatcttcatttatcacaaaactacaggtttagtgtcttcattatcacaaaactacaagttttaagaatacaagttttaacattcttaaaacttgtagttttgtgattgttaaaacctgcagttttgtgataatggagacactaaatctgtagtttgaaatatcaatagatgcagcagccaatatgttcagttgtggaacttgtttgcaaatcctcctagactagcgacttctgagtttatgataaaattgactttaatgggctttatctgtcatcaaacagttgttttatttt

SEQ ID NO: 34123 - DNA, 647 bp, Oryza sativa
ctatcataaaatgacttgtgtacttgaaaagagtatcgagttattcatttctactttcaactgatggaacaatgtgtgatctagagcatttaatatccgccaaaaaaaatcatggcttattggattcattctgcatatattgtctgtcctgatgtgcaagatatctaaacttaaggagtatgtggttatttgggcacgtattggtattctccacctaacccatgtattctgaaaggtttaaaagaaatctcctgttcactcttctggcagattgaatggaactaacaaacagaagatgagacattaggagttgtaaccaatccagtttgtgttgcgcatattgagtgtaactctgttttcaaaagttatgccttatgcagaccaggtcatactagatttacaatttgaaactgaactgatcacaacttcatatgtctcttgttccatgttttgtggaattccaatccatgataaacattgaaaggaaaccttctataccttgattaggatgatatcattcttaggtgtatttccaattgcagacttctccaatttggtagtattttatatatgtgcatcatttttttcaaaatagcctttcttttttgcagaaagctcaaacttagatgctctttgatttattaatt

SEQ ID NO: 34124 - DNA, 1361 bp, Oryza sativa
tatagatttttggttttatagccagtgaatttcttgttctaatcatgcgctaatcttgatttaaacacaaccatttgcttttctccacagattgatgttgatgatgagtgcctgttagcatctagttcctgtttccatgcctctctttttgaaagcaaacaacacgaaagggtacagcatgaattgcctgaagtcactccgaaagggtaaactgcattggacactatttgccttgatgtgtgctggacaggactacctttcttcttgttgtcttaattttgccttcagatcacaaatgaaaaagaaaatcaataatcatttgaacctcaccagcctatgaagttgcaaagcgtaaactcctgacactcacaagtactggtcaaaattaatactccctccattccaaaatatagggcacaactttttttttgatgttccatagtacagagcatgcattttttttttgactgggagggcatgcattcatgcatgcaattaactagcacacacccctcccctattttttttaataacaaaaatcccctaccctcaagatccttgatcccattgggtgcatgcatttcatttattggggtgatccaaacgagaaagtgaaaataatatttttttagtcttcgtgttagtgatagttgtgccttatattttggaatggagggagtagcaaacaagcccgccctctgtttggtgtctgttttaatgctcacttaagtggtgtcagccattaggatgctactttgttttacacttacgttgttttcatgttcattcttttcttggcacctactggttctatgtcctattatcttttctttgatagcctacctcataatatttctgttgaatagttgagggagagaaatatactatgtaactggacgattgtattgagacttagggggctggtatatactgtatagagtacaagagataaggggatctagagataaggaagactatgatacaaatcaatcctatcctaacatccctctaactaccatatactctaacaatttctttatggaatgtagcctattgcacaatataatagtacttaaatttgcatcaattgtgctccattcctcatatatttctatcccttttgagttgcacattactaatggcctgatagtgtcaatcagcgtaacacaataatgcaaagtaaaatgctgctggcaccgcatagttgtctttttatgactgccatttctgaaaaaaaaactgttgatttcattattgatggtggcatgaaaattttcattgttttgttgtagccaataggtcaactgagctagtgtcaataatctagattttgcatgatatattttttgcatcagccttta

SEQ ID NO: 34125 - DNA, 530 bp, Oryza sativa
ccaaattttactgttaacacatagggctccttgtgtcgtgtgggcatgtctctcatcagctctgagctatgcggtgataatgttgccttgctactgcgcggccacttaacaaccataggccggtctcatcccacaacatgcttgatggattgggtggccaggtgtacaccggggtactggcccctacaacttatatctgaaaatctagtaagtgggtccggggtctagtttctggtcactttcacttatagttgaaaatctagtaaaaaaaatgttgtcacctctatagcttattctaaatgattccatgagcatccttgagaaaatgttaactttggagctccgatcagataacgactttcactgcactatgttgttgcattttctactggtttccttactcctccgacccttaagtgtttactaaatgtttatgcagttgaagcaactatggtggagaatcatgtgtcaaaagaggattcaaagaattataaattgaggatgggctttgtggtaaaaaaaatccatct

SEQ ID NO: 34126 - DNA, 1110 bp, Oryza sativa
tgaaataccctagattctttttttaagcactaaatagtgaataccatggtgtttggcagttattttttaaaaaaatatttgttatacaaatctaaaattacataagaatatttttttgtcctacattgggatttattaacaacattactcttttaaacatagataatttattcaattggatttatcagtttgaggggttttttattccgataaattttcgttaccgtattcgcgccggttcgttttcgctccgttttcggtttcgataatattcgattccgttttcgtttccggtgtttccgattccgattccgattccgattccgaaaaaaatatgaaaacgaaaacgataaagatggattccgtccgtttccgtaccgttttcacccctaactccctccatcctaaaataagtgcagttttgcactatttacgttcaacgtttgaccgttcgtcttatttaaatttttttattattagtattttaattgctattagatgataaaacataaatagtactttatgtgtgactaaatattttcaaatttttcgcaaatttttcaaataagactgacggttaaacgttggacacggatatccacggttgtacttattttgggacggaggcttaacaacacacttatatgattgtggcaacctttgaaaatctgttagttagtgcgagggcattgaattgattaactgatcacttacaatgctcattccctctagaactttgaaaattgatcaattagctagggccccttggaatgaataattgacacaaaaattttaaaagaacacggccctgtttgagattgtttttccaccaaattgttgacgcagtcacacagattgtcttgattagcatgataaattaatatttttgagatataattaaacttcgcaaatactacgttagaatatatggtccgatgaatatggtagaagaatttttttagacattgtattagtagaagtgtagaacaataatctgtggcaaaaatttgggggaaactatgaaaataatagggccataattgtaagataatttgtttctaatggacccctttattcactaaaaagggaaaaaattgggtaagattacat

SEQ ID NO: 34127 - DNA, 517 bp, Oryza sativa
cgccaaaacctcgccgccgtcgccgttcgtcgtcaatctcggccgttctagccaccggtgagttcgccgcgttgtacttttcgcatagtgccctccgttcgcgcccttatgccctagatcgctggcgaacttcgtttcccgagccaccgtccttcatcctctttttccttttatttaatacattaataaattagtaaagtcttttctgtattaggcaaaaatcatattaaacttagaaaaatcatatctaattcattataactcggattaatgtgtttcaagtcgctaaatttgtataaaatagagatctatattaaaattacttataaattgtgttgttaatctgtttaatccttttaaataggttttaattgtattaaatcttgtaaaattcataattaatccattggaagtcagaatgaggccgttcaagtctcataattcatctaaaatcatggtctacatgtttatttactttttacgtactgtttatttggagttccttagtttttttcct

SEQ ID NO: 34128 - DNA, 501 bp, Oryza sativa
tcatgacatacatagcgggcagtgttacaccgtatgagtcgtgtgtgtttacgtgccttatcgccataagttacttatggtaagatctgtaaatatattgcaggttgagatatttttgttttcggggagtggattttacctcagatagatgctcaggggtgagtagtaaagcgagtaatccgggatagatgttctaattagcggtattgtaatttgcttatgacgccccttcactgtaaagttgaaagaatctccagttctgctagtcacacactgggcttcagcatgttttccacttctcctgaacatacttgtgctacaggtggctgcaatccaaaacgcacataacttgctgcaagtgttttcaagagtaaaaacttaagcctcagtcctcagattaacacaatgcagttccaggctttcagcccccagaacatgtacagagagtggcacaaacgtatcacaacatcggtgccatttctgcaaggggttgagtgacag

SEQ ID NO: 34129 - DNA, 644 bp, Oryza sativa
gcatacatcccggggggtctgattatgggggctcctccccaaccaatatagctcctagccgctacgagtctatgggctcgtcgcaatcctctcctggggtgtctacgatatattgtagttgccatagttacattgtggtgcccccctctctattttagagagatgacgggttacagagttcgactctaactccaccctctaacacctattacagctccaagtccaattgtaaccaaatagaactagtatattcgacacctattctaacagaactaaacacggcaaaaattttcctacacacataaattttcaacttttttcttcaaacttccaattttagtcaaacttccaattttgacgtggaactaaacacaaccttggtacaaatcatcatgcaggggcatgaaaacttccatttttttcttgggagtgtcagtcacttttctcatcccttggatgacaatccaatggctcttatcattcccactattaattattcaaaagaaaatcctttattttcacaaataaaagattaaacaaaaaattgcactgacctaacatggaataaattatcaagttataaataaatacatgtaaaagtatccaacttggataaacataaatctacaacgacaaaatcaggg

SEQ ID NO: 34130 - DNA, 1064 bp, Oryza sativa
ctcccttccatgtcgttttatgtagtagcccatttaccagatttgaaatttatatagtcacaatttagttttagtactgatgtgcaataaggtttataactttttgtctataagaaatttggctcgtctatatttcactcttttcttcataaatcatgaaaaaggtcatttggcatatatctctttcatacatgttcacttttcatacaagtttgcaatacgagaaattttacgatctttacttagaggtggcatattttctaacgtaaagtttggtacctttgtacttgaggttctgacagacaccatttttacactaaaaatggtacttactcatggatcattatataaagagtgaagtatattagcggtctctaaacttctgccggtgtatcatctaggtccccgaacttctaaaatacatttttaggtccctgaacttgccatgtgcgttatataggtccaaacggattctaacccactcgatgcgctgacgtggcaatgccacagtgacacctacgtgttagtggaatccacatgtcaagcatatatacaaaataaaattaaaaaccatattttctcctattaggtagacagaaaaaatataaaaattctaaggtagagaggagaaaatatgtttttctacttatatttttttctatgtggctgacacgtgtgtccaactaacacgtatgaactatcatggcatgccacatcagcgcatggaaggggttggagctcgtttggactcatatgacacttctaaacaagttcgagaatccgaaaatgcattttgagagtttctggatctagatgacacacccacataagtttaaggaccgctcgtgcacttcactcttatataaaatcactcttggaagaattttttttaagcattgtttttttacagaagatatatgatttctcctacatcacaataagggagatggagggtaagaaaacaaaatagatgccccttaaatgagttatggttgagagtgaaagtggttggagggaaaaatagtactgctctttttttggacaaatttgaatagtagaagtgc

SEQ ID NO: 34131 - DNA, 721 bp, Oryza sativa
tactgtggtataaaagcactgcaactcgtgatttaagattcaggatcgtgatttaagatgctatttaaagatccaggatggcatccctgttccggtggtcactcacgggaacagcagccttgctgatctctcttgctgcagtcgtattcattgaagacggtattcacaatgctcccgggagaccaactaccatggccacgaggagcaaacgacctgtcaggccgccaatttgcgcgtacgtccggacgccagtggccccgccgctactacgagtcgtgtgaactgtgaggctgtgactgttccggtgggcccagcttgacccatgtgctactgttacgatgcacccgtttcttggcccacgttactaatacagatattgcaattggcccacgtaatacagtcacttgggctcggtccagtctagtactcgtaggaggccctggctgcagcgctaggcctaggcgacgccggctagaacggtccgctgctttgcccatctccgtgtgccgcgagaaggcggcggcctacggaaacggtgaaccttcacgtgccgcgcggcccatccattgcccgtgccggccgtgcgcgtgacggcccgagacgacagtacgccacggtgtcggtcgggcggccgcgcgcgcggccacgtacacggtgcagcgtggcgcggcagaggcgcacctcttcccgcgatgccgtggatattcccccgcaccgaccc

SEQ ID NO: 34132 - DNA, 666 bp, Oryza sativa
cgaacacttaaccattaatttaaggataatttattaagggaaattgacgaggcatgatctcaaccgtatataaataacggatggcatagatttagccaactccactcgatacatttgtacccaactctaggggatccagaccccaatatcacgatgacccctttgaatcatgttctacacattgtagttccatttactgctgattgcgacaaataagcagaatcctatattttaaatacttcttctgtgctaacttagattcaatatgcaccttccatatcaagtctcttataagatgcatatgcctaagttagaaaaggccaaaggagtccagagaatcctagctagcgttaggattagtttagacaactgtccttatcagaaccaaatgtaattaactacacaagaagagtgtctatacttgtattggtacttaattttgatatcacagagaatacataaatactgttttcagctaatcaaacatcatgtacctgtcaataaaataattccaaatttggtcacctttggcatgtaaagatgagtgatttctcctaagacttcaaaatacctgtgaataaattactctagccagtggttttggagaacccgcagactacgtacgtctgctcctgctcgtatgccgccaccgacgtggggggcgag

SEQ ID NO: 34133 - DNA, 642 bp, Oryza sativa
cctgcagccctgtgatgtgatgtgatggaaagttgaaagtttggggtaggtgggggtgaactaaacacggccttacctgaaggtgtttggagatttgcttgatgtagataatgatgcccaagctgtgtgactgcagatgccctgatcctagctgcaatctctttagttaattatacctaaatgacctatgctttcaggttagtgtctgcagtcaactgaaatatttggctagcatataactcttgttttgctaattatcagtaagagctttgataacttttcttttctttactaatctgtttcattttaccttccatatttgattactatgcggtagtaattattatttttttttatcattgtcaatacaactagataaatataagggattttgggtggatgtgataatgaaatatatatattactaatcaactattaaatgcaagggtacccagacacctccaacactgaaatatagctatcccatcaacattaaagttcaagtagcaggaggtatttcaaccaacatgattttccacgtcaccagacggtcgctgcaacttgatgaaaggatgggcagacttcgcagccaaacaatgacatatatctcgaatcattctgcatcttccacttgtataaaac

SEQ ID NO: 34134 - DNA, 691 bp, Oryza sativa
aatttttatgtacaggacatctcttttcatgtgttgtccacaagaactctggaagaaaactgatacaagacttatggacagagcgagaaaagagagaaaatattacgatgataagaggggatgtgccgacgacaaacgtaagatgcaccaaaaattaaggaaaacaaaaaagaaaaataattaagaaaaatatgtgccagctattttcttaaaaagaagtattacatatgcaataggtgaatcagtgaaagaaaattaaacaatactccttccatcccatctatcccaaaatataagcattttttggatctcgacacggtctttgagatgttattttgaccaataatatctataaaaataaaatgttataaataaaaagagttgcatattataatagtttgattaattataaatctagtaacatcaattttacattattgatatttttttatttttttcctttcaatagtcaaaattaaaaatggttgacttggcactatgctaaaaatgcttatattttgagacggagggagtagctaaaagtggttcagtggaaaaaaaatacacaccacaaacgtcacatgaaaaatgcatggcttgataaagttatgggatttaccatactaccatacatattgtataatatctcatccaatttatttatactaagatatatcaaagtgagtaggtg

SEQ ID NO: 34135 - DNA, 962 bp, Oryza sativa
ttatagctcatcaatcaagctatttcccccacatttgctcccaaactggagtactagtcactccctccctataggtatgtaagtccagaaactccagatctacctttgcctcctttgggtcccaatttctgacacacactctagtctgcttgccgcacgtacaagtacgaatgaatgaatatgccgtttttttgacaaattgacccttttcaaaaacttaattcgaaactaacccctgccaaaaacttcaaccaaaactaggccgtcggctcagcgccaagcgcattggcgctgaggttggccgtgtcagcgccaacgggactggcgctgacattgtgccaccgtggcggccgggccgatcccctagctgacgtggcagctacctcagcgccaaccgcttcggcgctgaggtgcctaacctcagcgccaagtaagttggcgctgaccttggctacttagagcccggccgaggccgccccagccagttcttcctccgttttttccccagccgcccgcctagggttcggtcgccaccgcgttctcctcgcccaatctcccccaaaaacctctctaatcgaaggtgatttgtgcgacattgagtttgggatcggaagagaaggtaaacccctctataaaccctaagttccccaaagttttattggatattttgcattgttttggttgtagacgtggtttgataatagttggctaaggatggattattagatggataatatgggtggggatgaagtgtggaagtggcatatctttatccatttggttgttattgatacatttgacaaaatatatttgggatggatgtttggtgatgcactagggtttgatgggagatggatgtgtggtgatggcctaggatgtgggatggatttgtggtgattgagagggtttgaaaggggttgatgtgtggtgaagggtaggtaatttgtaggagtagagttttt

SEQ ID NO: 34136 - DNA, 629 bp, Oryza sativa
aaaataataaattgttggattgaaatatgcctattaaaaataaatttttcagatttggaaatatgactatcaaaaatagatggagggagtattttgttactgtcctaccacatttcattgtaacagcaaactcagctcacaggtgacacagagaggcatttaatgtagcagcaaactaatatatactattgacacaatgagcctatctgtattacagcgaaggatgcacatcctacccacctccttggtcatcctactaaatcctatcccacgcaaaaaaaaaaatcaatctgatctcgcaaaaacatgttagtgttcaaatgaaaaataaatctcccggcattatatggtttatagttgtgtcactatatggtaagccatgcaatctcttttcgttcgaagcatggactgatctagtgtgggtgttggagggactcgactcaagtccccctatcccgttggatcgctattgataaaaggagaaagagaagggaaaagagggagaggaagagaaggggacagaaggagaaagaaagagatgagttccactctaatatttttcctccggtttggaggtggtctcaataagaccctgtttaattccaaaaacttttcgtaaaaacatcaca

SEQ ID NO: 34137 - DNA, 535 bp, Oryza sativa
aatccaaactttatatctaaacaagaccgtaatatcgaaatccagaacagtactgaagttaaaagcgcaaaagcagttgaccttggcatgatcacacacggcatctggactggctacatcaaacgatcggtatatataggcatccgttgatcttgttattgttgctgatatgccttacaattaattatagagatgattgcatcacatactatatttataactttgaaatagataactcattattggttaatgaatatgtgatttattcatgtgacctttttatgttgtatgttgctatttctaaagaatccttaatcaaatatcatatgtggaacaaatatggtttaatgatcaacacatgtattgaatgatcatgtcttatgaatcatggtatggaggcaccaaattaataatgtggacacatgttggaaaacatgttgttggatagatctaacatgagaggctatatatgacgtgccatcagtgatcttatttagtgttagtgtaaatccttagacctgagattattatgatt

SEQ ID NO: 34138 - DNA, 628 bp, Oryza sativa
tgcgttgtatttatattacattgaatagcatttgtttaattaattactcatggtgacttttcttctcaaagtagctcatttaatttggtggtatgctattagttactactttcatcctgcataacttaggattacgccatttcctttttatcccctctaatcatccttgtttttcttcttgaagaaattcatccccttttagcaaggttagggatgcttcatatcacaataacagtttcttgaattaaaaagttctcaagctcttctcacttctcagcatccttatgttgacagtttaatttgtgcttgccatcacctgttaaatttcgactatacctatcatttgcagtgttactctccagattctccaatatcagatgggtatttcagtgtccttgctgaagtatacatgcgtcaggaaattccaaagtgtgagatccagagaattttgagcttgatcctctacaaggtggttgatcaaacaaaactgatccgtgatagtgcccttcaaatgttggagacactctctctccgtgaatgggcggaagatgatgctgatggtgttgggcattaccgggcttctgttgttggcaacctgccagattcctaccagcaattccagtacaag

SEQ ID NO: 34139 - DNA, 600 bp, Oryza sativa
ccttgtctcgttagttttccctactttttttcgtcattggtagtcatgctcgttgctcccaccgttgacaagcctagatctagcgagatcccactgtcgagctccaccattccttgttgcggttggttctatcacactaaagagcccttctcgtcacacgagacccatcggtggcagtgatggaggaggagatgcgtagcaatggagtgagaggaaggtgatgcgctgacctactttctcatcatcgatgccgcctcactttcatcaaccatcgtatatttttaaagtaattttcgtatatttttttttaaaaaataacacattgttttagcatttcgaaaagcgtgcacgtaaaatattgagaaaagtgagtttggacctaaggaaacgaactcatgctcggcgctgcatgaatttatatttatgtattctatgtattcagcggtagatgtacacatcaaagtcaatttttgttttgcaatccacgccgctcaggatgcttccttcgaacacagaaagaaagaaagaaatgcgaggcattgagtcgttatgttaactaggagcagctgtctagatgctggactttttacacatggccct

SEQ ID NO: 34140 - DNA, 644 bp, Oryza sativa
ctcaagaagctgacagctacaagacttgagcacagcaagacagatgggagttttacataggcagaacagcatcaaatatctgcagtgtcttactctatattccaccattcatgcatagaaccaaaactgagcccacttcctgtttgtgggacagactactcaaattctagtcttctttggctaaatctggttgatcaataccgttcctcagtatctcatatgttcagtaccagtgcgatagcagatccaggacctccaaaatgctatttttcacatcaccaagggcaattgtttcaatacataaaagataaatatctaacacatttcaccagggcagctgtgtcaatacttatgaaggtatatatctgaatgaagtccatgcacactatgactagagtctaccaaacaaatatttcaatctctatgttttattcaatgacattcatgccagatttagggaaaatgtgcagttacctctggatagtcaagttctagctgaagaatggataccgtctcaaatcgccgcaagagcattactgaattcatgtgatcagtgcagcgagagagtccatacactgtaattgggtaaccagcttccggaggcgtttaacgccgccaaattggaccgtggtaggatcatacgc

SEQ ID NO: 34141 - DNA, 538 bp, Oryza sativa
tcattcggatggttttgagcttgactgcttttacctgaaaccatgcggcactcaattgccgcacacgcaacgcagcgcaattcactcagccgacccacccttgtgggcaaacatgttgtgccgcgcgacgcgataacgatatttttcgccggcccggccgcctccacggtgtgagacgtgaaggcgatacggccgttacggccgttcgcgcgtaaaaatgccgactgagatgtggcggctcccggctcgggacggcgcatgcgcagcatcgaccaccatccgcgacggcccgccgccccgcgagagcgaacaaccacgggttgcgcggcccacgctataaggctacgtacaaggccgcgtgcagggcttggggttgggggatggaattttgggccttttggtggaatgaggggccgatacgttgcgttggggaagcccatcctatctgagagagttggagtttacacccattgggtcttaggcctgcctattagatcagcccaaatacgcccatttcaactcgtattcgatagctaga

SEQ ID NO: 34142 - DNA, 605 bp, Oryza sativa
aacttcttttagaccagtgttattagagaacttgcttgataatccatataatacaatgatgtcccttagactagatcccctcatcaatttatccaccagccgttaacaattattcctgtataccggttctcctgatttctgttgagatttttcatgtcgttgtatggtttgatagagctgttgaacctaccataatgccatatacaaaccgtttatagcgaatgtgtatgtggatatgcaaactccaacgaaaatcaaccagactatgctccaaaagaaattatcaagtttcctctatataattaacaacctacctgaacaagattgacaaccaatgtgtatgtggatacgcaaactccaacgaaaatcaactagactctgccaccataagaaaccatcaagtttcccctatgtaattaacaatctactgaagaagattgcagtggttgcaaattgcaatgccatatttatttgagttgctgggtcaagcagcaacccaattagcacaccacaccacaaaggaattaaagctttcctagctcttgtcctctttgggtgatgttgagagattttgtttggtggcccatgcattgcaatgctacaca

SEQ ID NO: 34143 - DNA, 989 bp, Oryza sativa
tgtgataaaaaagttgaaagtttgaagaaaaagtttggaactatactcggcctaatttgcccttcagagaaggtgtaggacacccggtcggaattcattgcctgagtaccaaaacaaagagaatttataactacccgattggacatatgtaagttttactcacagcttattttaaattaatactaagcgatttgcataaacatgagaaacaatgagttcaaacctagtctcgtgctattgagatcaggtgcagttactgcgttaaggattatagttggtctcatttatccattttttaataaagtgttcgtatttagtacttgctacagaagcataataaatttcaacgttttgaacgacagtacggtctccaaaacatattataatacaacataaaaataaatatttagttttattaattaaagaattattttttcacttattttcgcatatcaaccaattataaccctttacaatttcacttacctatttttcttaatcttattgcatactccctattaggttgtttttaggacggatggagtatttttaaaggttgctagtatattttaaaactgatgggtaattaattgtttgacctcaaacatgttcaaaacttcaagatttatggaaaatgggagtgtggagtgtgtgggtgtgttgggggttcttttcctaactaagagtgttaaaacgatcctaacccttgaagtcagattaaacaacgataagtagtgtgactgtagactgattaagctgcagtcacactatcactgtctcatgcacaatggaattagctttctatagctcggatgactcatggccatggccaactgcactaataagcagtcgatcgagtaggcccgagcatattatctggtccataccgctacttcttgcaataccattttttcgattacacgcaggtttcatatgcacgcctcacacgccgtgaatgcacttctctaataatacatacttagagagac

SEQ ID NO: 34144 - DNA, 620 bp, Oryza sativa
tattttggttgaaatttttatttttttttaattttttccgtgaattttggtgatatttattcaagttcaactaaattttattcaaaattttggaaatttctaaaattttggcattccggtgagtccgatcaaatcggctaaaccgaaaggtttaaccctgcctgcggcgcacctacatgctacaggtgcaacacagcgatttcgtactctctccgttctacaatgtaaatcgctctgtcctttatatgacgaagctatatgacaacgaatctggacagggtcagtaatgcatcacatttaatgtataaaaggtatattatggcatatcagtgggaaatactggagtgagatggagggagttactcgtcaccactctatggaagacattgcaaccggccagatgcgatgcatcgtgtcacagagaataagctacgtgtagccagtgtatctaactttctctcatccctataatatccacccgaacgatgctcgtcatacagaggcgagcgcgggggctcgatcgatatattacagccaacaagcggcagctcgatcgatcgatatatcacaatggttaggctcgccgtggactccggccttggccgaggctttgccggcgg

SEQ ID NO: 34145 - DNA, 509 bp, Oryza sativa
gttttactctgatcagaggtgtacaactatacccacaagacacagccccacgacacgtttccgtgcgccgacatgccaccacgacataccggaaagaggccgtaacaggacccttcgcataaccccttctaactaagcacaccacacctcaggtttcacccccactcctcgcaaggcagcgggcagtcccctctcgtgcctaggtgaatccggaagccgcataggccgtcgcagggcccatccaaactccatcacgcccacccttgcctggatgcgtcggctagaggaaagctacactacaagcccagccgttgcccacgctggcttgtggtaagtacgataagttcttccagggcatcccgcgaaccggtccttaactgccatgggtgcgaccagcaaaaccatgcacccacagcccaccatgtgatttattttaattaaccaacaccaaagcggtggcactaatccaacagtaccattagaaccaacagtctaaacattaataggat

SEQ ID NO: 34146 - DNA, 541 bp, Oryza sativa
acacgtgttaactcgttcttacctaggctggtcgccgccgccgccatcaccgccatcgccgccgccgtccggcccgtcgccaccaccatcgcctccgtcgccgccgccaccatccccgtcttccctgcggcggcggcgcttatctttcttccttcttgggctgtctttaggcccgtcggcacagccgaacaccgcgatcgccacgacggctaaggccgcggcaaagccgaagccgatgaggatccaaccggcagcaggagcagtagggacggcgccgaagccattgcccgcagtaacagctaacgccctcaccattgttaccgagcaagaagtgtctagctagctagcactgtgttcttgcagcagcagcagcaagcgagaatggaagatggataagtagcacacaagcttaaagtgcttctgttaattaggtgcaggaaaaattaagcacgcatcttatgaagtctcgacgcgttgtttctaaaaggatagcgaatggattttccaaactttgctgagaaattgtgttcgatcagtagtg

SEQ ID NO: 34147 - DNA, 616 bp, Oryza sativa
agaggtttgatgttcctatcttttacaccctggtattagtttataaattgtcttgtcctctgcattataattttttttcttgggtaaggctcttaacttaagaggtatagtgtcaaatcaatgcaaattacgataacctgttaaatttgcccgccgtcatttgttgagtatcacacgctagtcagctcaccttaaaagaagaatctgttagggaaatgcaggagcaaggcattcagtaggctcactagcctacagtcatggggattcatattgagaaaaatattttttttgaaagatccggtcgtattgagaaaaatatgagatagcctatccctgttgatttgatgatttgaggcatgcaacctaatatgttgtactgttgattttttatggccatgcttgtgaaggtaggagtaatagagaagggcagtatccatatttttctggttttcttttccccgcatgattctgtcggagcggtttgtgaatgtcatgataagtgcagccattgcataactcttgtgcagctagctggttgaagatggagcggcaactaagcagtcaatactacggattaaatgaacgagcgggtgattctgtaggtatttatgttcaa

SEQ ID NO: 34148 - DNA, 1756 bp, Oryza sativa
  unsure (1)..(1756): unsure at all n locations
ttttaaaatagtgtaaacaaagagttcacgtggaaattaagccctaaattccaccgtaaaatatgcaaggtgacaagagtgcataatgtacacagtaccttctagatatagtctttcttatttttacttgagttacacgcactcaattattaaaaagctgtagctaggagcctaggagagatggttatatatctaccctactaaactcacatgatgactatgtgttttgttaattaatacaccatccgttctaaaatataagcatttttaatatagtgacaagttaaatattttaaactttgattattaataaaaaaataaaaaatcaatcttgtaaaattgatattactagatttatcattaaacaaaatatcataataatatgtattcatccgtttcacaatataagtcattctatcattttctacattcacattaatatatctatctagattcattaacatcaatatgaatgtgggaaatgctagaatgacttacattgtgaaacgaaaggagtaacttttttatttaaaatatcttacttttatagatattgttagtcaaagaagcatctcggagactgtatcagagtcaaaaatgcttactacctccgttttttaacagataacgccgttgactttttcttacatgtttgatcattcgtcttattcaaaaaatttatgcaaatatataagatataaatcacacttaaagtactatgagtgataaaacaactcgtaacaaaataaattataattatgtaaaatttttaaataagatgaatggtcaaacatatgagaaaaagtcaacagcgtcatctattaaaaaacggagggagtattagtttatgacaagctgggagtaagtggtaattagggtcagctcttgattttaattgtaataatctcgtcacagtcattcacacatcagaggttctgctcccttctctgcgtgattccaattacccagaactatcgtgacgncnngcagtgagcattgctttaagtctttctggacatggaagaagttctgggttggccatgnngtatgtacgctccggtcataaaatgagcgcaaattgggctcgttttttaaaaaccaacgtgttgtaatttcaacaccattatcaggacggcgcccctgtttctgcaattaaagcacccataatagtaaagtaagttgctctctataaaacatgtacatctcagcaatagactagattaatagtaaatcacctcaatagtatgtctacatggttatctatagctttctcatgcattgtctcgtttttctctatagactatctctaggttagtagatagctttgctctctctcttcatttaatatcttccaagtaggaaaatatgctgatatggatcttttgtagagagcctatagataaccattgcggatgcccttagtagcctataagcaacctagtcaagtatgagtagctcacagcaacagcaaccactaactagtttatttgtagattaggcacattttgtcaacatttttaacccggcctccttgtgctcgaatgcctaacaaaaattaaaacctactacctctgtcctaaaataagcgcagccataagtttccgtatctaactttgaccattcgttttatttaatttttttttgaaaaatctaaaacacataagtcgcacataaagtactattcatattttataatctaatagcaataaaaatactaatcataaaacaatttttaataagacgaacggtcaaagtt

SEQ ID NO: 34149 - DNA, 550 bp, Oryza sativa
tattcctgcagccccattataactttatagtaagatagatctagcacgtacatggataatcccatcaaaataataattctagtgtaattatatacccacttactgtaaaaattaaagctgcaaaagaaacatgtaagacctcatatatactggaatgcatatttagaaatcttttttttaataatggtatgcatatttagaaatctatactccgtacagaaaagattagtatcggtggtggttccgccactgcctccactgcaactcccaacgaaaaaatggcatgtgaggctagatggcccacatatcaactactctcaccaactctttattttttgtgggaagaaaaaaattagtgtagaactaaaaagagattaaaaaatatatacgacaaatgagagatgttaataacatgttaaagataattttcttaaattgcaattctgttgcaccgcacgggcaatatgctagtatatatccaataaatttcaacaggaatgcatggttttagactatatatgctcgctctttgctgtactattgaacacta

SEQ ID NO: 34150 - DNA, 527 bp, Oryza sativa
caattaatttgatggcttcagctttaaattctgtggtgtaagtcttgtgtttcttgctcatggtaaactcctgatgagtgtgtttagtttaccaagttaaaacctcctgttttttcagcacacatcactcatacttgagctggttcacgcgcaacttctcgaaggtattctcatgcgttccttcgaagacggtctggatcactgcgaaccccacgtcttttgagctcaacgctgcatgcaacttttgtagcgtcggaaacccatgcaaatggcaaccttggcaccaatgctggaaggcaaacaagattttcgggccgggcccgatatctgacagtttgaacggcgcgatactttccccatctttgccaatccatttttgcacccgcagctcaggcgcttgtcgttcgatctcgttcatctgatcctccaaccccgatacagaagcttagtggatgatcgcgcgtcgcgacggtgcgcgaacgtccgaccttattttccctatttcctgaagccagaatagatcagat

SEQ ID NO: 34151 - DNA, 511 bp, Oryza sativa
tacgtggtgtgtacgtgcagaactgaagagtatgttataatgtcaaattccatttgctatcacagagagtataaattttatccgtcaggtttgtgcttcgcgcttacggaaccagccggccgtaattaaagtactgttagcttctctctttttttttctttacacgaaactttatcatgtactagagaatagatagattcactgtacaatgctgcaaaagtatacagtaatactccgtattttaattagatcgctggagacgatttcgcaattcacggattgatccaagtcgacggatggggaaaatgtcaggaaagtggttcgcgctttgcttgtcacaccatttcggcccaaccaggcaaccacgcgcgtgggccgtgccaccaggggagcgaacgtacgggccggcccgcgcgtggccgctgggctgacgaagcgcatcgatataggaaagatcgagttcctccctttaatagcaaaaccgggtataacgtatctcttatcatttaaa

SEQ ID NO: 34152 - DNA, 542 bp, Oryza sativa
aaaagggaaggaaaaaaactacctggatctgccacttgccaaaagttctttcctatccgttaagtttggtctaaggtgggaaatcatttacctagtgacgtgaaccaaattgaacatccatataattgatatcggtttagtagaatatcagcagttcaccgcactcccaacatctggataagaacacgtgcaactagaatgacaccctaatttgttcaaggttaagaacagctgacgccaagcgcaagagagcgggaaaggaataaaggggatttggattgcaggccgaggagaagcatgagactaccactaatcagaagaatcttcacatgacctaagcaagaacccccaccaatttgatccactgcagcaaagctaagggctcttccatgattacaccaactcgtaaaaaagggaaagttgcaactcggtgtagggtggactcttaactcgaagtcgaaacattttgactctatttttaggaaaattctcaacgcaagagctccatctggaacggaggaaactccgagtggattcgagat

SEQ ID NO: 34153 - DNA, 716 bp, Oryza sativa
ttcctgcagccctatcaaaccatactattacacgcttagtactactacctaaatggggctcatgattacactacgtcattagtactagtacgtggttggtgatagtcaggttggttatggttagggaggtggtgtgacattgatgccgcgacgtgggcagctcactagtcaattcctggagctttggatggcagcactgactctcacttgggagcatatcgttttcgtgcgagcaagtgcgagaaactaattgatttttttgtacaggtgtaccgaaatgcaagcgcagctaagtactaatggtgtacagtaatgctgatatattccaggaattgggggtgagctagctagctggtcaatgtcgatggccacaccaggacactaccccacttgcgcagttagttggcagtcacctccatacagattgtccggataagatggccggatccccaacctcacttcagcctcaatggctgccactgttcatcatctcattgcactttgcacttggcagcacagcacagagcagaaagttcttatgcttagcctaggccccccaagattctagcacttgtactcctactagatgaaccgtacaaaattactgcaaatccaaacaaaacgcaagagatttccccgttctaactaatagtgtcttgatagtctaatcaggtactattatcagtgtgaaaacatgacataatgtaaccaggttg

SEQ ID NO: 34154 - DNA, 557 bp, Oryza sativa
gaataaataatccaaccaaccgagtggttttgataatcgtaatcaaccaagtgacttgatatcaatatatagcatatgcggtgtgaatcctccaaataacatgatccgagtgatataccaactgctttgtaaaatatgatgagtgatatagcaaaatagctataaagaagcttgtatattgtgaataaagaaatttccaaagtattgggcatacgccatgcgcacactgctttaacagatgtgctttagtccctagaagacacatggtttcaccacacctggaaatatatggcatatgtggtgtaaaatccgagtaaataaactcataaaggatttaccaaccgcctagaaaatgaccacaatatataatcagcctaagccataatattggtcaataaaaatgcacacttacgtggcgaaaagcaatgatattgtatccaatcaattgcttaaaaacccaaacagcaccttgacttatatataaaaaagtcagcgggacagctatataaagctttactgcttgacaccttttaagatgcattgtccaactcctaaaa

SEQ ID NO: 34155 - DNA, 529 bp, Oryza sativa
tcctgcagcccgccgatcagctgtaggaatttggactggagtggatgggtacgacttatctgatggtgaaattttcctttttctaaagaagatgggtagcgtacatggtgatggtacaaaaaattacccaaaaaaattatgccttctgaaaaggatccttgaaaacctccatggaaatacgatggatgctgctgcttcatacctcggacaaccaaggggagaggagtagcatgctagcagccatggcagaaggtgcttttctttctagcctcgttgaccgtctaagcaccacagccttgtcggggatcacctcgttgtggggcgtgaaggagcaggtggattcactgattcacgagctccaggcagtggaatgcttcctcaaggatgccgacctgagggagatccgtcggcaagccacatccaacaacaactggttctggttacactccctcagagatgccgcctacgacgccgaggacctcatcgagagcgtggagctccatgaggggaggtatcacactctgaaccc

SEQ ID NO: 34156 - DNA, 894 bp, Oryza sativa
tcctgcagccctagcctatatggattaaaattctagacttgacagttgacgttagtacccgtatttatgactaattattctttcagtattaggcgaggtacctgtcaataacaatatgcccgtcatgtctgtgggtttataatgtgtttttttaaaaaaattaacagtggtttttatactactagtatgctggtacacggtcggtgcacttgtttagccgcgcataccacgtgacgcgatcggcgcacggttccctccccggtccgtaggccgcagccacccccacccctccaggtcaaagccgccggggcagccagccagagcccggccggtccaatggcgccttgccacgtgccccctccctccccaccggtccactgcgcccatcccacgcacccccctcttctcctcgcgcggactccccggtttgaccgcgcatcgccacgcgtcggctcaccattggccggggccgcgccaaggagaggccaggcgagcttcccgaggagccgcacccgtcgctttctaattttttcttttctcccaccctctctctctctccggtctccactccctccgctcctccgctcctcgcctcttttacccgctcttccccccgatctccccggactcccacagccgcagcgaacaaatcccgcgcgggttgggaagagcgagctcgtgaggagagcagagggaaagcgcgagggggaagaggaggaaaggtgatctcttctctcccccctttttcttttttttttttgcttgtctcgctttttatttttttgctacctttacggttgctgggatttgggggagttggtggttggttggttggttggtggttgcgtgaatcccaggggtgaggagaaggaggtggagtactcgttcttgatc

SEQ ID NO: 34157 - DNA, 1801 bp, Oryza sativa
tgctggataatcatgctcttgagatgggtttctagctagctgggaggtatgcaactcatttacatgtatattcaagtctgcatcggagttatcaccatgctcctgtattagaaatgaattaaaatgtaagtcaccatagaagagaaaattcaaaagcacgacgtgaccagtaaaaaaggaagcaagggagatctccctccttaacacaatgttcattgattatgatactacaaatttgttcgtaagcagttcaagctttatgtcaggaagcttggagcttctttcaggtaaacatttgctatcagcagcgcagtggagtctataataattcagacatgcctaaaattactttttttttttgcaaaccagtgaatattaaaagttgcatcaatgtggcaatagaagaacagaataggctgcggtgagacatacagtactttgaattcctgttacacaaaagttattcccttattcatagttcatacaggacgtgaattaacaatcatggcaagctagattagcttattgcttacaaattagtttagattaaattaacaattgtgtttaattttaactcaggacaaaaaaaagtgcatgccatctacccacaaagactgaggcatatgttactaataaaagttataagtaaaagacttcgttgataagtaacaaatgcagacatgttcttcacaaaagttaaattaaatttgattgttttagttcctatttcctagggtggtcttgcctgtgctctgacaaatgataacaaaacacaaatgaataggtgatcgagcatgccttcattgcttgttagttgcttccttaatataaactctacctccaaaattggtcgtcctatgactcgtattcctatcgctaacaacagcataccgccataccctacgcgctttgggtacgattaagttcagaacaaaacagagcaaaattcgcccaaattcacatgaaaattaagaacttccgaacaaaggatcaaggggtaaccaaaataacctataaccaacggcaacaaaatggatggggggcttggaacagaccggagcacgtagaacacttgcactgagcccgtcttaccgggattaggatttagccccctttctacacccacacccacggccgcggtggcctggtctagtatctcaccgacctcggccttgccctccgccggcgacgccgcagccggcgagaccctatggcggtggcgatggtggccgcgcttgtggcgcttcggggaggaggcgccgtcctccgcgtcgtcgtcgtcgtgcggcgagcggcggtgcttgcgcggggagaggtgcgagcgggcggcctcctcgctggccatggagacccgagggaaccagctaggcctagggtttggtacggaggaggaggggatcccgcgccgcggcgaggaagggtatgttggtttggagttggaagaaggaatcggatcgagcccgggaacgaattcccctcgtgatcaattcggccaccgttttgtaggaggaacggtcgattggagcagaccgttcgagttagacccggatgaggattgaggcggtgaggcctcccttcgagcttacagatttggggagatttcaaatagttcgattcgaaaaatgaaattgggaggttctttgataattgaaacgcagagatccttacgattattttatataaaaatagttcgaatcgtacaaaatccttcaaaaatttcacgttcaaacggacttcttagaaagcaagggaaccattggcttgggccattgtttcctttccggaataagttcactttggg

SEQ ID NO: 34158 - DNA, 671 bp, Oryza sativa
ccgtaccacggccgcctcgcagctctgctatggccacctgccatccccctccccctttgcctgacctcaaaacctaacacttgagagctcaaactattacgactaaaaaaaagtgagatttgaagggagagacatccctccaaatatttttttagaagaaaatgtgagtgcgtcgggattgaacacaagaccttagggttgaaaaccacacacctcttatcacccgcactattaaatgcatctaaaactactattccatctgtcccaaaaaaggtgaatctaagactggatgtggcatattctagtacaacgaatttggacagatgtatgttcagattcatcgtattaggaggtgtcacatccggtactaggtaggtttttttatgggacgaagagagtacgactgaagcatgaatcaaagaataaggggatgtttggttgatgcctaaccttgccataactaagtttaggcatggtggcacaaatgtggcttagaaatagttagccacaagtgtggcatacttagctctaaatttgagagcatgacatgtgggtcccaaagttaagaaagtgtggcataacacaattgcggcagcgaaccaaacacatgcctaaaaaactgtagcatgactaaagtgtggcgtggcaaagtgtggtaaccaaccaaacag

SEQ ID NO: 34159 - DNA, 990 bp, Oryza sativa
agtagtagtacatacttatatgcattagtatgtctgacttataaaccatttgtatccgtttataagaagatgcagaatgtttttagactattaaacggttgcttagatctattgaggccaaattgtcatatgcacaactctcggcccaatctgagaaagcaactctagatttcaaacccaccaggaggcagcgaggcgagagggtgtcgatggcccaaaaagcgtcatcatgcagtcccattatcaggactctggttttcggttttctgagttgtgactggctgactgctctgaaagtcgaaacaaaaaccacacgctattgattgtctttgtcaaagtaacgattaaaatgtatgctgtttttacattcgaaaatattttcataaaggaaaattcatgtctaaaatacgtacttttgaaatatgaaaacgacatacattttgaaaaaaaaggctaaaatgacggaagtatatatttgatagaagatgtacgctccgtccgtctcataaaaacaaaactaatactgtaaatctaaataaaagtttgtgtcatactatagttttgtattagagatagagagagagcacttactatcaagaaccgtggcaattggcatggctcacctcccagtctcccagcagaattcccctcattttgtcgaggtgagttggacacacttgacgatagtctcaaactcccaatgctccaactaaagtattcagatcctgaccagtatccccaattaaaatgtttttatagtatagtaatattatatggcttgcatgtttgtaaggcaatgttaataatgagtgtgatgaaattgtttgtgcatattctcttcattctataaaaaccacttctaacacgtcaaacaagtacctttaaagatgtttttgccagtactttggtacgccatccgtgaataagtcttttttaagtttgttcgtttttagaaatacagatccgtatttaaatcggtgggctgcagga

SEQ ID NO: 34160 - DNA, 1011 bp, Oryza sativa
ggtcctgtttggttccataggctaaacattagcccccaccttttagccatgaattagccctcaaggatccaaacaagtgggctaatttttggctaaagtgaattagcctcctcaaaacattaccctctccaaggggtgctaatggggctaattttgtaggggaccataaaaaggcagccctctctctccttctctcacctctctttatactctctctctccaccttttagtcttgaattagcccatggatacaaacttaccactctaggctaatgtttagcctaccaattcatgactaaacaatagctctcaaaattagtcatgagctaatctttcaaacagggcccagatgtatggctagaattaatgcgacacggggacagggagctaattaaacaacagttcttaggccctctttgtttaggcttataagccaacttataagtcaaaaagtctaagcctaaacaaacaagcagcttttccgtttagcttttttgaagccataagccactctaacactattaagccaaaagctaggttggagaagcttttttggcttatgtgaggtagatgtatgactcaaccactaaacttaggacattaaatccaccggcttataaatcatataagccaataagctgacttaaaagtttaagccaataagtctaagcctaaacaaagagggcctttaagtgtgcaattaaagttcatgtgtttcggtgtgctcgatcgattaatctggcccacaaacacaaaggaaattaagatgagaaagctaaactggactgcgcattcgtatagttctttttttaggagggttaagaaattaagagcacattcatatagtaaaacacagttgcttggacctgggctgagctgaaatccaatgtgcgatttcattagtactacctataccaattacggtcctcccgttcttcacacctacctggctacccctacttacaatactctctccgtctgtcttattttaaatgcaactatgaattataa

SEQ ID NO: 34161 - DNA, 732 bp, Oryza sativa
tagataaatatccattttattaatggcatagcattagaccaattctctattaacattcccattcactcacttatgatgatgtcagaggaatggctggcatcaagatattgggccagttagaagagctttaaatttagattataacaagcaactggtgggctggaatttggagaagctaaaaaaacaagcttttgccttcgtttttttttttggattatgttgtttgaggaagcttttgattttaaaataaattacaggaagctccccacatgccaattgtagcgggacattttatcgtatggatttactatcgtaagatgcttatcagttataaaaatatatgatttggggcatatttgaaatcattatttttaatttttttagaatcaatatctttctaaatgttttgattaaatgcatcttatgtgtaaaatttatataagtgttttataatattatactataattttatatgtttttttctaatatcttatagtagaaccagtgctcggaatatattctgaagactgtttggatgtacaaaatgacatattttggcataaatatgccctttttatttcacttacgaagttataatggacaagtttggctctatggtgcattttgttagctatattttaagaactagccaaataactgtgtgttgcaacggattgtagaagatagaaaaaaaagtagttctcatggttaaaaagggaatgggctgcagga

SEQ ID NO: 34162 - DNA, 1461 bp, Oryza sativa
gaatagctagcatgcgcagcgcaggaggcgccgcgcgagcgagtgtagcccgtactgccgtcgcttcgcggcgttgcgggttgcccccgcgtgcgtcatgatcacgtacagcctgctaacgactactgactagggtgtacttagttcacgtcaaaattaaaatttacattgaaattggaatgatgtgatgaaaaatttagaagtttatatgtgtaaaaaagttttgatgtgataaaaaagttaaaagtttaaagaaaaagtttgaaactaaacatggcctgcagagtgctcgcgagtgtcaatgtgtcatgtacaagtcaacgggggcgaggccgagtatacgggtcaaactaggcccatgtagaaagtttaaaccgtgagcggaagcaaaggaatagtttacttcgaatccctcaaattatagtttaaacctgattcatttctctaaccatcatactggatttcttgatgcttaactattaaggccatgtttctttcagctcagaattattataatccagattattgggagtaagctgaaagaaacagacaacttattaaagtagcttattataatctggagcccagcttattataatctgataagctcatttaggtgagctttttccagattattggatgaaaaattatccaccatgccaccccactccctctttagacttgcaaacctaataatctaggctctaataatctagaaaagaaacaactaaccacttattctactacagattataacaatctagcttatactaatctgactcaataatctagattataataatcccaagctgaaagaaacagggcctaaaacatgtataattggactcccgcatcagcagttttcactgacgtgacgtgttgacttggtccgcatgtgttgacgtggtagcccaatcacaaaatagaagttcggcccacatgtaagtgatgggaaaaataagaaaaaatgtagggcctacttgcagtgcccttctcctctctctatcctttttctccaaccactccacacctggcacagcttaggtccgacccgtggtggccatcgtcggacaacacagcgacaacaaggctggtgaacgccgtggtggccacctccatgccgccggatgtgttacactacttctgaagtctatcctatcctccacgtcaatcacatgcaaccacgtgcgatcatgatctgcagttagagatagagttcctattatctagttaatcttgttttgcatgcgatgtaatctcttccaggttgttaggtagctccctggtgatcgctcccaggttgttgggcaacttcctggcgcacatgtatagccacaatcggggctgttccgatctaattaacacgaacgctccgcacagcgtgagtgcgagagtttccatccaatagagaaaactcacatggtatcagagcgttgatccaatctaccgaaaaatcaatcc

SEQ ID NO: 34163 - DNA, 698 bp, Oryza sativa
tgcaagtgtttttggtgggtggattggctgagaactttaggccaagttgaattttgtgctgaaatagcgcaagtgtgcttgaattgaacccactctgaatgataagagttcgtcccggaaagaatgcatgaacattataggatttattagttaattctcaccaaaaccttatgtttcaaagaaggcgttcagccctcaacagctcaatataaaaattttgggttatcaattgatagataatctattttttataactattaaccggtacgaacgaatgaatttaatattaaaaattatatataaaagcttttgtaaaaaaaaaacatcgcttctaagaggcgtacgaacaaaatccagaatctacaagacatacccttggttaactctccaggtgagcttgcactgaaacgaacaattctcacgcacattcagctcaagcaaaaaatcacacttgggtaatttgggtacaaaggattcaatgttgagaattcagtgatgagttgcgacaggtcaggtggggcggacatttgaatgcattggatcaagcaagcacgtggacgaacggacaaacggaaaatcaaacagtgaagagctggaatcaagtcatctgctgttggcagagacaaaaacagcggggatttcagaacccaagaagctgaactgccctataaaacacacacgtggtagggctgcaggaa

SEQ ID NO: 34164 - DNA, 529 bp, Oryza sativa
tcgaaatggttaacagaactagtatatatgtagtgaaaatggcggtacaattaaaacatatgtggcaaagcaatagcaggtgatatttatagccacagatttggtaaaccggaataccatgaatgcaagtttatcagaggaaagagtgccttacattgttgatgatcagcagctaagctctccgtggtttccccatctatctcgcagctgaatccatcctcaatacaatcctgagagaggactaacgcagtaatttcttcgtcgatcatcttactaaccatatcacccaccttgtcatcatcatcagaggacaccgcggatttatcctcactggtgttagccatgttcttcagcaccacattgcgctgcttcgaagttacatgatccattgcatcattcccttcaccacgggattcatatgatactgcactctttctgacatttgacaaatcagctgatttaagaggcaccagctgcaggacattgccaacaatctcggcacattgagctgccaagccagccatggcgc

SEQ ID NO: 34165 - DNA, 666 bp, Oryza sativa
agggtgcccgaagaacgcgcgcgcgcgtggccaaggtggtgggattgggacgaggctggcaatggcgtacgcggcgacgcctatgtataggaggaggagaagaggaagccgggagaaatggagaatctctttgcccgtgtgggagacgaggaggaatggaacaacagggggtgagctggtcggcagatcggacgcttcctttatataggcatcagcgtcaagattcgtgctgggatataggagtacgtgccacgagcacgagtgcacgaggtggagtcagccacgaaatgggaacacacaaaagtcacggggtcggcaaattttacacaaaaatataaagtgcatgttcttacaaaagggaagcattgcctttcatatacttgtcactcgttactatccagtttttaacatttgggacatgttcactttaatgacattttcaaccttaccaagttttggtatagttgctaaaaagaatggctacatttaatttgctgccaaattttaataactatataagaaatcttgccaaaatttggcaagttaccaagtttttggcatcaaagtgaacaggccatttatcactcatcttctatgtagaagttttatagtactatatacttagattgagaaaaaaatatttcttaatgtgatatccaccgttct

SEQ ID NO: 34166 - DNA, 1307 bp, Oryza sativa
attgttctgttttggtactgataggagcagtcaaaagtttcttttctagctcattctgtaagctgagtctaattgattctttaagacatcgatcagatgaccattttaaaccagttgccttttacggttttgcattgattatacatttatactagtgaaagagccaagaggagaagtggagaacagggtagagaggcatataacccttgcctgaatccgaacaagtttgtgagttactgagttagatgttttttggaatattgctgaatagaatttgttttgccaataataatcgctctgccatcctcgcagactatccaacaatatttccatgactaggatattttgaagtgaactgtattttgagttaaaacattatatatttgccaatagttcacggatagaaattccgtagtggatcttggtagtgattggtctgcacagttgatagatctctgggtgcttgcagcagttaatcgccttactgtggagaaagcattagggccaacagattacctgctttgcacagattgaagataatgtgtagaattggtgccttggtatcccagtttgactaacatcagaatgccttctcatgataactgattacagtccctaaattgatatgcttttgaagtatctattttgaattgaagcttggcatggttagcttatatgaagcttcatatctcatttgcgtgccatttcaggatgtgtagcaatgagtcctcttttgttttcactccgttaggccccttgtcagaggactgtcttctcttccatgtttttgtgctaaacacaagcatgccattctaaatatcagtgtgcatgcttaatgtaatgttttgcaagtgaattgatttttcagtaagatggtgctccatgcagccttttttttttggcaggcagatttgtggctcatgtacagttattatgagatattgggaacagtggtttactttaaatgtcctgttgacctggcaaaaggtcgggacatccatgttctcaactctcaatcgaatgtgtttttgtttgcactatgtattattcatattttttatggttcctaactggtgtattttcctgtgtaagtactgttggtttccagtggtctcagcacaccatgcaatcgaccaaaggtcttgaacgacagttacaatttcaagcatgacatatgtactcagataagagaaccgctatgtgttcaaaaagataaaaagatgcaccatttgcagttttaatctgtttttcccccgtcctgtgacaacataaagaaacagatcaatcgagtatacgtttgagtggca

SEQ ID NO: 34167 - DNA, 640 bp, Oryza sativa
cctgcagcccgaagaaaacaaaattgtacataaatgtaaaaaacaagtaataaaataaataactgtacaagtttcgatcaataatttaatagcactattaaacgaaatggaaagatgatttttttaaacacattttcttatctaagtctcgaatacacaaaaaccacataaatgaccatctcattttatatagaaacagaaaaatgaaatatgcttatgcttaaggttttctttatgaaggaagcactacaattcactcccggcaaatatttccgatttggagttccgttcactgctggagaaaccatatttgctgggttggccaaaaatcaaattagtctcggttcctatggtaaccggactaaaaaaactccaaagggactatatgataccaaccggttcaacggcctgtcaaggggctaaggatttttagtcccggttggcaccaaccgggacaaaagatcctcactttagtcccggttggtaacaccaaccgggattaaagattatttaaatctttagtttcgattggtgtatccagataccaaaaatttaaaaaccaaaaccgttgccggtcacctctcactcacccttatcttctctgaatccactgggcacgcctcccacactttatctctcc

SEQ ID NO: 34168 - DNA, 613 bp, Oryza sativa
cggtatgaaattcagcagtgggttttattcatgcttgttgtgcctaaatgatttgcatacttcaactgaaaggggctcagtcaacgaagcatgtatactctgtagtctctccagattttttttaaaaaatgtcgatttagaaaaaaaaaattgttttagacgagaacacggtatcctaaaaatgactctgaatatatgtagggctattaataaatatatatgattatactgaagtaattttcaagattaatctatacatattatcctatgtttttaaagtagatattatttatagacaatttttaaatgtttaatatagtttaaaagacaattattttcaaagtaatttcctactaattatcgaaagaatctggcaaatctccttctatacgaagtgcttccgcagccgctgtagtcacctgcagaatccaatgcaacatttcggcgacagcaacaaagcagtctcggtttctgtttcaattcttgcgaattcaagaactgcatcagttttcagtccgtgcggctcgtgtattgcgcgtatcgactactaccaactcccaaccagtaatgaattgcatcacccagttaccccatgagaccgaggatcaccggg

SEQ ID NO: 34169 - DNA, 748 bp, Oryza sativa
gcatatctcatgaagcattcaaaaatgacaatgacattgaaattgaagtagagtttcctaaatagtttagaaaagtagaaatgagtgtgtagcggggacgtgcaatcagttgttcttttcttgactttaatcgatcgccagtgtgcataataacagtcgttcatactgaacaagacgtacttatctgctagtcctggcctcctggcatcgactcgaacaaggagcaaagttaataacaacctccaatttcggggcatacgtgatccgaatcaaaaacctacaggatgctgatgcataactcatcttctgtttgaagtgtctccgtacaaccaagatcatatcaccgatgaaattattcacacgactctaattaagattcgacttatgtattttagttttttttccggtgatgaaaagttgtcatttgaatgtgtaccagtaccaaatcagtcctctaaacattagcatatactccctccttcccaaaatataacaatttatccaccaatattctcttcccaaccaatcacaatcctccaccattcactttttccacctatcttcactactcattcaatcacaatcttccaccactcacttctacctattttttttaataattgggtataaccctaaaacttcttttatattcgggtaggaagggagtataagcaaatcatcgacgtacgtaacccagacaaacgatttatcccggtcactcaacagcccagtgtgtcatgagtcatga

SEQ ID NO: 34170 - DNA, 726 bp, Oryza sativa
tcctgcagccctgacatcttgatggtattgccaagcggccaggcatattggaccaagtctattagcactattttttttctcattctacagtagaatacactcgcagcttacgcaagaatcaaacacatacagcacagctcaaacaaaaattcagaaagcttaataacttgagagaagctaagtccaaagaaaatcttagctatcaaatagtacatactcaataaacagaaccatgtaggagttgtactacctccgtcccaaaaatataagggaaagctatgcatttacattgccaaaatcccttacattttgggacagaggttagtatcgtttttgtaagtgtagtcataacattatattatgattagcaacatttctatggtacaaacaggcatacaaaccaatgtcatggcatggcttattagatgaattagttaacagcattcaaatgggaataagaatgaaatccaaaatggtagtcaaagatgcccttctgcaacatgatgaaaagctaaaaactcatggtgttttacttgtggcaagcactaaaagtaaagcaattcatcagaatgtgataaacctggtcagaaataactggtgctaacaatggtattgattcctggttttataaactacctgaggggatcatcaaaaggccaatttatgcccttagcccctcacatatttcatatgataatgtatcggtgtaatctgacagttaaatat

SEQ ID NO: 34171 - DNA, 758 bp, Oryza sativa
caatgctctgttgcaacctgtaaaggcagttttgtgcacgtcacacacagtagacgccgaactcgtcaagcgaaagagatatttacaaaaaccatccataagtcacttaaaacttaacatttcacattataagtattttattaaatacgcattgactactcaattttgttctaaagaccatcccactgcacacatgtttaaccatatcaatatatttttataaattgtgagccgtcaatacgatctttattgaatttaaatacttataggagtatagtcttgacctttttttagagattctacattgaaatatgaataataagtctaatgcaagtacttatccaagattggcttagctagcttaacctttgatggttctacatcagtgatacggggccctttcagttcagtaagtgcacattagtgttttttacaataatttctaggggtgaacagttgcaactaaataatttatggggcggctttctgtaaatttcccccaaaataaaagttgggatagtcgctagtgccaagcaaagcaaccagccaaccatatgcacacgccgagccgcgagtggttgctcgatcgaccaggtccaggtgcaatgcaatcggtcagttgggactcattcatgagccgcagtgcagtagtcgtacgtgtgtcacgtaaacagttaggtagcgcaccacttacgcgccgcgctagttggcgacaccaaaacggtttaaaaaaagagaaagcgttcaaacgacacgat

SEQ ID NO: 34172 - DNA, 1104 bp, Oryza sativa
ccgccgtccatcgccgtccggtcgcagcgctcgtcgatctgtgcagcagcagcaaaatgttcgtcgtcttcgtgttcatcaaatcaagcagcagcacgtcgtccatctgagcatcgagaagcagcagcagtagcagactagcagtcgtatctcttcaagcagcaaacaacgagcagcagcaacagcagctcttcgtatcccttccagatccagctccaatcgtcgtcggtctcgtcgcccatcactgtgagccgccgccttcatcgccggccaacccatcctctccatcgttgtcccatgctcccgccgcggatcttgtcaatgccttctctgttgctctgctgatttcgtggattttgttgttttttgcaaatggtctgcagctcttttccaaaacctcaatcaggaacgcatcaaactgccatggtgctcgtccagtcgtcctcctcaaaatgctgctgccagaaaatcagtaagcgtgcacttgtttgccatggatctagagtgcatgcttgctagtgctagctagtttagtttgcacctgtcagtaccactgtccactgaactagtagctgcaacttgcaaatggttattagtttagttagttgcaatggtctcaattgggagtatagtccatgtccatctgagatatgcatcacgtgttcttccacaggtgtccagtgtccactgccgtgctactgtcgtctactagttcaactcctttgttatccattgagttcaccaaagtctattgcatatcatcaattcatcgaagtcattcctgtcaatcaccatcatcgtcatcaccttatcatcatcaatgtcctatcatcatcgctaactccctgtcggagttggtatatcacgtcaccagcttcccgtcgaagttggtatcatcatcattcagtgaaggtccgaagaacagtttgtgaatgggcttcatcatcatcgtcattgtctctgaatcaatgaagagccaaagaacaatttgtgagggctttttgtactgagggctgaagaatagtttgtgaagcgcaagatccacttcacatcatcaatgcaatagtttggtaagggtatagatgttaaggggtattttgggga

SEQ ID NO: 34173 - DNA, 805 bp, Oryza sativa
cagggcgagggcgatcagaagattcgactgtactcgaacaacggttaaacgattcaaacccgaattgattcctcttcccctcacacactatgtaagcccaccaccgaattaattcatgcactatataatcccaccaccgaattgattcacgcactatataagcccaccagcgaattgattcctctccctctcacgcactatataagcccaccatcgatagaccttgaacaacagataaacttatcgaaggaccctaattgattcctctccccctcacgaactatactatataagtccatcaccgatagacctcacaatggataaacgattcaatccgatttgattatcaaaggacccaaattgattcatctccccctcatgtattatataagcccaccaccactcatgcactatataagcctaacaccaatagatagaggaaatacaactatgatcacgtgcactattttatcatcggtggtatgtcttcttctgttcctgtgttgcacctctgcttccccagttcggagcacttttgcgtgcacaagtgtttaggagagtatctatacgggtaggcaggtgatcaaatttttggggagcgcttcctagcgcgactgctctgctgcgtcagttctgcacgacgtcgtcttcttcatctgcatcgttcactttgactacttccactacaacggcatgtctactggaggaggaaatgatagaggcgctagcagcaacggcacacctggaggcggtaacagcactcctattggtgacgagaacatcaacatcaatggaggcaacaatg

SEQ ID NO: 34174 - DNA, 686 bp, Oryza sativa
aacaaaactcaaattactatatgtatatttacaattaaatttgttatttttgttacaagttatagaagttgaatttgaacttgtatatttatgtaatgatatattacatatttatctatcttgccaaaattttttaaaaaaatttcgcaaccatctaattaatatgtaataaacggtggacgtttactcgagctattagtatccatctcccaaaacaccaccacaccaaaccaagtaactatccacgctataactatcagcatatccttggaactccttcaccgtccgatggtctacgatggtctaggccgagaaaatcggacggccaggaataggtcaacacgccgaaatggctcggcttgaacaagcatggtttcagacttaaaaacgaaggtggccaataattaaaaaaaaaatcatgtcgatcggtgacgacggcgtgtgaactgaattttttttttggatggagaaagatagcgaacttgcaacagtacagctcaagaacaggatcatcatgcttgcaccttgcagagttgcaggcttcaaaattaggatgcaggtgttctcatggcaagcatcaattcaagctcaacaactcaatacaacgtaaaaatcttcagcacaagtcaaacgtagcaaagcagagatggattatcatcaagcgattattcattcctgacaggcta

SEQ ID NO: 34175 - DNA, 843 bp, Oryza sativa
ccagttaattacggctgattataagccagcttattaacgataaaaaaaatgtgagtaaaattttgtatacgtgtgtttagcgacttaaatattagtgctgaaaaaaactatgttaaaaagattaaaattaatcttaaaatataattttaaatataaattttaacattcatctttaatataagttgctatgtgtttctacgtgctttactacggcaattactaagtaataatatttagtgttcttgttgataataattgagcttaggagtaaaaatatattagttattaacaacaaataaactggattaccaaaccaggtttggagaagtaaattagtacactttgtaggagattgtagatgaaaaatattaggtttttgtcggctaaattttgcatcgtaactctgtaagaaaattttgatgaaaaatcaatatttattagtactaattacaaaaaagaacaagtattataaaaatgatagattaaatatgtttgaaatattgtgaaaataatacgagaggtgatgattggatatgcttacacgttgatttgtacattttaataaattatagattatgttgtataacttgcgtgagctttgatacgtaattattgttagtggatgatgagttgacatgtttgtaggttaaattttagatttagatttagttgtttgggtgtgttcgctattactagttccagaaccatccgcacgaaaaacggaacggtccattagcacgtgattaattaagtattagctttttttccaaaaatggattaatttgatttttaaacaattttcgtatagaaactttttgtaaaaaacgcttagcccgtttgaaa

SEQ ID NO: 34176 - DNA, 941 bp, Oryza sativa
gtgggcctaacacattcggcccggtgcgtcagagtgaatgcgcgaggtgttgggagcgattagtaccacctcgctggtttgagaggagttggagtcgacgggtggctataaaaggagagcctgggcgactttggggcagcacgcagctgcgcgttgagcataaagcgaactattttttcgcttttacttaggccttgtttagttggggaaatcttttgggttgggatgtacgcgccgcaaatagcagcatacgccaaattttggaggggattctcctaggagggcctctacaattctcaatccgaacatttacgtttttacgaatgattatttgaaagttatcttttttttacgaatgattatttaataaaaagcaatctagaatgttcgaaaccttaggcttaaatgaatcttcattctgttgccccataatgttttaaatttaaatttggggtttgcaagtttttcgagacgtagaatcgtttgtggctgtggccggtacgagactgggcattctgcttcattatttacttttgattacgatttacataacttatccttttagtccattatttacttatgtctttacgattcactaaactggtcctttggagcatatcaaactggctggttcataacatgaggtaattaaacgatgtcccatgacaacacaatgttgtcaatttaactgaaatgaaagatgtctaggaaatattatatagagtaaagttcatcaccggtccctaaacttataccgctgtgtcatcccggtccctaaactcgcaaatcgaccgttcaggtcctcaaacttataccgctgtgtcatcccggtccctaaactcgtaaatagaccgttcaggtccttaaacttgttcaactgtgccatcctggtccctaaacttgcagatcactcgtttagatcctccaacttgttcagttgt

SEQ ID NO: 34177 - DNA, 1952 bp, Oryza sativa
cgttgtgttgcagatatggcgaccaagttgatagcagattatgatggtggcccaccggtgaggagtatcaaagcagggtcttgcaactatatcctgtacccaggcagcgcgtgttttcaggacacgtgcaacacgttctgccaacgcatgcaggattcagccacacgacaacgtgtccgcctctggcctctgcacttcccagggatgcgagtgtgtatattgtcctaattaaccaacgttaaatattaaaaaatagagaaagtaactctttaaaaacagaacaatatgtaatgatactgatagttctaaaagaaaaatactgctacactatgagcaaatttgtagttggtgttgggcattgatgcaacaccattgatagttgatactggaaatttaggaaaatagcacaaatgttgctattatcttaaaaacaagaattaaatgagttgctgtttttgtgcctgtgaattctgtgccaaagattttagagactgatcctgaggatgttccagtcatgttgtgaatttcaattctgagctcaagaatgacacaaggccgtacctgacagatttagataattaattattatgtgctttaatcttaaggcaaacttaagaatgatcgatcttaggtttaaaatcgtcagcatgtgcttaccaagaaaagaattgtaaacaaacttatgaatgacaacggccagacttgcatacttaaactaaagctcagtttgtcaaaaagtactacccattgcagttgaaaagtcaagctcgatgatcaatggagcattcccatagccatgaaaatctcaaccggtttacccaaaatttgagcgttcactagttttttctccgtaacaatgtgggttgtaatttgtaaattgattaccataacacaaaggtgttcatcagcgcccagatcatcgacgtcatacttaaaggcatcacgtacgttttgttgggtcaatctgaatctgaatcatcaataatcttcatgttttcttcaggccggtgaattagcagcggtgatccaagccatgaatcccgatgaatacgagaccatcagaccacgatggggacgacgacgatcagagcgagcagaggaggttgcgtcagaattcagaaattggacgtcagagtgcacatggccaacctatcagttcagagaaaacatgccggcttttcgtcagaattaggttcacccatcaacaggttgagacaataatctactggtacaataatgttgcttaattaagttcagtgagaagtagctactgaaattcacaaatgattatcaagcaacagcagattgaacaataagagatggtgaattgtttcagatggccttgtagctaggcctaacgttatacttcagtgatctctcttaattgtaaatctgtcagtatcgatgagttcttgaagtacaattttattattgttgcatccgtgaaattgaagtatacattcagaacacgaggacatattcaaaacagttcgtacatgcacgacagcacgagtgtccaaattctatttcaacatggccaagtaattcatgttctactaactagctcacaaagctaactttttcattaagatggatggtcagactagctaattatcgacaccatgaacacaagaaccaagaccatgcatgcattatcgatccatgtgtattaactagtatatagataagaatcaaatacaatcttgttagttggattagtcaatggctcaatgccaatgagctacaaaaaaagggcttacatgtagttagctgctgaccggatacaaaaggctccagatctccaacattgtgttacctaacgaggatataaactccacaatcctttttttagctttgcatgtgattgtcagctagtatgaagttcaaaaaaaacaaattaatatacaattgcaaacccaaatttaattatattgggtcaactctgtaagctg

SEQ ID NO: 34178 - DNA, 660 bp, Oryza sativa
gtcggtctgaccgggtggatgccacctgtctgaccgccatgtcaccgctggttggaccgccgccttgtcgctggtgtgactgtcgtgattcagagaaaaacacactgaagaccaacttgactcacatcaacacacaatagtatcacatacgaatagaaacactctagaaatcataaatatgaaacaatctagaaattccataaaaatacttcgaaaccgactccaacccgaagtctaccggtctgaccgtcgggctacccggtcagaccggacacccagcgccgacatgcaccgttcacggctgaaaacactgtgcatcgtattttccgaaacacccacctttaacaatttgttcatcacatagattaactcaacgcattgatttcacagattttgctgtccaaaccacacctgccatggagactgttcccctttctcatgagtcatgatcttatctgaacaaaaatatcctaaagtgtgctatcatgagttcatgacatcaggtggtatcttcttttcttttttcagaacaacatctagcccccaaaacaaactgttcatgttatcgtggcattcaaagtttcagactgttcatctcccgttctgctagcgctagcagtggcactgttagttaaaggagggagaagtgtttgaaaattg

SEQ ID NO: 34179 - DNA, 728 bp, Oryza sativa
ttactttaatatacgcgctatctatattttcccataaagcaaacctcacacgcggttttatcagcgtatgattgactaagtattttttaaagaataatcaatataatttttaaaacaacttttatatagattttttttaaaaaaaacacgatgtttagccatttagaaaacgtgcacataaaatacgagaaaagtgagttgggatagtgacaacgggtgtgttcggacaccccttttcctaacccctctctcttccacgcacacgcttttcaaactgctaagcgttttttacaaaaagtttctatacgaaaattgtttaaaaatcaaattaatccatttttggaaaaaagctaatacttaattaatcacgtgctaatggaccgttccgtttttcgtgcggatggttctggaactagtaatagcgaacacacccaaacaactaaatctaaatctaaaatttaacctacaaacatgtcaactcatcatccactaacaataattacgtatcaaagctcacgcaagttatacaacataatctataatttattaaaatgtacaaatcaacgtgtaagcatatccaatcatcacctctcgtattattttcacaatatttcaaacatatttaatctatcatttttataatacttgttcttttttgtaattagtactaataaatattgatttttcatcaaaattttcttacagagttacgatgcaaaatttagccg

SEQ ID NO: 34180 - DNA, 793 bp, Oryza sativa
tttttgacacgtcggatccacgtcaaccctcgtcacgtcagcccacaaaataatatgggccaagcccatattgtctctctctctccttgctctattgtgcttctctccctcctgactgtcggcggcggtggcggtgttgagctgtgagggcggcggctgctacagcggcgtgaagcggctacgagggcggtggcggcggcggtgtggagctgctgcgagggctatggctgcggcatcggcatggagctgcggcgagggcggcggcgtggagcggctgcgagcgcggcggctgcggcggcagcgtggagctgttgcgagggcggcagcgctaccaaggttgcggaggcagtcgccagcggaagcctttgcgtgcagtcaccgacgaggagagcagcaacggcggtggagcttgctgccccgcgcagaagggcggacctcgccggagccacacgcgtccccaagcctcatcgcctccgccgaactctatgtccccaagcagctctagctccaccggcgagctcgattttatggagaagatagagctcctggaggcggcaggagagacggaccttgagctcaggctcgccggcggtccgcgcggaagggaagactagatatgtgcttgagcttcgtcaccgcaatgagtcccctgctccacgagctcaagaatgccattgctgcttctctactgctcggggaggaagaaggatagagagagaaagtgaagaggagatgagggaacaagagaggtggtcttcatttttatttttatttgatccctaggcttccacat

SEQ ID NO: 34181 - DNA, 727 bp, Oryza sativa
attcttcctgaagtccctgaaatcacaataccagataccagcgacgttagttacacacatcagtcacatcttatacatcctacaagctttggttttcccaagctgttcacaaactcagctagctagtagctactgatatgcagtgttcatccccaagtagaactcgatgacgacctatcataaactgacgaaccgaacatcataactcgatgctgacctaattaactgacgaaccaaaccacccaaaaaaaaaaaactgacgaaccaaacatcaaagttcaaacagacaaaattggggagcgcgagaatgtggtggtcgcaggagcaaggccaacaatcgcaatggaggacactgcctaatctgctcctaatacgatcccaaaacggattggattgggaataagatcgaacaccatcaatccatcatcacctccgcgatctcgacgcagccgcacgtcccagcgcaccgctggctccgaggcgccatggcgctcgaactccgcaacgccagcaacggtctcctccaggcccacgagcatcggcacgcggccggcgacgacggccgccggccagccaaatctccggcgatagggcggcatttccggtgaggcggcgcgtggaaccggagcgtaggtgtgggccgaacggggtaggttgaaagatgcaaatgggcttttttatgtgggccggaaaaaaggcccagctacttccaggagatatttacgaa

SEQ ID NO: 34182 - DNA, 517 bp, Oryza sativa
tttttaacagtgtcccatacagtgtagggtctttaactatcatcatcaacctcaccaacactgaaaatcctgttgaaaggcactactagtactagtctccaacaataataataggaaagtagattcaccaaatagttctagctagtactaacacaaaagcagactgaaagctcaagaactgatcgatgggccgtctgatctttttgcacgcaattgcaaaggaatttcagaattgatattatccgtcagatacttttgtaggaaatacaagaatcaaaccaactagagaggggtgaatggttgaaacaccaaaaacttaaaacttttagcggaattaaaggttaccctcgtagccaatggagatcagtctgaccggcgtgtgtgcgtcggtctgaccgggtggatgccacctgtctgaccgccatgtcaccgctggttggaccgccgccttgtcgctggtgtgactgtcgtgattcagagaaaaacacactgaagaccaacttgactcacatcaaca

SEQ ID NO: 34183 - DNA, 887 bp, Oryza sativa
tggggatcgtcctgcgtggtggagacagtgcggggcaccttatactttctccgtcccaaaaaaacttaatttctgggttttcatgtctaacgtttgaccattcgtcttatttgaaaaaattatgaaaaaatttaaaaagataagtcatgcataaagtattgtttatgttttatcatctaacaataatgaaaatactaatctaaaaaaattccatataagacggacggttaaacgttgtacacgaaaatctaagaattgagttcttttggaaaggggagtatgccgcaaggcggtggtgacatggcaaaatgacctgagacagcaggggtcagtgatgcaagaaaacagcagcatggctcacggccttgctgtgcctccagcaatcgacgtgtggggagatggtgggagtttgggagcaagttgggcaccggtgggaggttggtggtggggcgctagaacggtggtcgcgtgcagtgaagttcttcggatggtggcagctgatggtaataacgaggatgcaacgatatgagggctggatcgatgttttttgagcggaagcccagctcaattctagaccgacagtggccacacttttaggtgccacaaccccccggaggcgttgctctacggcttcctcctctccatctgttgaaatttgtcgtgtgaaaatcttatcctggtttctctggacgtacgacagcgatgtcctcgacgtcctgacctccctagggcatcgttgtgaaggtccatttcctatcattctcttcttcaaacgatttgtcctcttacaacagtgtttttgaccaccaaattaaagaaggccacaccggctgatatgtgcgttgttttatatgagtaaaatgcaccaacggtccttgaacttgtca

SEQ ID NO: 34184 - DNA, 961 bp, Oryza sativa
gaggacaggtggtatcttgtgccgtctttcttgagttcttgcggtggttttctttttttgaagtttgttggtttcttttcttcttttttttttggggttggttcgtgatttttttgttgttgtgatggcggctgagttgtttgtttagtctgttcttgatgtttgcttagtggtggtactgatgtgtgggtagggttcgtgttcttttttttttgcgtttatcttcgctttccttttttttttcttcttccccttttgagatttcgatcgtagcattggttagcgtgttggtggatgtagttaatcaatccccttttaggtgccaaatgtcatggaaagcgagctctttgcccttgtttaaccaagcttttgatcgcagcattcaagaattggctccatctccccgcaaaaaaaaaaagaaagaaaaaggaattggctccatcgattcagtaaaaaaacccgaatgccgcggaagttagcattgctcatccgtggattcgacgctggcacactggtttcttggctagagagaaacaacgatgtgcttgctgtttcagccaccaatttcttcccggcttgtgatttttgccttttgtatctgctttctttttcctcttttgagaaagtacacgattcctttgcctaccttcattttcagtgccgattactaaatttgcagtaggtcctactctctcgccgtggtgttggactatcattgggagtagttgtcatgtggatttatgcccatttgctgcgattaaagagagaatatgtgctacgccttaacgttcatggacctgatttcttgaggtcgctgtaactgttgcctttggagaacaagaggaagagggtgtgagtgtgtggagacactaaccgtggcttttgcagattcctcttatctgttttccttgcatggcagttgtgccatacattggggatcctctagagtcgacctgcaggc

SEQ ID NO: 34185 - DNA, 803 bp, Oryza sativa
aggaggcataatactcgactagctagtcagaactgttcttgggaatcgcgtgatgtttgcagaatttgttttgtactaaaaaaacttatgcaaaaaaaaatcccaataaattttcactgtactttctctgtctaaaaaaaactcaacaaaatctgatcaaccctttattcagatttattacactagctctcctaagttaatttttttaaggacggaggaagtacaggggcttgtttaggggagcttctagctaccgcagcttctcctagaatcagaagctccccaaatagttcagttttttttgtccagattttaagaagttgtagttgcagaatctagaaaatgaacaagaagccgggaaacctagcttttctagattctcagccaaccagttgtttctcagaattttaagctccctaaacatgccctaggttaaggaggaccggaggaggaggaactcacggagcgatcgtttcgcttattcgtggaataagcgaacgttatatttgtaaaaaaaaagtaatttgtgaataaaacttttatatacgtgttcttagcgatctaaaagcaaaggttgaaaaataaatttcgatgaaaaaaaccttaaaattagctctaaattgaaggttaaaaatttaaattttggctgataagtataagcataaacgaaaagacgagactctcgtaaccctaactaacccagaagggatcaaggggctcacgcagcgccacgtcacgtcgcccccccccccccccccgggtaggcgcgatccgggccgtccgttttgtcgtgggggagagac

SEQ ID NO: 34186 - DNA, 548 bp, Oryza sativa
aagtcctgtgactggtactgtgatcgcagtttcgtaggaagcagttcgcgccgtttttcctatgacacgctcctatcaggtgccgttgtccggcggtgccagattggggtgtgacagcaagtgaatagcagagtcctacttggaggaatcgggtttatactatatcatgcggggtccgtagtctccgagttctacttgaagactaaggtgattcacggtgtaaaaggcataccccctgaggggtttagatgaccgaatcatagcgccagcaccaccaccatagcctacaatccggaggacgtgaagcctactcgccatgagatctcgttgaaaccatctcgacaagggtctcgccaacgacaagggtctcgccaacgacaagggtctcgccgataatcccaggattattggtcttctattgtaatatgtggttttttcatatctatctcatatatataaactggattagggctattaccttacgagggcccgaaccagtataatccttgtcttttcgtttgcttgatgttgtatcgtgtagatcctcg

SEQ ID NO: 34187 - DNA, 531 bp, Oryza sativa
gactacaacgacccctccaagtccaagcgtgtccgcggcgagccccacgtcgagcgcgcgctctccgcggtgttccgcggcgaggagacccacgtcgagcgcgtgcccagcgaggaggtcttcggcgaggccgacgtcgagcaggacctcggagatgccgtgaactacctccgcggcgatgaggactacgtcggccgcgagatcaccgtcgatgttcgctgcggcgcccacgtcaaggtcaagcgcgccgccgagttacccgacgaggtcctcgtcgaggagctcgatggccaaaacgactgcgagctcaccgcggtgttccgcggcgaggaggcctacgtcgagcccgcgccgggctgggaggtccgcggcgaggacgccgcggaggcctacgtcgagcgcgcgctctccgcggtgtttcgcggcgaggagacccacgtcgagcgcgtgcccagcgaggaggtcttcggcgaggccgacgtcgagcaggacctcggagatgccgtgaactacctccgcggcgatgaggac

SEQ ID NO: 34188 - DNA, 761 bp, Oryza sativa
aaaaacttttcaactaaaatgttataggtcgcgttgagggctacaattttgatataaagcttgtcttcattagagttcacatgaaaaagttataagttattttttaatataaagtttttagaccgtcctgtttaggtaccggggtgacacaactgaacaagttggaggaactaaactagtaatctacaagtttagggaccgggatgatacagtcgaacaagcttgaggacctgaacggtcgatttgcgagtttagggaccgtgatgacacaacggtacaagtttagggaccgatgatggactttactctatagtttaaacaattaaatgtgacgatttattaagcatataatactatgtttagaaaaaagtcaacatcgtcgaactagaaaaactgagtttgcaccctaaaaggaaaaaaaaaactgagttcggttccgtgtcgaactcggtctcttcccgcaatagcgccgacccacctgatcggactccgatcgcccccgcccacccataaccctaaacccgccgccgccgccaccgccaccgccactgccgtcgaaacctacgcttcgaaaccatgtcggccacgacgcgcgacgacgaggcgtgcccgtcgacgaccaccaccaccaaatccacaacggacgacgagccggcggcgccggccgcgacgacgccagcggtgacaacaacaacaacagtcattcacgacgacggcgcccctgccccgccgtcgccgaagaggcgcaaggtggcggcggc

SEQ ID NO: 34189 - DNA, 543 bp, Oryza sativa
aaaaaatgacataacaccaccacccctgcaccgctctagcagaacatggcagcaatggcccagaaaaaaataacttctgttgttcaaagctacagtactacagccaatcaatcaatactatgagagtcaatctgcaaggagtacaaatttactgcccactttcggacagaagaacgcaaatgctgtagcactaacagaagcacctctaggctctctagacagaaggcggcaaatgctgtaccactaaaagaagcacttctaggctcagaagaatgcaaatgcagtaccaccaagcaccactaagagatatctggaatttctaatagattgggaggtattataggaggttcaccttcgacttttcttttgatcatcgcacgaagtgatcgcatcttccgaactaagttcctcatcagtaagcagttgtccaagatgtcactcctcatagcattccccttgatcatgtccttggtctctaattggagattgttcattttattgtaaagcccgaatagcacaattattcgctgtcagtgacttcat

SEQ ID NO: 34190 - DNA, 861 bp, Oryza sativa
actagttttgttcattatgcgatagagtgagtagtacatactaggagctttatcggttttttaaaaaataagtcaaagcagaaataattttggagttgatttttaagatatttttgatgtagtttatttttttatagacttttaagttattagaaacatatattaaaattgtatacgtacattattttttggacattaataagctcttatgatttgtaattaacttttagacaactgatgagactctcctgcaaggctgcaatccaggcctgtaagaagaaatggttcaaattactacctagataggctagattgcttattgctacctgctcgaaatcgaatacagtagctcattagtactttgcttgtgttacacgtcttattttccaatttggacataacacggggatctaacagaaaaaaggccacatcccaaattctggacttcccaattattcctacccaagatgactccacgcggcaggttgccaacgtccacttgactcgtgtaaactcctcatgtcccactttgtccctcttagcgcaacaaaattgctgccggagcacacagaaacttgccatccgtcaggggcaaaatcgtattttcgcacataattctcgtgcccaagcaaaattcacctgcgcgccctcctcctataactacccctcgctgccatcttcgatcccctcctcctcctcctctgctctagcgaaagccgagagagagagagaaaaaaatccgtcacgaaatccacacgcttctgagttctgatctgtgggttcgagttcacggcggagatggccggtcgcggtggccgcgacccccggagaggctacgacggcggctacgggtacccgaga

SEQ ID NO: 34191 - DNA, 1025 bp, Oryza sativa
tttttaattttaaaaaggttctaaactatgcatgtctaacgcaaccaaaatttgataacacccaagcgtgccaacaaattgaattccaaaatgttggtaagggtgattttaacaataaaagaaataatacctttggtatatatagtgtagttcagggctgcacgacctaaaaaaaagttaaatcctgtcaaacaaaattcccaaacacgtacgggtgtattttcgtatgaatttaaaaagcttttttgtaccgttggcttgagcttatgttaaaaatgtgtcacacttgcgtgtggtttgcgtgcgcaccttttgtataatacgtaaacaaattaggaggaaacaatggaaaacttaatacatgttccacattactttccatcccaatcgaagtataacttattatatgactcgcggtgctcataaatcgcaaaataagcaacttatccaaagcaacctcttaaattgccgtcgacatctcattgacaccgactgcaatcccatttctgaagatgaaaacaacacctttaaataaggatagcacgttttacatgtgtagacataggaaagttctagaaccatgcaaacaaaaaacttagactcattcagatttgaacttttctctatctatatatatttttaaccgggtccaatctattttttttttgcgaaaaatctaagaaagtgtgaactgctctctagcctagatctaatagaatgatggaaaaccttacatttttttttttcgaaagaagtaggtgcggattgtatccaacattttgcatgagcatgacttacaaaatgaaatctagaggcacgattggaaccaaagaatttactttgttttaaccattttggagctttatccagcatagaaatgaaaacttacagcttgctgtccatttcatttctcctgattattttcttcgtttcttttctgctataggaggcataatactcgactacccatcagaactgttcttgggtatcgaaagatgtttgcagaacctgttttgtactaaaaa

SEQ ID NO: 34192 - DNA, 555 bp, Oryza sativa
caaaaattggttttctcactcttgcgcacatgccagcctctttttgctgcgggaaattcaaatttgataattcggtgcgtgaaacggcgtgaagtcccaaaattggttcctcactcgtgaaccggcgtggagtccggataagttacgcgcgacttatccggttcgaataatctggtgcatgaaacggcgtggagtccgaataagttacgcgtgacttatccggttcggttatgcggagcgaagttttgttttgctgcgagaaattcagatttgtttgttttggaaatactcggaataatccggtgcgtgaaatggcgtagagtctggataagttgcgcacgacttatccagttcggttagatcgtgcaggcgtcctgatcaagcgtcataacatctctatataagttaagccgccgcctacacgcaacacacgcgaaatcaatctagggtttgcctcctcctttgcaccgcgctgtcgctcgtagtctactctatcccattcgccggtgtgcagcggcgatcggaagaaaaggtctccggaaccttcgctttcga

SEQ ID NO: 34193 - DNA, 752 bp, Oryza sativa
gctaccacagttcacagcaaaggaggaagctgtaaacaagttagatcaattagtattagtatttgactaagtgaatccgcggttgcagatttagtatttctcaactaaatacattcatggtgttgcaaagggtgaaaggctcacactgtggagaaccaagaaagaaggatgtatttctctgaaggcatgccagccctgaaggtaagatactgcaggtgcagagcatcaacaatttgaatcaaattagaagctgagagaacctattaattatgcttgagttcttgttgagaaatcagaaatatgggcgcacctgttattggaactatcaatcacaaaattgtttgccaccaaattcctaagtagaatgaactctattagagcttgtttggtctagcttgaaaaaacttaagctataaaaaagtattcgtttttgttctatgttgtaagggaagtctcatttccatgaagactcttaatcataagtggcctatagatgatagatccaaaaatttgttaagacatataaactagatgcaccaaatacagctttcagatttaccaaatgagctagctcattacatctgtatgctatacgcataaatgctggatgacaagccttacataggttaaacacgccgttatattttagggaataaaacatggctttactttggctggagctaagtaatcaatgtttcagaacttggtacttacaattgtaaatttttatcactagcccagggtaccgagct

SEQ ID NO: 34194 - DNA, 555 bp, Oryza sativa
acttgtgaccagtttggtggaggtaggaagcagcaaatatcacagcaggtgcagcaaaacctacatcttgctttagcttacatatgggggaggggggggttacagcctcatttgctttttggcgcaggaaggcaagaaacatcaagtgccctacacttttcaggttaaaatttcttctctcttggcatcccaacaccttcttcgaggagccgacacccattttgtttatgtaagtgccctccaggacttcatattgatgacctttaagccggggcaacagccgcctttcccttggtagccttcagcttcagtttcttgcagccgcccttcttcaccaagtcagcaatcatcttgagggaccgcggagtgagtggctgcttgaaacactgcaaatacaattttttgacattctcatcaaaagagtcactttcattcatgataccaatttttttggaaataatctcttgtgcaataagctcaattttacatccattccttcttttcttttctagcccttcactatgatgttgtgtggcgcttaggaggactttgggt

SEQ ID NO: 34195 - DNA, 503 bp, Oryza sativa
aaagttgacatgcagattcacgtcttacaaacatataaaagtcttacataaatgcagcacaaaataaaagcgagcttattctagagcttgacatgaacagcgggcgacaccattccacaagcatccttgacggcacggatgaagcctactccttcgagtaacataacctccatctgaagcatactccaactctggggtgggagacagaccaagactgagtactacccactatactcagcaagtcataccggaagagaggtatgatgtagtgtatatataccaagggagctgagggtttatttgcataattctagcatttaaaagtaggtgttgaaagcagtaaaatcgttttaatgaattaagcaatattaatcatcactgcgcaacactacaccacgttgcaacaggcccaaccaaccacttgaactacacaagttccattaggtcaaattattatagatgagactaatcacggtgaatttgattggccacccataacaccc

SEQ ID NO: 34196 - DNA, 752 bp, Oryza sativa
tgctacttttttattaaaaaaactatccgtgtcgtaaaattaatgtttcttgagaaagtagtcaaattggatttgactaaggtgaagggcatgtatgctaattgcattgcttcaaactatcactagaacatgcatgtactagaaagattggtgatgagctagctgtagaaagctatgacggcaatgggtaatccaaatagaaatttctagctatgccctccatttcatattataagtcgctttgacaattttcctaaccaaacttcaagtttgaactagtttatggacaaaattagcaacatctacaataccaaattagtttcattaaaactaacatttaatatatttttgataatatgtttattttgtatttgatatgttgttatattttcctataaagttggtaacttttttaagtttggctaggaaaaagtcaaagcgacttataatatgaaaaggagtgaatgtcgatcctatgagggaaaggagtgaatgttgatcctaggagtgaaaaggaatgaatgtcgatcctacgagtttgactaggaaaaaagtcaacttttttcgccggaccgaacgaatgagtccatctatttgggctgtttgctgctttgagtgaatgtcgatcctggtgttggagccaacaaatagatccaaattgtccgtagcctgatcaaacaagctaaatctacttccacaagtacagttttgtgccctcccatgtataattgtggtctttcatcataccaaca

SEQ ID NO: 34197 - DNA, 585 bp, Oryza sativa
aaaagggaaaaagaagcaaccacggtctggtacgtggagctagataaaacatgactagaaggaccaattagaaaaatataaaaaggacaattagaagcttaatcattataatattaagccgtctgtcatgcaaaaatggatttcgcaaatggccagctgttaatgccaaattttgataaactccaaagttgtcatcggcctagagacaatatcggcttcagagtcttagaatgatccgatagaaattatcggtcaccagcagttggattcttgatggagttggttaagtaaattaatcaattttaaaggaatcatatctagaagaggtcgactttaaggaggatgtggcatggcaatttatctattaattaggcagtcagtcagtttccttttagttttaggaaagtatgtttagtattcgatcagaacttgtatattttcttttatctttacgaaagtttgaatcgtgtacaattaggactcttattagcttaagagtataaatatgtacaccgaggtccctgtaatctatctacacatattaatatgtctatcttcagcgcatcggcacactcccacgaggtt

SEQ ID NO: 34198 - DNA, 612 bp, Oryza sativa
cttttccctagcaaaaattcaattaataaatggttggaagaaattatttgtttaaaggcaagaaagaaaccctaaattaataaatgcaaataataatcggaatcggcatgtggaatttttcttgggttctacatgtcaaaatacgctaacaggatttttagtggaattttcagagcattggaaataattttaaccaattaaaataagcaaagtgcaatattaaatccctggaaaaaaaatcctttcttctttttctttttctttcctcctttttcctctcttcttgggccgtcggctcggcccatttcttcccgcgccggcccgctcctccctcccactcccgaagttctcccggcctccctctccctctcgggcgctgacaggtggggcccacctgtcagccctttccctaacctccggccgaccacgcctgcgccaaccgccgccgaaaccaccacccatcgccgtccgccttaccccgcttccgcgccccactccgcgccctgcgcccacgttgcccgccaccatccccactacttccactcgcgcgtgcaccccgcaacggagggattcaaattcgaaactctctctatcttctcttcattccccacg

SEQ ID NO: 34199 - DNA, 901 bp, Oryza sativa
gattttaaatcactaaagataagctatcatactctgaaggataaatggtcgattagagaattaataagtcatgatgttaatgaggaagagcaacaaaatgccgaaaggcgtaataagcaagctttccccactaaagctctaaagaccaatgagaatatcactgatgagcccaatgagtcaagtgccaccatcgtgtccaagcttcgccataagtctaggcatgagcaagaggactgcgaaggctttagaaaatggcttccttagaagggtaatcttactcattacaatattattgcccatacttatgatacatttgtgtaacacctaatgtcatttaattcttgttgaatgacataggtgcattacacttattcaatatagaaaaataggaacaaagcccctttaatgggaatcaattttgattaggagacaactgatgatcttcccttagtctaggaagacctttgttgtttcatttcacatgttttttttatgtttatgaacttatttccatttatgactatggctacaatactgagtttgataataagggatatttattaaattcaataataaagttgtgagtcttgccttcgagcgagacaaattataatcgctccattatgatactatgctagatatttgcgatgttgtacgagacctcatcaaaattgtgacattattgcttagatcacattttgaatgagaagactatgtctcattacattagaaacacatttactaactctaaagtctctaaatatagcagaggaacattaaattataaagttccctttcaccaataaaaatctcccactaaagtactatctccttcgctaaataactattctaaaagcagtagaaaaatcaaagctaaattagaaaatcggcattatgttaa

SEQ ID NO: 34200 - DNA, 1058 bp, Oryza sativa
taatacgatatactcatagatgattattcagttcatcagatatgcctaagaactaataaagtttaattgacaggatatcatgagaaaatataaaaaaggaaaagaaagttaacatttggaccctcagctatggcctcggtccaatttttatctatcaacaatgactatccattcaaaatcacacattgtccatgaacctaaagtaaagtggtttttagtcacgtggcatccacacggaacctacttgggcaaagagtgatgacatcaccatactgaattactgatcaataataaataaccagaaacacttccttttctatctcgcttacacctatgttatcttgatttgctagctagctagctagcagaccatacgtcatctaaatcatccactgcgctgcatgtggcgtcctaatagacaaatcaaaattttagaaaatatataggaggcatgtggatcctaatattttctttattttcttgagtgcttgtatattgagaaggagaagatggataggtggactggagacaagtttaagcagcagactctgctctgctccagttatccagtaaaataatccttagtaaaaacaaaaagtaaaataagccttagtagaaacaatatggctccaccatagcatcaagtctagatgcagttggatacggttattatctttatcaatagcaagcatgggtggtaactggtaagggaaactaagaatgatgataaacaatgatatgcaattacaggtggcatgtaaaggaacaaatacccttggcttcaaaccaaaagtttgcacatgagaaataactccatcgatactccaatcaggcagtgttgaaattggtgaagttaaaggaaacaacattttaacaatgtcccttctgcctcgattagcggcaacttcaattggagtcctattaaactgcaggagtaaaagaactggttgatttaattcttcatcaacaatgcaaatatcacatatattgcaaagaatttaacaatttcaacattaacagctaggattccaaattagaaaatttgaacccaatgtctg

SEQ ID NO: 34201 - DNA, 779 bp, Oryza sativa
tcctgcagccctttaataaaaaagtagcagggccttccagttatattaataaaacaggaaaaaacaatccaaagagagagaccaacccctgcagggaacaccgtggtaccaacaccagcttgaaggcatttaaggtaccaaaccaagaaaagaaaacaaaaacctcaaaaacacaaagctacaagcagccagccatgatgcatgcattaaaatggcgggctcatgccaaacttgatgcaaacatccgaagtttcaaacaccaacaactatgccagcaccaaaaacaccgacggcaaccaccagcaagtcaaacccaacccaagacaagtgcacatgagcagaagcacaatgcaccatagaaaattagtaaaacgttgggagccatagaggtggtgtcattgtgaaaatgccgaacatcaacaatacgacagccaagaagacaagaaacactacgccacaatgcctccaagctaacccaccatcttgggcaccacatgaaacccatcacacaagcatattctcgcacatgaagccttgaaagttacacttattcactcaataatataggccaaggaagcgcacagtaggaagaaataataatatcattaccatctctatacaatatacacaatgtaaaacataccacactgtacattacactttatcaagacaatgtgtttcctcctgatgcaaagtatctatttctggaatcactgatacactcgttcaccacttggtttcttcagttcagtttttccaccacatagaaaacttagttt

SEQ ID NO: 34202 - DNA, 640 bp, Oryza sativa
  unsure (1)..(640): unsure at all n locations
aactcaaaaattaacttttagaagtaaattgaaatcataaaccatcacgtgcgcatcaatcccggagaaattcgatcttttagcaacggaataaaccgaagatagcgaagaaccagcagcaaagatagcagagcagcgtaaattcaggggaagaacgttacaaaccacaaacttaacgaattttaattcaacctctatcggaatcaactccagtaaccggaacaaataccccaagactctcaaaaattcagatgaaaaataaggcatgaaaggaaaaaaaaacagggaagatcaagaaggcggcggccgtaccatggtgggagagcaatcacgaattcctccacgagcccgaaccggggcagatgatcatttgattggaaatcgagttcgcaatccaaaaggcgaggcggcgcaaaacggaatcacgcgatgaggaggaggaattcggagntgggaaacccgaagaggaagttgggttgcgagtaatgggaggattgttagtgctttagccccgcacggcttttggttttggttccatgctagnggtgcggtttttttaaaaacacccctaatatttctcatattgtgtgcaaacccagtgggtttaaaggtttgagggtttacatgaatgaccccttgt

SEQ ID NO: 34203 - DNA, 551 bp, Oryza sativa
catcttattagtgctgactccactatatcaactaactgtttttaaaaccttgaacatgattatgctgttagactcttgatattattgtatgggtcctggtgtttaactaacacttgagttcgattcattatgcgataagcatctgaatgagtggtctctaatgacttgctgtttttaacttgtccttttgtttagcggatgactgcattcatgtggggacggactctagaacatgccaagaacagatcctccacataggtgccatgctcattcttcactttattttgttaaacttttctttactttaagcacatctgatctctagaccaatttcaacgatctttgctctttggcaagcaggggtcaaaatgtgccggtgcaatagggacatgcactattctttgcatgaaaacagaagctgaaccgccccattgaagaccaatctattccatggataagacacttgcctaaagtgatggtgagtggttcttaaacaataatggataccaagtcgtgttacatgttcactgatagggtaagaagttccagcc

SEQ ID NO: 34204 - DNA, 528 bp, Oryza sativa
catatatcagtatatcagcacaaaggtatagaatgcagctagcagtggttattctactactataccttcatgcatgttgtccaaattattgttttccagttcctgcttgactactactgcgtatatatgtatgtattttgtgatcgatattgaaacaaaaaggaaaaaggaacaagatgttgggcattgttttagatagatcataagttggcctggagagcgatttggaatctatacctttgcataccgtattttcctcttcttgttgacacgaattagttttgtcggtaaagttacagacgcatgagacaaaataatgttaagtacactattacgcttctgtaatagaactgtcagtctatcatctgttcatctgtgagtttgccttggaaaaaaagggctacctgtgagaaaatcaaatcatttgaattatatccaaataccatttccaattttcgatggtatatgcatacttgcatatattctctgtcatccaaaatttggtatatgcatggtacatatgatcag

SEQ ID NO: 34205 - DNA, 1047 bp, Oryza sativa
tgttttaattcaatgactagtccaaagttttttattaatatccctgatatgttacatggatcatgtacatatatctgtaaattctccctttttctgttttggtttgtcctgctttttgttcctttttttttctctctgataattcccacacctaatatgtaatctgtaaacctcatttctattaatgaaatgactataagttagagcctactctaccttcttccgtcaaaaatatgttacatggatacctgccactattttctattgcagaatttgtgtcaatctgaatggaacagtcttaaactctgaaaaacatatttctacgcattattccgattgatttcttgttccatatacattccgatatgggtgggcactgggcagtgcaatcggttgccactgagtactaactcaagtatcgcgtaaaagaaagaggaagtctcctgtctcgtggtctcctccgctccttgcgccgccgccaagacgagtcgcagcgatctccatctggcgagcagagcagggaaggggatcctggtgagcatccacatctctttctgattcatctcgggactacttttgtctggaatttgcttgcgttaacttctcttcttgatctggaagaacctcttctcctccataatttaaacctctcagtttttaaccatagtgaacgtttctttgcttctactgcacccttgcagtagaattcagggggagttttagacctaagctataatagacttccttcctcgattgggttttcaaggaatatgcctttgctttctcctccggttcttgatttcctacctgaagatattatctctctgatcaagactagttcgagcagacaaattgattcagagattgcttcatggctgtgaccttgctcaatcttgaagcaaactaaattcgcaacacatgtgcgattatgatgagctcacaagttgcttctgtttctgacggattaccacaggcacagggtccagctgcaccgaatgactcgccgcgccagcggttctccggcgtcgcgccgccgggggcgctcat

SEQ ID NO: 34206 - DNA, 1657 bp, Oryza sativa
aaattttaatttcctccataattccacttgattaaattggtttaacttttatttaatttctagaaaatgcattattaaatgattttttttaatcccgaacgaaaatcggggcgttacagaaactgacaagctgtgatgccatattgtgctaactaggcaatgttctgtgctttttgtgtattttggcagactctaagccaactatgcctatctgtgaactttatataatttggcagactctaagccaactttgcctatttgtttagtttctgtaatttggcagactgcttgccaactatgctgtgatgtgtgcttgttctggcagactgtaagccagctaagctatgtggattgttatcatctaaattgagtaactttgctcaaatggtgtgtcataacctaatctgatatgagatggcatttactgagctgatctgatgttatgaactgactcttatcaatttgttatgctaaaattatgtgcaaagttaccaatactcagtcactgttcagccaaccactgcaaagtcagctcaaatatatgcaatgtcagtgtcattactgaatatcaatcacaattcagccaaccacaaatccattcacttaacttagatagtcaaagagcacagctcagtttcttggaaaaatacagcaaaatgcttttagctaccagcattttgacacatagattaacacattgcacctcacatctgaactgaaatcacatcaaacaacacaaacatgcatcccaacaacatcagtacaagccaaactctctgtttctctagcctactgttacttgctctcatagcagccatgttagcttcattctcagctgccacaagcctcaattgtgccacttcattcattgctacccctaattctaggcaccgctcttctacctttggcctcagttcttcaacacaacgttgcagctcattcttctcccttcttagcgataacacggcttcacgaagatcgttcaacagctccctcaaaaaactgcttgttgcgggctcataccagtcaaaaaaatcgcagccggcgccctgaaaacattacatcccaaatcacccaaccatactgccagctcaaacaaaaaaacaagcaagcaaacgaaatctgaatcactcacccgattgcggcatcggtagtaccgtcgaccagggttgtccacgctctaggaaatccaccgcaccgccttcgcaccacaccggcacatcaccgccagctgataatcatagggcccaactcgcgccgggatgggagcacgactgctgggatgcgacgaccccgacgaccggtcactgcaataactcgccatcacctagcctcacctcctcttgtcgcccccgccgccaccgccgcttccgccgccctaagctagggtttcagctcgagaagaggaaaatgtcgcgccaacgcctggaaacggcgaggacagagcctttaaccccgtctattaactccccaacggcggactgaccagtgggtcccacagcgcgacacgtcagcaaaaccgggcaaaaactgagtcaatactgccggtattctagtttagtgaccttaaaaaatctcggtgtcaatttgagggacctccggtgaacttattccgttcggtcggtcccaccaaaccgcctcacagtcacaacgtcta

SEQ ID NO: 34207 - DNA, 698 bp, Oryza sativa
  unsure (1)..(698): unsure at all n locations
cctgccnnggtagatgatgctccctcnaangaccnatgaaacttagctcgatgcccgcggtcgctctagagatcctctgttcataagcaagttcaatttttttttttttacccggacctagccctaattcaggtaaaatggaaaaaatccggtgtaaatcaaagaaaataaagcaggagactgtagggtgaacggtcggaaaattctgatcgacctaacatgtttcatataaaaataccattttgacgacccttttgctacattaaattgaatttaaatttttatatattaatatcgtattgagagttactcctccggtttatacaatgacgtttggaaaggttgagtaaactttataactttaacaccaatactttaataatttagttaagaaactgaacacatacataacacatacttcttagtcttcaaaagaagtttttgaaaagctcacggtctcaaaacaaattttgattttgttttataaaatattatttaaagcgtatatgctactttatggaggattttttagaaaatctttcggataattttaccttttaaaacaaatacttggagtatttatgattatattcccagatttgactaaagttgccttaacaacttccttattgtatggggggaacaaaaaattatctttaaaaccctttattaaaggaacatgtcttaatttttctttt

SEQ ID NO: 34208 - DNA, 522 bp, Oryza sativa
cgtactccttccgtctctaaatataagtgattttggttggatgtgacacattctagtacaacgaatctgaacataaagcctgtctaggttcgttgtactaggatatgtcacatccaactaaaatgtcttatatttaaagaccgaaggagtagttttttagcattatcctctaaatcgctaagaatgaatatataaaatttttgtttataaattatattatatgtttccaataaaagttactctctccatttcatattataaattattttgtttttttactagttaactttccaagttatagaaaattttagttgtgtgtcctcaaaacaaatatattgttgaaatatattcaatgctagtgttttagaagctactattttgtatacacttaactaaactgtaaaaatgtttagcaaggaaaaaatattataatatgtaatggaagtagtatgattttttaaacaactctgatccacttttaccatccgggttcatggtccggtgcaaggttttatcatggtt

SEQ ID NO: 34209 - DNA, 1729 bp, Oryza sativa
ttagttttgtttaagtgccattaagttttaaaaccgcctattcaccccccctctagtcggcctccttgatcctacagagggaggtttcgctgacgtgtcacctatgtggtggtgctgatttggtctctgtcctacgtagtgcttatgtggtattagaattaaaaaaaatgtgagactcatttatcattcacataaggaatgttgtgggacccatatatcatcctctctttctcaatcccttcttcctcctccctccctctcccttctctctctttctctttctctcccccttggtcgtctacagggacagctagagcagcggtggcggtgggcggggcccagagtggcgacagcatgtcccgtgggtggtgccgctggccacattcgaggaagccggagacgagacgccgccgagaactcatgcccacaagatataaacggaaagaaaccctactccagccgacgcgccccagtctcctctctctctctctctctcagctcttatcggctccgatgacctaagcgcacacctcctatcgccgccgccgatgacgacaatgagagagatgccgaggcgctgctgctcgcacagcaggagttggacaaggcggcatcagcaccacgatgatgaaatgcgagagcggtggtgaacgaggacgtcgtcgatatgatggcaccatgggccacgacgagacgagaggaagaggaggaggaggaggtggtggtggtggtggagaaggaggggcgagcacaagcgacttctacgtggcggctccagtcggagactaatgaggtgagtggctccctgatgaggatcatctgcgtgagttcttggtcaccgaggttttcgcgaggtcaccaccaccgccgttctcatcttaggtgacaacaactcccagtggaactgatggtcttttgttcgatggtgatggtcaggggggagcagcttcctcgccgtcgttaccccagccggtgtaagtggctcctcatcccacggtgaggatgtccttctcggccgtcaccgacgacaacttgatgttagccattccttttgtgaatgataaatgtgtcccatatttttttaaattctaataccacatgagcgtcatgtcaataccatgtaggacgaagactacattatcatggttcggattaagacatatcttatatcctacgacttatggaatatacgaatacagtataccttcgtgtatacggtataactccgtatacgataaggaaaataacaagaaattatggaaattatcatcacgggcaagtgaatagcagagtcctattcagaaaggattgggtttatactatatcgtgtgtggtccatagtatccgagttctacttgaagactaaggtgattcacggtataaaaggcataccccctgaggggtctggaggagggaatcagagagccagcaccaccaccatagtctacaatccggaggacgtgaagcctattcgccaggagatctcgacgaaaccatcttgtcgatctcaccagtaatctccaaaccatgttttttgaaattctttttggccagagggttggtaattggaatccaagcaattttgaaataaattgtgtagcgagatttataattttggatatggattatgtggataaagatgcatgtagaatccaacccatatttttaaaaggttttgcacagagggttggtaattcggatacaaaccaattttaaatgaattgtgtaa

SEQ ID NO: 34210 - DNA, 1226 bp, Oryza sativa
acacgtgccagggtgtggcccccccgggttttgaggagttcggggctctctggactggactgttgcgggtgtgggcccgcatgccagtgggagagattgtgtaagtcggtgggccatggggcccacggtggtctcgtgctcgcgccgcggttgatcttttcgggatgatccgagccgtccgtgcgtcatccggtggttacaaactgaaagatatccgtcagggcgcaaataaaaaggatattccgcttttcgtcgatctctaatttgttatcccaatgtagtacttgcagtaccaaattaaggcattggttaattcactcgttttctcaacaaacttcgttttattatctaattattttcccaaaacactattatgaacgttcaaaaacacacgtgtccattatctttaaaaaaaacacacgtatatatgcacacatgcacatattactactatgatcactttataaattggacaaacatatcgagtagtacatctaccacttaaataattttctttacgttgtctacttttatttttaggaatagagtacagactcgtatgcttacgttgtcgacgggacgtcacctattatttaaaagaataattactcataagtgcaaacacccgtattaaatttaggatttgaatcttagatctaggtgtgttggtagcgtcataaggaacataacgtatgctcacttatctttatctctacgctgtctattgactaagcacattaacaaataacgtagagtagtaaaatccttataaaaatagaacttaaatatatattgcacgtatatttgtggatgcgctgcgtcaccgcgcaatcctccccgtaaccacccaatccttctcccccatggcaacaacacgccgtgcgcgtcgcgtgcatgcatctgtgcagacaagagcgggccgcctctctcacgttcgcatccgccaacaagctagctcgaccaccaccacttggatgcgcgcgtcgatcgataaaatgcttgcactgccactgcacacatttgcacgggacgggacaaacgcatcgccggtccgttgctgccggccctgttgcgccggcgcgcgactgatcaggcgcaaaccttttttttattttcgatggaatattcaggtgagagcattcgaatctgaactggcatgtcatgtagcttggttgttactccctaggcctaaaacaatggacttcaatcctcttaggatataaagg

SEQ ID NO: 34211 - DNA, 3738 bp, Oryza sativa
atccccggcaagtgaatagcagagtcctattcagaaaggattgggtttatactatatcgtgtgtggtccatagtatccgagttctacttgaagactaaggtgattcacggtataaaaggcataccccctgaggggtctggaggagggaatcagagagccagcaccaccaccatagtctacaatccggaggacgtgaagcctattcgccaggagatctcgacgaaaccatcttgtcgatctcaccagtaatctccaaaccatgttttttgaaattctttttggccagagggttggtaattggaatccaagcaattttgaaataaattgtgtagcgagatttataattttggatatggattatgtggataaagatgcatgtagaatccaacccatatttttaaaagtttttgcccagagggttggtaattcggatacaaaccaatttgaaatgaattgtgtaatgaaatttataattatgaatagtaaggaaaaaaagtcccatttatatatgttctcctgtttataatatgccgtagcattttttttcataggaatggaaaattgtctctttttttatcttcatttctataccaaatttgacctttatttgtggatatatagcatgtgtaacaacatatcaatgttatctaaaatccacataatctgtttatgcttttgtatcgcactcactttttcatgacgaatagattttcaggaatgtctaaattacttttttgtcgttgtatttgtgcaacactcatttttttatgtcacatgccggtgcgatgcaacggtacaatggttttcacttggttcgcttttttttttctatatttttttctcactatcatcagttttattaggagagcagcttgtttccgtggaaaagaaagtgtgcaatatataagagggtgggaggaggactactcccttttaagtagcagagataaatttccgaaatattaaaatatattagtcatcatttgtgtcacactcacctcttacggcaaaaaaaaaaaacatggaatgtataaagagaaaaccttttggtcgtccttttagccacactcacttttttacaatgattaaattcatgaaatatagctaatgcttttttttcgctgcgctcactttttttggtaaatagtttatttaatattaagaaacactcacttccctcttgctcctgctagtttggcagcacgggagtacgagacggatgtgacgtgtctttgtggtgacaagtagtggcattgagcggtatggctgacagtgatgactgacgacgaataagagtgttggcatcgggcgactgtggagcctataccaccaagtggacatggtggtgacgacgtgcagcgacagatcgggcggtgctggatggcagcgggggctaagcctctgcccctcactctgccaccggtggcgaactggcgacgatgtgttagtttgcggaggatggtggtggcccagttcagtgggtggcgatgcattagggacgtccggactgcacgacacatctgagatccgatgtggtggggatggtgcagcaacagatagcgtggactagttccacttctcccctcctgtcttgttgtgttgcaccgaacaagaaaaaatcgtcgatggagaacgaagcttagtcttctagttcttccttttgtgtttgtatgttttcctcggtattaaggtttagagtcaaagaactcgtgtatcttttggctgcgtatatcctcaatattgaggtatactcgctccgtcccaaaaagactcaattcctgggttttcgtgtcctacgtttgactgttcgtcttatatgatttttttaattagtattttcattgttgttaaatgataaaacataaataatactttatgtgtgacttatttttttaatttttttttcataattttttcaaataaaacggacagtcaaatgttggacacaaaaactcaggaattgagttattttgggacggagggagtacatgccagattaatgaaaatatattttctaaaaaaaaaaagaaacacgagcatatagtgtaccccttgtggtgctttatcatttaattatagcaaactaagtacagtcactgtgtagtcgtcctgcttcttgggacaactggtctgcagcgagctacaaaagcaagagcgcatgactatacttctgttggatgatttggaaggagaggaatgtgagagtgttccaacttccaagtagaatctcgtcaggcgccgggggtcgcagaattcatcaatcatcaatgagtagtggacatggaggatggcaggctgaggcgccggggtttacatttcgttttcgaagtgaaaatcattttcgtctggtttactgaaaaccgaagaccagcattttcatataaaaacttttttgtgaaccctgagcgagcttagatgcatagagcagtctctgtgtagtccccttgtgtggcatcgcgttgatgcatcttaggtttttccgttcttagcgtgctttgtttaggacaccgcttgcggtcccaagacgtttcaaacttgctgagcatctgtaaaatgtttttactccccccccccctccttaataaaatttattaagcttgcgtaattttgttcaagactcgttaattcaacttaatcgtcacgaacgcgcgtgccagagccatataacttattagtaccataaaaaaacaaatatagaaccaatatgacatattctaatactacgaatttagacatatgtatgtctagattcatagcatagaatgtgtcgcatcgtatactagattggttttttttagagatggagggagtacttgcatattattcacgtgaaaacgctacctaaaaatgtacccgcacatacccactccgtaaaaaaaaaaacccaacctaaaaagagatgtgatccatcctaatacaacgaatcaacagactaagagcctagattgagatttttttttgggacggagggagtactgcatatgtatcaatatactatactctactacttcttcctttccaaaatatgagggattttggagagtgtggcacatcataatactaagaatctgaatagagagtaagcccaaattcataatactataatgtgtcatatctcttcgaaatctcttactttctccgtcctaaaatataaggtattttacatggatgtgtgtacagatttattatgccaggatgttttacatccatttaaaatcctttatatcctaggaggatggagtacaatgttttaggacctagggagtaacaaacaagctacatgacatgacagttcagattcgaatgctctcaactgaatattccatcgaaaataaaaagaaggtttgcgcctgatcagtcgcgcgccggcgcaacaggggccggcagcaacggacggcgatgcgtttgtcccgtcccgtgcaaatgtgtgcagtggcagtgcaagcattttatcgatcgacgcgcgcatccaagtggtggtggtcgagctagcttgttggcggatgcgaacgtgagagaggcgggccgctcttgtctgcacagatgcatgcacgcgacgcgcacggcgtgttgttgccatgggggaggaggattgggtggttacggggaggattgcgcggtgacgcagcgcatccacaaatatacgtgcaatatatatttaagttctatttttataaggattttactactctacgttatttgttaatgtgcttagtcaatagacagcgtagagataaa

SEQ ID NO: 34212 - DNA, 835 bp, Oryza sativa
  unsure (1)..(835): unsure at all n locations
cgacagtcgcgtctgttgtgcgcgaatcgtgtttacgcctttcctcccttttcgtccagccgctgnnnntggattgacttnctacattnaatgctttttcctctctnnnnntnnnccccgcgtgngttttgttgacnaccntctnnnnnnnnnnnnnnnnnnnnnnnnnnnnnnnnnnnnnnnnnnnnnnnnnnnnnnnntttacattgagaacaaagctttgcgtaccctcgcaaaataatagctttaccaattacgacaggatatttactccatgaaaataatcaggtattcccaccgattcagttcaaaacttctgaaaaaaatgtaaatgtagatcatgccacactaatctatttgagcaaaaacttgtagaagattggaaaattatgtctttgttgtatcacacacataatatcatattttgtataaattacttgtcagcatatatatattttttagaattttctaaattccacaagtgcaaattagcagaagttgcaaacaaaactccaccaaaattttgaacatgatgagatcagacttcaattggaaaattcatcatgtgactcctgacagtgttcctgtgcaggtgcagctcctctggagagtggtcagaaagatgaatgagaatgctgactcaatagaatccctagcaaatggtgctgagaaaagggttgaatctctgagttcagaagtcaaaaaggtattatgtaactgatcagttgaatctttaatagagtaatatctactttccttcagacaaggtcggaaatttgttaagttattttatccttcttcgtcatcagataaacagaatcatgctctgtaggat

SEQ ID NO: 34213 - DNA, 679 bp, Oryza sativa
tctcgtaaagcgtctccctccccagactccagagagtgatgggatttgggggggggggatgattatgctgtacaagagtagtttgatagcaatgttagtggtagaagtgaataatcttgtatataaagcattcataggtggctattcaagtctgcagttatatacccaggcttcctggaaaggtgggggaaactaccaagctgaagtgaagtaggggcacacagaatttccagtgagtgctgaattggatataggaaagaagaccaacgtgaaagcactccatttggccaatactatggttgtgtttagttccacactaaaattggaagtttgaagaaattggaacgatgtgacggaaaagttggaagtttgtgtgtgtaggaaagttcgatgtgacggaaaagttggaagtttgaagaaaaaagttggaatctaaacggggcctattttatattgcatttattatccctctcataaggtattttagttgcgcgtcgctttttgtgatgactttttggggtcttgaggggtccttttggatccctcggttggacatatttcttcttcttcttcttcttcttcttcttctaataaaaaaaataaggcgcagtcctcctgtgtttttgagaaaaataaggtattttagttttgggtatatattctagaattcccacacagt

SEQ ID NO: 34214 - DNA, 554 bp, Oryza sativa
atgtttaattgctatgatgaatctctgttggttgcaggtacaagcaattgtatctttggactggtaccagcagcgaggttttgtgggattcggttcatgtggattttctgcgtcgtaccctctctggtgtcactattatgtgatgccaaggcagggtgtgacattcttccaagagttgttgctccaattgccattgatgcggccattgcaatcatcctccttcctcatcggcaactcggccgatgacacctccacgttgctgcttcgtacgatggcgctcatggtggtagcgtcgtcaacacgccattactgtgctctcctgcccgtgggcctcctcggacctccggggaggctggcgtcgagaagcgttgagcggttgacgacggcggactcgatttggaatcccggatctcctccatgacacgcttgtgggaagagaggaaagagagattgagaggggtgaggaggaagatgaaatgaagagaaagtcgttgacacatgggtcccaccaattgactcggcgagtcatagtcaatctgccatgtcagcggaag

SEQ ID NO: 34215 - DNA, 815 bp, Oryza sativa
  unsure (1)..(815): unsure at all n locations
gtgtgccgctntccaacanttcaatgtattttgttngctctcctctcttttctttacnncctcaacttctcccgctatcacttttcgcgtccccccccccncccggcgggatgagagcgctcgtgatagaacctaactcgnntataccaatgactaggtcccgctagctttgtccatggagagcaggaaacatcgatctcgtaccccgagagcgtgagcgcaattccgcggtaataatagctggtttgggcggataaaaaaatttcaccggtgagcggatgatggaaggtgaagtagactagcacgctaaacgacgaaatgaattgtattttatgattttatctaatctaaacaatgtcttgttcgaacaatcttttactctacctcccaaattaacccttactttactattgtttgttagtatcattttgcaccacaaaaatcaagacaagtggtgctcattgtcggtcaaggtgtcattagagcaccattaatcaagacaagaattctaaactaatctcataggattaagacatgcattgatccaggtgttaaacccttgggcagatttaggatgtcgatgtgccgttctctgaatccttcagacagatctcgatgcaagctgacagaaatgaaaaggcagattctgaagaaggaaattcattagagtaaactagtcatggttggagagtttcacttaaacttgctgaccgatgcaaagcttcaagtcaactttgcaaccaataaagggacatttttcttatgatcttatactaacatgtgtattattgccctgatgacattggatattaagt

SEQ ID NO: 34216 - DNA, 605 bp, Oryza sativa
  unsure (1)..(605): unsure at all n locations
ccggggagggggggggagagaaacatactatcgggccctggggggccgantaaaattaataatataacgggggagcgcgggccccctccccccccccagaggggagtagacgacggtggaacnncncnnnnnnnncnanaaccaaaaaacacancnncnncacccccaaagaggggaaacccagcgattttttttttacaaactaaaccgggggaggggggggggggaaaaaggagggggggggggggggaaaaaagaaaaagagagtgagggggggggcggggcgagcacaagaacggggcgggggggggggcgggggcggaagaaagagaaaagacgggggcgggggggggggtgggggagaggaagagggggggggggtgggggggggggaaagacagggcgggggggggcggaggggggagaagaaaagagggggggggggggggggggggaggaacaaaagagagggggggagggggaggggaggagaaaaaaaagaacggggggcggggggggagggaagagagggaggggggggggggggggagaaaggggggggggggggggggagagggagaggggggggggggggggaggaagaa

SEQ ID NO: 34217 - DNA, 714 bp, Oryza sativa
  unsure (1)..(714): unsure at all n locations
agatgccgnattgaccncncaatgaaaaacgttcgcccanaccccaggaannnnggtccccaaaagaattaataattaaatttaaataagacgaacggtcaaacatttttaaaaaggtcaacgtcgtcaaacattttgggatggagggagtaccacttttaaatatagttacatgataatctctcaaaataagtaggtttttccctgtgcaccagtaataaagatggtgcctgcctctgtgccactaaaaacttatgagcctccctctatgccatcgtcgaactttatcgcgccctccacaacattccgtcgctattctgtttaggtttaaccgtttggtatctctggcatgtgggcccgggcaagaaaaatatcgttcttgccatttcaatcgctggcatcaacgtcgcgcgtgcactccttggatcgttaagccggtgatcgtggccaatgcgagcggcaggtagctttttgacgtgacgagtgacgacacggggcgcacaacgtgtgattgctcacgctctcgggtaccagatcgatgtttcctgctcttcatggacaaagctagcatgaactatttattggtataaacgagttaatataccggaaagcatatgctttaagtacattaatcaaaaatttatatataatttgcaaagtgaagctttgtatgccccgggcattacgttcaatggtggaaaaactaatttttgc

SEQ ID NO: 34218 - DNA, 606 bp, Oryza sativa
  unsure (1)..(606): unsure at all n locations
aggatggggnacgtagaacgtacggccccgccacatgagaagaaaccatcccgcacccttatcgtagattgcaccaatcatacgttttttatggtgtcctagcacaacatgaattagggtgagggcccttcattgtaatgaggatgagcataatatatccctgaaatgtgcatcaaggtgatcatctcatggatattatgattacagattcaaaaaataatgggcgaatcatgaaggatgaactgcaaaattcacgaatatatggtcaagggcataaggatactaaaaatagacacagcgctctgtatacccaggtgaatacgagaaggatatcataagtggaacatgccatgagaaactaccaagtctataacaccacattaatattacttcttgaacatgcatgtgattaaccgcgcactatcatgttaaaatagaaacctgacattgcaatacatttacctaaaaaagtacatcaagcctaaattcaaattaagactcatgaatgtgctatcatatgagagaaataactttgatgtggacgaatattgcaaatacaaacggtctatatacatgtgcacatggatctagaatgagatcatatga

SEQ ID NO: 34219 - DNA, 608 bp, Oryza sativa
  unsure (1)..(608): unsure at all n locations
aatgtggtttncccgaaacgtttgcaagnacnntcantctnttttgacaccaggcatgcggtaccccaagaatggcatacttacaaatctttttttttcatattgcctaataaataataagggagcgcatgtatggattaaccaacatctaaacataatcattttggcaccttacggtcgggactgactattgtttgcataaaactcgtgccatctctatatttttgaacaaatcagcactttgtgtctgatacccccatgaaaaaagtgccaggtacatatccggaatactgctgcttataaaaccctcctcaaagaactgtttaaacttacaaagggatagagattactgattgcacatcactcacacaacatagtgattaacgatgtgtaaattaactgcggtactgaatgactgcatctcaactttgataatgattctaagtccactaaataacttatgaatcccatcccattggctgataaatcatataaacccaaaatctgacttaaaaaactaagccgataagcctatgatgccctaactatggcagcatgacctattttaacataacatagtgagtgtaatcgatttataaagatgtgaa

SEQ ID NO: 34220 - DNA, 613 bp, Oryza sativa
  unsure (1)..(613): unsure at all n locations
aacttgnttnntttnnaattgtaggcatagaaananncactcancatgtgaaaacaagccgccggcacgcttatcttggctggaaccaatgttatgttatttataccaccctcgcacaaaaccaatgacggtgagagcccttcattatggctattatatgatcatgtattacgaaatcatggaccaggggcacatatcaaggatattatgattacagactcaaaatctaatggatgaattaagactgatgaactgcaatattcacaacatatctgcaacggcgtaagatgcacataataaattcacctctctacattcaaatgttaatatggtgaggaaatcataaaaaactatcgctcatgagacactaccaaatatataacattctataaataataaagcatgatcatgacttggaatgattgtattttaccatatgagaaaataaacaagccatcagaatacatttttactaaaatgcatctcacacctatatacatatgaacactgagtaatgggcaaattaacctaacaaacacatatgcaggcaaacaataatgatatactacactcattagcaaacaataggacactgacttctgcgagctattat

SEQ ID NO: 34221 - DNA, 692 bp, Oryza sativa
attcctgcagcccttgtcactatgctaaaaatgcatatatttttgaacggaggaaggagacctattacatatttagatttttcaaatatgttatttctatttatagtctctatttatctcagatttaaatgaaaaggtaaaatgttgggttagaatccaagaagttatcttaatactcatagtttcatgtatatatatactcctttatctttgttacatgtaaaataagttaatttctttttgatcttggtaacaaaagtaataggtgtaacttttgtgaaataagagagtaaaatatataaacctatcataaaaaaagtgatttttgtgtacgtgactctcggtaggttacaaacggacctggccatgtctgcaaaaatcgagcgagcatttttcgtataagggtcattaagaagcccgcatgtaaaaattgatttcgtaggcgaacccctaaggggccgcatgaaaaaataaactctttttttttcatgtggacctcttaaaatgcccgtatatgaaaaatcattatatgaaaaatcatttttatgtatgcgggtctcttaaggatcgatctacaagtctaaatagcctcctccttctcgtcgctgtcctcttcaactgccgccggccccatccacgccaacatcgccgctccacgccgcctgagccacagccccgccggacccgatccg

SEQ ID NO: 34222 - DNA, 674 bp, Oryza sativa
atgctgaaatgatatttgtattatcaaaattaacaattaagctatgtaaattccaagaaaatttcaatgagtgtaattaatatataatttcaaagagtgtaattaatattgcagaaaatttatatgtcattaaattacaattcattaaatagttcaaatcaaagttcagtcaccatatcattatccggtgtaatgcatgggcattttactagtacacacaagaaataataaaatcagaggtgtcagatcgagaattccagatcgacaccgctctatgcctcgccgtccccacagccacagccgaccgtggcacaggcacttcggcctccgtagcaacgccgtgtgcttggcatcctccgtgccacgccgcggcatccatgctgggcccgcgtcttccacgtcgtgatcccgtcctctatgccacgcagctgcacgcatccacagttccacacggtggggctcccactctactccgcctcctcaaccgcgtcgggcttccgtgccgcaacccgcaaggccgtggcccgttctctcttctctctctcccctttttttcctttttttttgcgtttttctcttttttttctgtcttttcgctttttttcttttttttttgcttccccctcccctcacgcgttttcctttttatcctattctttttccgatttttttaa

SEQ ID NO: 34223 - DNA, 585 bp, Oryza sativa
  unsure (1)..(585): unsure at all n locations
taacagcacgcttttaaagatattatgattcccctcgtctatggcgaaatacccttattcgaggcgtttatggcccctgactattacccgtcacccctagtgcatgttttttggggatagaggttcctataggatctctaattcncgacctcttcacgttagccccacatttttacttcttgcctggagaaatcgcctatacctggttgaaagatccagggaatanaaactccatatctcgggttctttagtccactatccaatttagccggttcaccctgcgagtttccccactcccccccacgcccgtttttattgacctgtttcaagggcgcgttcctttgcccattcaggcttttccattttaatttcccctcgtcacttcgggtttaatatccgtttttgaatatccatttttccggttgatttagttcaaccctctttctttccccttataccgaagacccgcctctcttacccaatatcctttgctctttcattcccactccttttcttccacccattttgccaccccctggttaaattttcccggaagacttttttctgactacaatacgttccctt

SEQ ID NO: 34224 - DNA, 711 bp, Oryza sativa
  unsure (1)..(711): unsure at all n locations
gaggggattganattcgatgtcnatcccttgctcgcatgccngcatgtctactctataggatccccagtatggacatatcactattcttcctcttggagttcaatttatccacgtagtaccgacgcagctctcgagtaatagttgtgtaaaccctcgtccaggaatcagccggggcacacaataacaaattggtaatagagtgcaattattactctaattgataagcgaatataaagtcattacagaggtagatagttcctctcaaacaataaagatctaagcagcggaaaataaaataaagagcgcaggcgactccatcccacaagcagcttgaccagggctacgcctaaccctccacacctttagcatcactgtagaactccttctgtgatgaatgattgcaaggcgagtatatgacatactcaacaagccacgcagcaaatatgcaagtgcaggggataacaaaggatggcataaatagtctcatttgcataaatggcattcaataaatacttcagaatttagaaaaacagtaaagtatctaagtaaacaatattattccaacactatacaacatacccgttgcataggcccaaccattctgaacaaccattcccggctgcacagttctatctccaaaccaggaatataccattccaaaccaggagctaaacaagttattaccaattacagcatcatttattatggtg

SEQ ID NO: 34225 - DNA, 582 bp, Oryza sativa
  unsure (1)..(582): unsure at all n locations
catgggacccacccgccagcctcttccttgtgtccatctccctctccgatgcacgcgggcatgacatcatgggcgaccgggtgcttggccaacctgacgcgaggtacttgaggcgcacacacacccaagactcttacacaacaacgaagaacctctcaatgatgagcaggtggcgaccgcgccaccaaggtggaagccctacatgtgcgccacgatgcatgttgacaaatggcagcgaggaggaggaaggcacgttggaagccgtagaacctcatgcgcagcacgatgctctatcctagcgtcacgacaacgccgtcgtcgttggagtaggtccatcccgtcggtgtgtgtcggagggggggatggagagaaggggaaacacagactcctggggatagagtggcgagcgtcatccgcggcgtggagggcctacccctcatcgtcggtggtaggggtgagcagaaaaagactgagatcgagaanattggtcatcaattcgttccttagtagtgaaagacagaatttttgttggtcaaatcgattagtctcatcggttaacccgatagatngaaaagactgaat

SEQ ID NO: 34226 - DNA, 599 bp, Oryza sativa
  unsure (1)..(599): unsure at all n locations
cggagagcgcctacatatttttagaagnagtctctctccccgtgaaatatagtgagagaggattatactnaaggaggacagcacncggtgagagaagtcgccagagaggtttttatcggcgccctctatttattgagagaggtcagcacgncgtgataaaaagagacaaacccttatattcaaacggttgtttagataccgcagtacacaaattgtaagacacattctatacgtacaggagactggtgttattaaacacggggcttattaaataaaatgttgtatttaagagcggcacncgtatagtaggcgcaccctcttaaaagaagtatagatatagacgcgctacataacttcggtttgtgaaattctgtcagccggtgggagacagcaataggtgttagatagtgtttttcccgggtttgaatacgaaccgaatatatccgcataaattagcgcccgtctagagctaacagggtggtttcgtgtccataaaccccagtattgaagagatcgaacttaccgcgcgatttagaggctcaaagaggttccgttattatagaagccccatggtttcccaaatgaaaaaaagtcggata

SEQ ID NO: 34227 - DNA, 773 bp, Oryza sativa
cgggggtcgggggagaatgtgtccgatagaggaatacaacgaagtgggcggtgatgggtgtgattgttgtgagaagcggaaatgtcgctatttatatagaagtgtagtgcgaggggggagggcgaacaagaatgagttgagattgtgggggggggaagaattgtggaagtacgcggaattggtagtgtttttgttggttagagaggcggcggaacgatgaagaattaaggaacgggaaagggggagcacccaaataaaaaatattagggagaagggagggaatgtggggaagaggagggaggagaagaagattgaggaaaggggttttagagactgttgccaattggaagattgaatgaggggggggagtagcgaaagagtaggtgaggtataatatagggggagaaaggggggggatgatgagggaattagagacctgaagtttgtatttttccgcagaaccacgagggtaaggagaggtgtttagagggaaatatgtcggggtgggaggggaaaagggcatttgtttcgcggaaaacgggagaacgggtccaattgggcaagaaggggggggtgatgatggggacaagtttttaagcgacggatatgcgtccccgggggtaaggtttaaggggaggaattttattcgaacatagagaggtgcaatgggcagggggggattcacaatcggtttggcccggggggagtcgaataaatgcgggtggggacggtccggaaacaagagggaaaagggcttggttttttaaagggtg

SEQ ID NO: 34228 - DNA, 705 bp, Oryza sativa
agctctgatcgaagattttaacgatctaacatgagctctgttttaattactcgattaagaagctgtacagactttatttatatatataggacatactgtcatgagcccgtatgatacatgaactcggcttcaatatatatcagatcatgcacgtcatttgccgattggcagccagcttgtgaatcaagccatgtaccacacggagatggattaatccttcgtaacaatatactactgagtatttcaccgagtgaagtctgtccggcttcgcgtacaaactacactcggtggggggcatttgtttgatgaatttttgtgctaaaaattcatagaagaaataataaattattgggcatttaattttatatgagaatattatttgtagcacaattttactgaatatatacgagacgtgtctatatgacatgtgggtctagaaattttaaatattatggtgtccgaatatattcgatattggactcgttttgttgtataattgaatagaaagtgatggttcaaatggattttaaatccgatatacgattcaaaagattggaactattaaaacaaaagaaataagaagtgctatcgttactacgtgagcatgcatggtcattggctgtggcgattaaacatatggggcccactgtcattagacatgttaatcacataattatctccagactgcagtacacgttgacggat

SEQ ID NO: 34229 - DNA, 768 bp, Oryza sativa
tccctcaaccgcaacggcaacaccaacaccagcaccgatcccccagaattcgaacccggaggaccagatcggacgacaaaagggagctcgcggacgagacggagctcgggattcgctcgctcacctgggggggcaggaaaaggcacggggccggagctcgattcccacgggcggcggagctgagatctcacggcggcctcgccgcctcagggcaccacgccgagaccggcggcggaggcaggaaaagtctcgtgtcgtcgcggtcggagccgaagccgatgaggaggaaccggaaacccaacaacccgagaagccaaaatacctctccctgctccccacgcgtccgccatgggtgaatctccaccgtccatctttgatcggacggtcagaaaccatccccagctgacgatgggcttttttctcggcccattgggcttgcaattgggcccatttgtttgtatgtggctaaagcccaccagaagagagctgtgtcctcgtctcgtctcgtcgccggcgaagctcaccgacgacgcgacgccaccccagccgccgccgcagccgcagcccggcgaccggcggcgccgcccccggctccctgacccgccgcggccgcacgggggtaaggcggttcccctgtcggggctctcgccgcaggtacgcgacgttgcctcttcttgttcgtttccccccgtgctccggcgatcttttcgccgttccagatccgcctccgctcccgtgctttgacctggcgttgcgcggtttaacttt

SEQ ID NO: 34230 - DNA, 711 bp, Oryza sativa
tgccattcgttacctcatagcttggcgaccggaagaaaagccaacacacaaaaaaaaatcccacatattttttttctctctcctccttggaaacaagacaactcatttattgtttccccgagtcgagtccctgttgctttgcacatgaactctactcggcgggggcatccgtctcatatgctaataatatttgaagcctgaatttacaagatgtgtgtgaagaaggcctttatgacgcgtggcaaaaaaaacacgtggcaaaagaaaagaaggatgacaacgtctatgatttccggacggaaattattcctactaagtttactgtggtgttcttattacagtgatatgattacttaatatatggttggatcataccaatgtccatgattttcggacgacaattaatattataagttgtacagtgtaatgtgctttctacagtgatttattatttaattgggtttcacccgtgtccaagattttcggacgacgattaattccaacaattctgcactgtaacgaatttttctacagtgatcttattatttcatgaacaattggattatgccaacgtctatgattttcggacggcaattaatcctatcaagtttatactgggacgcgttctcacagtggcccagtcaattacgtacagttgcactgaaccagcatctatgattttcggatgatggtcagtcaatatttgggagc

SEQ ID NO: 34231 - DNA, 616 bp, Oryza sativa
ccgtttcaccatatattcttcaaatgattgatgcggttacttgtagcttcaaatggtctctcacggtccatcatgacaaagccgtcacttgcccttcaccaccggatttggttcttcggcgccaagcccccttgcttgcccttcaccgccgcatggtccatcgcgaccgagcatcgcttgcccttcaccatcttgctataatagccacttcgtatcacacatcttcaatatcttcactttgtcattcttggtattattaggtgtaatgatatcacttgagcatcaacacctttgtaatccttgggacctatttctttcattcaactcaataaaattattagtcccaatgatccggttgtcaacctccacatgttgaccaaccgatcgcatgtataaaaggatatgaataaatgatgagtattaatcaacaccacaagtgtcatatactcaaatatatgttcaaatgtaaagatcccaattaaatgaaggtgaataacttggatcgattacatgcataactaaagtataggatttgctccccctaaatgtatgcatacaaaatatttgtgtgaagcaacgtatatgcataacaagatattaaacattgagagcttat

SEQ ID NO: 34232 - DNA, 700 bp, Oryza sativa
atggtctctccacctaaaggagaaggtacgaacatgccttctcgagctgcggcggtgttctctacaccctgatccaacacttcttcagctgcgacatcaggcgcctcttgctctccatgcttggtccagcaggtatatttcttcatgaatccatcattatcaaatgagcatgcacttcatccttgtcttcgatcatctgttcattcttacagtccctacatgggcacaacatgtgcatgctcatcctactttttctgtcattatccgcaaatgtgacaaattcagtgaccccctctctatactcggtagacgaacgatgcgcatagtacatccatctacgatccatctgaaatcaacaacatacgaggaaaaataaatgatgatcgatatgttgagaatgaatggagaataatgtgttttttaccttgaattttagtaaaaaatcgccccccttgccctcccaaccgatttgtgaacagtacaatggtcgggatggaaagcagttggcagtttgggggtatttatagacccaacacacctcaaacgggttagataaaaaaaagcccgtcaaaggtattgctcatacctttgacgggcttctattcaacggcccgtcactggtatccgctcacctgtgacgggccagaaatgaaagccgtcacaggtggcggcccatcacctctgacggcttctaatgtat

SEQ ID NO: 34233 - DNA, 673 bp, Oryza sativa
agaatccagggtatttcaatcacaaaatttctggaaagttttcggccgattccgagttcagacgaaaactgcccttatcattttcgattccgttttcgagaaaatatttccgaattcgtttccgtttccaaaaaattccgaccgacagattctgttttcgaaaataggttcggaatccggaaagttttcgtaccattttcaccccctacctagcaatgatttatttggtgcatgccttttagagcccacatatcctaatttactgtgtgtatagggttaatttgatctatgccattgcaaatatgtctattcaaataaatgatgtaattcgtctgtttatagctgtgccactcaaatattaaccaactgggccttacatacttcatacttcattcatgaaatccaacggacgaaaatcatctaatctaacgcctcagatcgtcccacatacccccttcaacctccgcacgtattccctcgccgaaaatcatgccgctcacatcgctcctcctcccccacgcgctccgcaacctgcgccatcacctcccatgccaccactagcgccgccccactccccggggcaaacctaatcgccgccgccacctactcctctctcccctgccgtctcaagctccacccccttgctcctcttgcgccaccactggatcactct

SEQ ID NO: 34234 - DNA, 676 bp, Oryza sativa
catgagaggagcctccaaaatactacggtgtttaaactttccgtcagggttgtgacttgtgagttgtggctaacctcctacaattcttccatttcctccttggtttgtatttatgtgcatccactttacagaaacagttaatcaaaccccaactgagagttgagggccatattgtttaccgaccaattaggtatgaaataagaaatcagtaccgatggcaatgttattttttatgaagtttatttgctttattatctattccatgtcatatagaaaagccaggttccactggaagtgctgtttctctgttggcctactatgccttggactaaaacacactaactacaagtctaggttgtctgccagacagaaccttgtatgagtgcacaagatgaaatgcatgatggatattgtaaagaagccatacaccaaccactcctgttatctggttgtgtatcatggaatgtcaccaaatattactagggggttagggaacatgcttgtcatgcaagtgatgtagcagaatagcctttggagaatgcttgctgaacatattaatttgacagaaatgaaggaacaatagttataattgatcaagatttgttctgtcagttggtctcaatctcaattcggtgatactttatacagatatgtggaaatgtctgcatacccttta

SEQ ID NO: 34235 - DNA, 575 bp, Oryza sativa
ttaagtagctgaatctcactgagcagggcctttctcctctcattgctgtcccgggctggagcatccccaatggacagagcctcatccacaatagagtagtagattgatttctttgtcctgacgccctctattactacactgactggtgccgatatcttctcttcagccaccagaagcagcattgccaacacagtaacacgaccctccatggcatatctgtaggccacctccccaacctctctggttttctctgccagagcctcactacattcagatcctacacatggaacaaggtggcatttctgtgtgagaagatgtatggaccagctatgatgagacagcgaatgaacattggtagtaaccatacagaccttttcctgcagagaagacagaagatcctcaatggagttgtccagtgaccatttaacttgagctctggataagaacatcagtcagtacagggaaacagccattgcagggagagaatttgagaagtgagctcagtgatcaccatcacaagcaatggacgacactagctagcgtgcataccttctgctcaagagagcgatctcgag

SEQ ID NO: 34236 - DNA, 579 bp, Oryza sativa
atattcaaacatgaagcaacctgactcatgaaatcatctgttttctttgcttcaccattgttggttgattgtgcatcctcgggtaaattaccggttggctctgcatccttaaaaaaatcaaaatcctctcaccacaataacgcttctccgttttcttcttgcggcggtgcttctctttcatacccgctaaataatatgtacattgagattggcattttctgtaagaataaaagagaaataataaaggaagttcaggaagctcatcaagcaagtagtatggtcacgcttatgttttaaaacaataaagtggttcaaggttgatcatacattgtgagcagttgttttaaggtatcctgtgcgcatgtcacgagaaccttctgaactgccagattccatggagtttcgctggtgatcagtaggggcgcattgctcctccgtattaatcaattcaggatcacgatcgtgttgatctccggtgatttgtttctttttggctcgctcgccctgaaacggatttgaacgttttctttgctctctctccccatcttaaagtactatcaaaagtgggaggcaaaaata

SEQ ID NO: 34237 - DNA, 663 bp, Oryza sativa
ttaactgaaattcgagtgaaaaattgttaggaattcctccatgtttgattcccagccggtgctctgtttcaaaaacctactgtattcaattctgtggactgataaaaggagagaaattcattctgatcttggtgctatctgaacctagacattgcatattttttaactgaaacttgactgaaatcctagcatcagcctatgaactcttccctgtgtttctgccactaacatggacagacttattatgaacagaaaattttcatccgatcttctagactaacctaaaaagttattatcacataaaatcaaccgtgacgacgaggacataagagaaaagaaaaaaaaagaggaggagaaattcttttcttttctgatatggtgactttatttgcaatcttgttcgtgtggttgcagagaatattctgctgatggtggcgcacacagttcagcaatggaaatggaccatatatatacacacacacatgactttattcgtcttctttttttatcatcgttcgtagtatgagtatatttctttcctcctttccatggatctcgactttatgtgcactgttttctcttgtatgctatctgctggctttttcaggatcagagaattcagaatgcccctctcctcaagttctctcctggtggacaggctga

SEQ ID NO: 34238 - DNA, 1241 bp, Oryza sativa
gtctctttatcaaatctcccatcttcctactgttatgggctcatggcgacggcaagggcatgaacacccgcgtcaggtctgaattcgtagcatctccggccataaggcgagggtgcggaggcgtgcctagaagctgcttcgagctccttccatattttgattagctattggtagatacttcctttttcctaaaatttaagggattctatatttttttctaagttaaactaaggatccattctttaattttgttgagaagagtatgaacatctaacataatcaaggaagtaaatcatgaaaatatatatttcaaatggatgtaatgatgctcatttgatactgtaaatattattattattattttcctttattagaaacacggtataaaagtagatgctaacaatacacgtacgctcgtatctatgaacacgcacacgcgcatcctacttctataagcacctccaaaaaactggactgacatatattttgaggttgacaaaatcaccatgggcacctcgttggtgatgagtacgtcgcctaccactaaaaaaataattagtcgtaaatatgagcatccgtgttaactctagaacttaaattcggacgaactggttccgctataagaaacttggctagttgcttagttgtctgaccaaacttgagacaacaacttaggacataaatagaattagaatttttatactttactactccctccgttccattataagtgcagccataagttttcgtgcccaacatttgactatccgtcttatttgataattttatgaaaaaaatttaaaagttaagtcatgcataaagtcctatttatattttatcatctaataacaataaaaatactaatataaaaatatttcaaataagatgaatggtcaaagttggaattaaaacttacaactgtgcttattatgggacggagggagtagaaccaagtgtgtattcactataacaaccacatcccgtgaatcccgtggcaaggtcaacatcgctacatggccgcatagtttgttttcttgccgcacggtttggatgcacggctgcataagaaaggtcagagctgagcaaattaagcttaggacgccagtgacttgtgattaccggtaagcgtgctctgaccgtttccatttcttttcctttcactttgtttttcttttcttatcttacggagcttatttaatggttgtggcgtgaaagaaagtttttactgttagtaattaatg

SEQ ID NO: 34239 - DNA, 644 bp, Oryza sativa
attcctgcagcccaaatgaagatgtttttgccggttatttggtacgttattcgtgtatgagtcggtttttaaattcgttcgcttttagaaatacagatccgtatttgagttgagttttaactttattcgtttttgaaaatacagaaaggctcatataagaaatctctttaaaaaaactcgcatgctaacttgtcataattttctagaaaatatatatccaagcgaattctcacaataaattttacattgaacaataataagattaaaatagccttcactcgttgcaacgcacagacattttttctagtctttgaaatatgtttgatattcattttctaaaaatatttatataaatagacaaatatattaagtatgtttaaagtagctttggttatagctcaagttgcactcttttcactagctaagtaattgtgttgatcaaagtttgataaaataaaattcaaacacaccctatattaaaaaagcagaggtattgtattgccaatatacattaatctatattgccgatggtcttatttttagtacaaatattcaccatacaacaccgccacaatctatattgacttctgttgcgaaatgacggcggtgttgctcccatgttttcccagcctcactttgatttt

SEQ ID NO: 34240 - DNA, 715 bp, Oryza sativa
cttcagagagtcaactgatcctccttgcaagtaaagtaaagatccttagactcgattagaactacttttgcaggtagaactttccagcttccacgcccaaatcattgcaatccttttcacccgcgagaaaagaaaaaagaggaacaaatccatccaatcgcgaagcaaaagatgtctctgacaagattcactacttgaatcaaagctatatttttcacatcagcagaatctacccgccaaaacggcgtcacctgtgcccccaaaaattttcaccttttcccagcctctctctcctctgacgagtgacaaccaaatcaagattctaaagaaaaatttccaaaaaatatttctactcccatgagaaatccccttgactcaatcagactatcaatttactacccaagaacaacaacctcgccaaataaaaaaaataaaaaaccaaagcagaaacagatccctctctctcccaccgagcaaaccaacaaagcaaggaaagaaagctaaccggaaaccgcgtcgccatggaaagcaagatcctccgctcgattccactgcccacgaatccaacccaacccaacccaactcaacccagcgaggaaaccgcgtagaccctaccctccccaaccaccgccaccgacgaacctcacaccggcgcgcggggggagatccaaacacccagagagcacgcgcgcgcgggcggccgcgaactcaccag

SEQ ID NO: 34241 - DNA, 695 bp, Oryza sativa
ggttgtctaatatcaccgtaaatttaccctgttaggatcagtacaaatcattatttacttcatgggcccatcaccggcccacataaagatcagcccatcactgaccgacatagtgatcggcccattaacggcccacgtatcatcgctcgcccccacatcccgacccgttcacctctcccgattctgacccgctcctctctctctctctctctctctcttttcctcgtgagttcgcccgccgcctcgcctgcgccgatctccatcgaactcggcgagcagccgaggcggacctgctgcctccttccgccgcaagcatcctcgccgccggtgagcaccaacccacacgcaccttcctacccccgcaccatctgtcttcgcctaaaccctagcttctcttctcctagatctggaagcttttctcttaatttgccctaaccctagcactaatagcagcagtttgttacggaataaagttttgggggggggggggggttcgagtgaatccccatgcccccacgttaagatccgcccggcctggggaggtgtattcgttggatttatttgcttgcttttgggttgtagctcgcaatttctttcttaccacggtttactgtagaatctcttagctctaagggtttgtccatttttttatttttgggcgtagcaatgattgaccacagaggcacagaccgagc

SEQ ID NO: 34242 - DNA, 3935 bp, Oryza sativa
ttagcttgatatcaatgagaaattgcaagttatcaactctaaagtgagcaaaaatattaaacagagaaaagagttgtgagtatggaaggcatcaggagagctagcaccaggagagccacaacgacgagctatcctgtgcgcgtgtttgcatgtttcctcgtgagaccatggacacggagcctttctgatcccaacagtcttgtgctgcggggaggccaaattgcgggatgatggcttggctaccgcaaatatgagctgcatcagcgtgagaatcgcgtgcctgagccgaccaagctacctgagatggggtcttccagcgttctctattccgttggttctcctgcccatacttgtcgatcattaggagcgcaaggaaaccgatcgttgggtcgaaatcatattctatcctagagtttccttcgaaagcatgcaaacccatgcacgtgatagctttgtactgatcgcgcaagtttgcatgatttcaaaggaaacactgggatatagtatgatttcaactcacgatagggtagccaatctgcgctagaaaggccagaatgccattctcatgagtcacacagcccaggcgcctcgtgcctcagctgtccaggccgtacgtgtaggcgcgcttaattacctgcctagcttgttctcccgcactggttcgagctagcgtgaactccacaatggctgggttgcaccggcttgctcaagtgtggctacgtagcctccttccttgtcccctttgctcccattttccagtgttgtccgtcgagcatgcatgcatatcactattatttcatttttatcattcggtattataaactaacatggagatggactttcatctctcaaggggcatacccatttcttacatatatgcatgccacacctaaataatcatgaaagtttttaacaagatagattaatataaggtatatcactttacaaacatataaattcaaatttaacttctataattataccagaaataatctatcttttttttaaagaaacaaaaataatctatcttgttaattctatgggctgctctcatttcatcatgtagaaaacattgctacatcatgtagaaaacattgctagacttacgatcaattctccctttcatcttatttatatggacaattttattatccttaaaaaggtatcaggaggtattacattttctattataaaacttgataccttatatatatatatatactagatgtcttgacgtaccaaaatttctgaagcaaaggtacctacaattactttctcttatgacccagctgtaccttcattgctatacacacacatcacctcctgctgcttccagtggcggagccgagaattgatcacgctagggccgattagggctaagttgatgtgttcttagtaaaactctttatatcttcagctttttatagtattttgcataacattttaatggaaatttggtcctaagcctagggcctaagccctaattgccccacccttgtctctgcccctagctgcttctacagttgagccatactttgtatgcattacactgtgctacatcgaactctcattgggtatggtaggcatcgggagagccttgtcgatcccacagcagcacatggcccccaagcccctagaacaacggcgcttgcctcaaaatgcagtttgcctccacatgtttggtatagggtgacacccttctttctggcagtagttcgaacactctttggaggcaaagcttccacagaaaatgttccggcctccagcaaattaaaatggaagcggcaaaaatacacgcctgaagccctatgcacggatgtattgaggggatgttcttctactggagtctaccttacgcatgcagcaggccttatgtaacgtgatgagagattttagcttgcagtttaagagaaaaatatatggcttgttagtttgtgaaatggtgtactgttaagatcgatctcgacaactgttattgaaagaaatatttttcagtgatcatttttacggtgagttttacaatggtccagaccattcatatgtttaatctaatggattcatatatttaatccaatggattgtatctattcatactatcaggtagtaaaatacctttttatatcaacataaaacttataaatcaacattgagatcatttctatcattgatactactatagtaaaatattactggtagagatcaacgattctcttgaacaaatttccgtagttttggatgacgcactagctaggatcgtaggttgccttgaccattctaaatatgattatttagactatgaaaaaaaaaagaatctataccgattatattaccagtagtgatcatcgtaaaatatctctatttgtattaccacacacggtactagaatatttttcactaatagtgtagaaatataaatcagtaaatcaatagaggatttacaatgctctctattggtaggaaaataccaccagtgttatcatcagtagaagtaatcttgaccattgatttacgactccactattagtagtagttgatgcagatgtggtaatataaataaaaaataaaatttattggattaaaaagagataaatagtctatattagctttactgatagtaaaaagaattgcccactttctctgataacatcaaacgtttcgtgcgcccagttagacgcagcttcagtctctatatatatgtgcacacaacttgcacctgagtcggatactcctgtgatcgaagcgttgctctaataatacaacaaatcaagtggttgatcaagtaaggtgtaagagaaaatgattgatgtatcaaggggcttaattcttttggcatatattgggaatggaaggaaccaggagaaattctaccacgatattctggatcagcctcacgggaatttcttgagaattttcttgtttgagaagaatttcaggtagcttttcgcttgatggagcaacaacagtatatctgaataatgctgacatggactgcattggctggtgtgtagatgatcctagcaaatgtgatagacctcctctcagctcaagactgacgccagcaggaggcaaggcatgtatcgttgatacaacttcctgctcgagaacttctctgaaaatcccaaatcctgaattaatgtagcgattcgatgtagagcatcaccactcactgagtcactgtggttgcattggtccaatcgacgattaatgcacagacatgttcatcacatatatccccttaaacgccttttgcgatatgatcaccatggcatcaattcgttgtaactagaagacatgaaagtgttcgtaaatttgacatacgtatgtcaagatcacgtgaaaacaaatatagtccctgtgttttgaattacttattattctagtaaacttcacataaacctacattgttatcctcgttaaatacatcccagttattttttttcaaaccatatgatccaacggaaattgtgactctattaatatatacctgcattgatgaagggtagagaggaaagatcacgtctaaagtgctttggaatatgagaaaatattttggcacaaaatttaaatgctagacagattaatagcaataagaaacataggaaataacttaattaatttgcaaaaccaacacggcaacaccttatctttttgtcatcttactatcttagccatgtccccatatattagcaattttacggtttttgaggagataccatcaggtatcactttttctattgtaaatttggtatcgtaaatttggtatctatcgatttctaggtgctataagatactaaattcttgtatctcatgataactcctcaaggaacgtaaaatcgaactcccatatatactacacttcttcatgcctcacatgcccttcgtctgcattatcaactacgtgatcccatctcgacatcagttcgacatacaagtta

SEQ ID NO: 34243 - DNA, 4423 bp, Oryza sativa
cctgaagcgccaaaacatgcactggcaacacccacatccctagagagaaactgcagatgttatcattgtcaagcttcgttgcaccccaacgacatagtagttccgactctacccgatagagacaaccgaagaagttggatgccaccaatacaagaaatgagccaagaaggagaaggcctcaccaaacacctaggcatccaatgcatcgagctgacacaggagtccaccaacagtaaacgatgcatgggtaaggttctccaagacgatgcccccaagaaggatatgacatgaaacgccaccaccgtccgtccggaaaccggattatagttttcaactggagattggtagcggtgaagaaaacgccataacgacgccttcaaaacgggaacaatgccaaaggtgtcgccgtcgtcatgccagccaaaggctaagcaaggctttcgccaatgatttccatccagagccactaccgacccacacaacaaccgtcgccgaaccaccacataatctctttagccatcagttagaccagttcaccaccccacggctcaggtagactcacaggcctgctcccgcacgttgccatggcattgccatcctctgcacaagccgccgggtccaccctctcctggagctccccatggccaagacaagatctggccataggagaggaggggctccacgaagagtggtttgctcagctagctgggaagacgggacaccaccaccgccaaccgcttccccgcgcacaccaccaggccagagagaggcagctcctcccccatgcgcccttgacgcacgccgctgagctaggggtgacaactcctcccctcgccgccgcggtccccgctgctcgatcctcgggccaccgcctccacgtggccctcacgccgcggcagccgccgccacctccgcgcggcccttgcgccgcggccactgcctctgagcggccctctcaccgccgcctccgccaccgcgccgcgccactaccgacccgcgcggctcagcccagatccagccaagggggaccgaattcgaactcgacagcgtcggatctagccatcgtcaccagggccgcgctctcgtcctccggtctcgtcggcgccccaaccggttgaccatgagtgagggagaagggggagtcccgccgtcgccgtctttgcagctgcccggcttggcagcgtggcgggggagaggaggggaagggagggggcgacggcgaggttacgccaccaacgtaacctaattgagttcggatattttttagttggtgtgtatggtatatacacgtgaagccttgtgtgcatatgatacgttttcccagttaatcagctccacacaaacgagcttgactagatactaaacggaaccaaacgtgcaccccatgttcaactaaggtcggcatatatgtagaaccttttcaagttctgagtttcttctttccttttagctaagttttcatcaatacttagctccggtggcagattggtgaagcacatgaacaaaaaatttaattttaccccggtctttggagggtagcaaagtacctaattgagtatgcaaaacacaatctgaactctctgaaaaatatgtgtgatctttttgttgtcctaaatttgtcccatagaacatgacgtgatcttgttgttgtcctaaatttgtcccatagaacatgacacaacaatatcattgagcgtattaattagcacctaggaacttggaagagactacgctaatcttagttacacacactcgagaaggttgcagcagcttatacacactgtattaagctgcgacatgatatattccctttttccctggaaactacgaattccctagaagctcaacgagtgttgggcttggctgtcatgtttccgccgcctttgctagcttaggttagttgttgagtgttattgtagttgtgattttgtccagtttttcttaatgaactttgtacggtaagatttggtctcgtttctttttaaaatggacaccttcttatttatataaaacattggcaacgaccttaccattcgggaaggaaaaaaaaccaattaatcaatccctacaacacaagaattaggtagatgtatttgggaacactcattgatttatatgtacattctgcttttttatttcccctcttccatcttccccattgcccattcaattgccatctgcctgatcatgagagggaatttacttcttcaactgctagacccctgacctgatgaactcctttataaacacaagcttgtagcttccctctttctcgacgaccctactctgagtgagaaagaaattaaacagggacaaaccatcgcgacttatgagtatggaaggcgtcaggagagcaagcccttgaaaaccaatcaattggagctatcctgtgcagatttttgcatgcatcttgatgagccatctcaaagaagaagtgcagtttggcgtgctaatcttgttcatcttgatccacggagctagcctaacaacggtggtcttggcaggattagccttcgccgagttggtcgtctcacagttgatctcggcagcctagcagtgtccttcaaccacgctcggacgcaagcacggtaagcagaaaggcgaggctgcgcgggcgttcgttcccgccataaagcttctctccatggtttctggcttgctggctcttcgtccctctcgtgtgttcttaggctgcttgtgcttaaatgtacatttgtaatttattaacaagtgggggtggatgatgagttcttcttctaccagaaattttattttcattcttgttctctgcatattattcagtaataggatcctgaccccagctcctaatctaaactctgtatttttcactgtttgcctgactagtgaattggagagctgtggactgtggttgggatggtagagtgtctgatctttttctgtcattaatggacctctggtttcttttcataatgagatagaagtgtttgtttgtgcccttaaatgttaggagaaacatatcgtgctttcatcatctaaaacctcacttgctgctacttgaacattttaagagttgaagtgggaacttaggttggtacatgcagatgtgtttgtgagcactcattgatatattggtggtatatatatgtgcatcctgaatatccttttcacccacattgctcattcaattgcccctctgcatatatatacacactttaaattggaattcacttcttcacccactactactcccctaagccaatgaattcgttcccatttctctggcctttattcgcctttataaacacctgccctcttgcttcccttctatccggataaaaatccttactcctgatgccaatgagaggttgtgtgtcctatcgactccaattgagcaagaaagacggagatcgagtagagctagtgactgagcatgagaggcgttgggagagcaagcactataaggtcaatactctgaagctatcgtgagcaataatgatgtgtttgcgtgcgctttgctaaattaaagctgtgggcaagaacttcttgaacgagaggtagctacagcgtgtggttgatcaagttactctagagagacggcatggctgccgcccgtatagttggcttggtgtacctacgcccatacaccggcagtgttttcttgctcatgggcagcttcagtgctgtttcttctacctagagtactcttaggagccaaaactttaattagacaagttaggccattttgactttatgtagtcaaattaatctctctaagtttaacatgtttacataaaacatcacagcattttcaataccaaataaacatactatatatcaaaatatattcaatatttggttttaatttggtgttataagagttgttacgtttctccgtaaaatcgatcaaatttatagaagtttaatttataataaaaaatcaaagtgttttgtaatatgaaacagacggagtactagaattttcatgcgtagtttgacctttttcacgatatgtttgccatcttatattgtggtgatactgtatcttgactttttcttgagcttggtatactgtcccctttgtcaattgttaatcgatataattaaaaatcatatgcatgcatacaccatatcaatagatcgtcgtacaaataactgaaggtcaagggtctgatcgaatcagtttagagttctatattgatttgcaaaatctcacttggacacacgttgtgttcatgagtgctagctaatgttttttcctccattttttttttccggagaactccattttcttccccttactttggctgtgttcggcagtggctgttgccatcctctactcctcgttttccgtgcgcacgtttttcaaactgctaaacagtgtgttttttgcaaaaaatttctatacgaaagttgcttaaaaaatattgatccatttttaaga

SEQ ID NO: 34244 - DNA, 562 bp, Oryza sativa
agaagcatgacgtgtggcgcctcggaggagaaccccccaccgtcaccgaagtcatcgaggatagtggcaatataatacggctcgtcggagagcttcgaggaacaccatgggggaaaagatcctacaaggtttgggtggtctagggtttttttggaagagtgagaagaaaaatgagctaaagtgggggcagcctgcgcccctatcctggcaatcgccaccaccaccaccgccgtatctactagcctgcgcggtcacctcgctctagctgttcctctccgctcctcctacccctcggacggatgccttggggctcgggcttagggctgtcaacgagccgagctcgagcgagctcgtctgcccaagctcgagctcgaacgagctcggtcataagtagtataatatatattttaatgataattttttgataagtataattattttctagttaatcacactaataaaagagtagaaaatgattaaaataaatatattatgctaacacatgctaatttattgtgtaaatagactactaatatatattatatttacctattagtttatt

SEQ ID NO: 34245 - DNA, 541 bp, Oryza sativa
ttctattttgataaataaattattttccttaatcctttaaagtgacttggggcagatcgagtttgaactcatatttggctgcaatcacacaaacctccatttggactgttggatgtgatatggatggatcagattcttctgggtcatgagaaggtaggcctaatctttatactcttttaaaaggagaagctggatgatggcactctctacacctaccactcaactcaagatcatttggggctgcataaatgtagacataagtgttctttgcaatatccatttcttaggaaacattacattctttgcacatgtgcatatgtaattgattgtgccttatgaaatagtgtatctaatttttagttttaatcaatattattgcttgttttaactctacatcatatagcatatatatttgtatctctcgaaagtcgaaatgcatgggcatggatgcttggaattaatatttccaaccgacaaaggggatacgagtcacccaaactagtctgttcatctcatcgagtggtccacgtggaaagcttcc

SEQ ID NO: 34246 - DNA, 579 bp, Oryza sativa
atctaatttaagtagccagaataccaactagaaccttttaatgtgtcaaatagtcccagaatattaacggttaatgctacactatgtctaatgagatgaataagtattatgatgttaccagaaaacacgtgttaatacttttgtttactttagtatgaagtgagaggcggcatcatatttgtattgagcaggatgttgtacaaacaatataaagctaattaaactaagctaattaaactaggtggacgaaaattcccttgttctgttgctgaatttagacttgtagctcaaatgtactctacagaaagggatgcttcttgaataaaatcgaaacagttagcttatccttatttgtagaaattctctcccctttgctatcagagcaatttaagcgggatcacaatgaacacgtgtcataacagtgcacagatgatgaactccagggcacccagtcatagtaagctcaaacacgggcatcaacaaacaaggaatgggcatgaaactatggcaaactacactaaatccagcatgcatatacagatgcacgcattgtcacaatttgcaagttgcaaccaacaa

SEQ ID NO: 34247 - DNA, 502 bp, Oryza sativa
acttcgacaacccttctcactctctctctcttcacttataagcaagctcacacacacctcactctctctctctctctctctctctctctcttccgttggagtaaaaaaggaggggaaagtgagaaaaagaggagaaaagctcacaccacccacctcctccattactagtttacttctcttctcctcctttctcccccattcccccaattcattccttcgccgaaccaccagagtggtggagagtagctagcagagtagcagagcggtgggagcagcagcagccgtagccgcatccggagagattcgggcaggagaagccgccgcagcgatgggcgcgccggtgcgcggcgccctcgtcttcttgcttcttctcgccggcgcggccgcggagacggcgccggaggaacccacattgccctccgccgccgccgatggggcggctagtagcgggacaacatctggcgctggtgctggaacgggaatcaactcgaactcggggctg

SEQ ID NO: 34248 - DNA, 679 bp, Oryza sativa
tattttgggaccctaaacagttttaatttaaaaacttttcaactacaaagttgtaggtcgcgttgagggctacaattttgatataaagtttgtcttcattagagttaacatgaaaaagttatgaattattttttgatataaagtttttagaccgtcctgtttagggaccgaggtgacacaactgaacaagttggaggacctaaacgagtgatccgcatgtttagggactgggatgatacagtcgaacaagtttgagtacctgaacggttgatttgtgagtttagggaccgggatgacacagcggtacaagtttagggaccggtgatggactttactcattagaattttatgcatgactatgtgcatctgaatacctcatcaataataagtacaaaacaagttctcatgtctagttttctcaactactaacatttctagttttgtgttttgtcagccatttgatatttctgcaaaagttagttttgttttctagaccaaatatctggaaatcagttttgtcaatccttgacaaggggggcctgcgcggtctcccggtgaggagccccacgctccgtcacacatatttcgtcatttaagttttttctttctatggttggttcttatatgtttctaaatgtgaaaaaaaaattgttggacatctcttccctctacactatag

SEQ ID NO: 34249 - DNA, 564 bp, Oryza sativa
ttgaagaaattttatgtacgaaaatcatgtaaaattcatatgttcgagaaaaacactatatttgtagcatgtgtaacactccatccgtcctaaaatataaacaattttgtattttttatggtgattaagatggtcttgattggtcaagttaaaaaaagtgcgtgtaagatggttataattggttaagataataagactggtggagaagttatattttaagataaattttagagattaagatggctagttgttgtactttaggataaatttttaaaaatagaaccggttttaccttatcgattacaattattagctattagctagtaggagttattgttacgcgttgagaaccgttatcgacaatttttgaagaaatttgttataggtgcccattgataacaccgggtatcgcgataacgcaaaaaccctgataagaacacataagtctcataagattccaagcatgtatgcactcgcattcacaaatagtgtctgtgttatatccgacgtccttacatgtataaaaaacaggtcaatatccagaggtgacctgtaaatgccgag

SEQ ID NO: 34250 - DNA, 688 bp, Oryza sativa
tggaatgcgggcgctgggggatgggggatggggaggaaggaggatgaaggcggcggcgtctggacgatggatcggtgaccgctgttgatacggagggtatcgaggaggaagaaggatcaaaggcaccgctcgggagagaggggaacgcgtgcgcgtctgcactcggcaggatcagagcattgcggaagcgatctgagccattggatttcacgatcctacgtttagtattacgcgtgtctatcaggattggagtcaccgctaccactacggaatttttaagtagcagagattacgaatctcaactctaattgcgattgccactaaatattaggggtataaacggagcggatattatccgatccgctccgaatccgtccgatgtaaggatatggtaagggtttttagtatccggccggatacggatgcggattttgtcatgcggatatggtatcaatgatatccgatggatgcggattatccgatattttaatcggattatccgatgtactgtttggcggataattcacaactttcaggccacacaacaactttcagacccatctagcccatctattataaccctaacctaattcactcctcccccagatccctctctctctctgccgtcagccctcagccgtcacgaggtcgaggagtctgagagtggcggcgcgacgggacccagcat

SEQ ID NO: 34251 - DNA, 634 bp, Oryza sativa
ggatcccccatgattgtaaagagttgacacttaattcaataataataaggtgttgtgttcaaaagtccaaattttgataacaatagatgtgttaatttataaaaaccaattgattcatccttcctccgctttctggaatcacgtctcttcttgtttctatcttcctttagctcttttgtcaataatgggtacctctctctagcacacttcctttttagttcagccgtactgggattagtaacatcttcatgcatgttgggtgtaccgtacgacagttcagctttgtctgtgcatggtagccgcacatgcctaatgacagaagcgttattttcatagcctgcaccgcaaaatcagaatgctgatgttagcctaaaacaaatatctcatatattaaaaaaataaagccaatataagtatgataccaaatccaatagttgaggttctctgaatcttatatgtagagttcttgttgatctgttgacagttctcacggtcttttggaacattgatttcacttgggataaccgcgcggcacgcttgtttgtcaacttggcattaatcacattagttatattcacaaaaggacctaaaggaagagtgtatgtaaaactaggaagcaaaaatatatcaattg

SEQ ID NO: 34252 - DNA, 723 bp, Oryza sativa
aggcgtcagcaccggacagccgtacgaggtaggctaccgaggatgatgatgatgatgccattgttgttgaatgtggtactcatcgtctgacaaatctcaatgtgaatcgaaatcgaatatgtgctttctgtactcttcgaagagaaaattgcctaaattttaaagattgggagggagagatttaaatatattacttaatagcctgaacatcatttagcaaagacaaaagagtctctttgatcttcatgtcttagcaaacaagggaaacacccagggtcttccggctaactccacaaggtggtgggctaaacgaactggattcgaagcctcacgcccacaccccttctaattatttgatattaggttcttctctaatattcgcgtgttttatgtcttagcaaaccagagtcagagttcttgatttccgaatggggcgacggcgaggaggagcaaatggttctcacatccgtgtcttgtgattgcaccggcttcccttggataatttatgaatgaaattaccgcttctaaatgacgtttataggctatttagtcccttttctcgatctttgggctttgggcgcaatgcgaggtcatcgggctttgggtgcacggatggcgcctgggccatggatcgtcgtgggaaggtattggtgaagataatccccgacgacaatgacagggacgctggtggcgaggcggaggggtgatatgagagcatggcga

SEQ ID NO: 34253 - DNA, 515 bp, Oryza sativa
aaactcagcccatccatgtatacgagcccgtaagttttctactcatgaatgggccacaatttagtagaaaagggccaaaaattcaggcccacaatattctcagatgcggatatgcggcccagctgagcaaccagcctccgcccccctaaaccccaggaggcggcaccgccgcggcggcggcggcggcgctgagctctgctcccctcatcggcgcatccccatccgctctcagatcactgcgcgctcgaagcctgagattttctttagctccttagccgcgtgttgctgctggtgccacgcgtcttgatgtttctgtatgtagccgtagaatcttgatgcgggttgtgtaatgttcgaagatggatctaggagtatggccggatatgatgcgattgtttcgttgtgctttagtttagagaaatggtgtatttgtagacggttgctagtatcagtatgattgagaatgtaaacctttgatatcaagcaacgttatacctactgtggcaatgttcttg

SEQ ID NO: 34254 - DNA, 626 bp, Oryza sativa
aagaaaaggaaaaacaagcaacttacatctatttacatcaacttacatatataattttaaaacttacagtgtaaatacaccgaaattacatatgtaattttgaaacttacagtgtaaatacactaaaattacatatgtaactttgggtacttgcaatgtaaatttattttatgaaaaatataacggtatatatagtcccaaaaatatcaaatcacacctcaaacaattaagttaactatagtgcaacaaaacaacgatgagtaaaaaattccgtacatgtaaaacaaaaattacacccgcatatacttaaaattacattgtaattgtagtgcacttacgttttaatcgtggtataactatgttgtgagtgggtgtagtgtaactgcagtgaaagttttaaaaaaagttacgcatagaaagaaagtagtcgtttgctgcttgctcagttggtacgatgcatgtcgtagcatcccgacatcatgggttcgattccctgttctagcgacattttttttttcactcaatggcacatacacgtatctcaaagtaaatcatacggtcaacaaatcgactgatttttaacagaaaatctgtcgccagatatgtagcaattccgttattttgat

SEQ ID NO: 34255 - DNA, 638 bp, Oryza sativa
gagagagataggagggaaatgtgctaatagtagatgaattgttgtgacatgaccttgtcacatagaattgctagggcacactatatttacatgccaatatatttatattgcattttcctacatctaagtaattagatttctcgtacaattcatacttgggtatgatattctcatggatagttggggatgtcagcaatctatagcttacacggtcccttatgaaagactctattggtcttattgtgctccttgtgagcacatttggatacacattcaaatagattaagataactcgatggaatgtataccctcaaattctttttcgataatgtaatcaatattaccctattatttttctagcatgaaaatctcagatcaatccaaaaccatgtccaactcaatagttatatatcataataatttacaactcgtccactcataaattatatttttttaaagaaccactcaccatcccttccctcctctttttcatatttgtatccaataaacaccttgcccattctcttgctcatccttctgtctgtttgacagattggaccaatttatcactcgtagttgaaaggaacaagagcgatttaatgatatcttatcacttgtaattggacttcaagcctctt

SEQ ID NO: 34256 - DNA, 500 bp, Oryza sativa
  unsure (1)..(500): unsure at all n locations
tttacaaataagccgtttcgcttataccgccaataagagaaacaatggcttcgtatgtctctatatacatatataatatatatagcggcagctatagccggaaatttaaaacggcgaggaatctaatctaacggcactttcaagaataacgccatactatacatacctgagtcatctctatcttgcttgaaatagaggaatccgagcagcaatccagccaacgaactcgtcaaggcaagagcaccttttacggcgccatggccgacgccgagatccctctgcgcggagagggacgggagcgtgagccgctgcgcgcgagtgatgaaattttcgatctgagatcagggggggaaacggagagagactcacgagggtgcggagagcgcgtggcttcgctggcctagtccccgccgccgccgccgatcgcngcgctgcgcgccgcgtgccgagagcctccggtcgaggagagatgcgagtgcgcggaggaacatgggcctcga

SEQ ID NO: 34257 - DNA, 993 bp, Oryza sativa
tataagattaacaattaagcttggagtaattaatctgagatagtgtagtgccagcttccttggaagagtccctaaatctaatgcttgggggaaacaacattttctcacatggtttcttatagtaaaagagtggccatcaaatatagcttaattggtagagtagtagttgccttgcaaggatcactcaaatatatgtatcccagtatatgaatatcctagggcattgagtaaccctctagataactgaaatttgcaggtgaggaacagtattttttttttctttttgagggtgagagatatgagatatcgttgattttgttttttaaattaatattattgtttttctttgggaaagtgtcgattttccttttatttattgcatagaagcaaagttgtgtcgtttctcctgtagcaacagggaatgttcagtcaaattacccaatcgtttctttcctaatgctatttagtttcccatcaaacagagactgatcagcggtaattagtttggttatcggtcgactagaggttaccacctaaaagactgtattattcaaattttatatttgaaaattttgaacttttacgacttatgactagttaactaccaattattcattaaaaaaattgaatctgaaattttatctggtaaaattcagtaactgtcaggggccagtagcttcggaaacccggtttctgaaacgcttggcctaaacaattaattacagattgtttaatttcagatcaactaatactactactactcacacgatcatctagaacataatcaaacaggtttaaaaatatcttaagcagcacgattaggacgtgcgaggcaaagaacaagggaggggtagttggacgatgtgacggttccggcgacggtcggataagtttccagtgatctaatcatgctgcccaatgcaacagtgccactgaaatggacgtgatcatgctgctgattcgctgctactactactactacctggatttctg

SEQ ID NO: 34258 - DNA, 723 bp, Oryza sativa
taatctgagctgaagtgcaagattagatgacaaacggctgtacttctatgataagtctttgtatgggccccctcttctttcatttttgatatttattggacttgtcaatttcctgactaggaagtggccactgctagatcattgatagcgaccgatagaactttctgattgttactttgttcattggggcttctagattatagttttttatgcctttctgaggtgggtactgagtttccgtcatctctttattatattgagcagagggaacctgcttgtattgacttgtacttcagtattgtagaatctcaacagattcctggttggttatcagatccaatcagcgtggtacagtttggtgatttttgttgcctgctcttttcattttccctgtttgtggatgggctattaaatgtatgatgctttactattttgttgtaacttggggcactttttttttcttttttctttagataatggaagctttattaagacttagtcaaatacaccaagttcttggggcacttatatatgtttagtaagcatggctgttgtctgagaacattgcgaattggctgcaatttaagttctgctgccttttctgtaggtttcaaatctaagtcatttgagcaaactggctcgtagaaatgatacagccagcagagtagatgaagctgacaaattgcgtacggttttccttgcaatggaggatgcgagagcagt

SEQ ID NO: 34259 - DNA, 736 bp, Oryza sativa
acctttttattgtaaccgagactaagttgtcgttgggcatttaaaatatgtataacagacctacctttcgccctttactgttggtccttgttatgctttcgcctacttctcactattcgattggttttttgccatttctgcattatctgccagggtattcgccgaaaactgtgtattcgacccccgtctggaagttggcgaaaccaaaacgagaaatttgtggctttaaaagatttgccgaagatgcgatgcccgtttcggcctgtgtatcgtgaaatgctgataaatggacacagctataaggttttcaaggttgctgggtggcttcggagtcaccctgagcgaaccctggaggattatgatcttgttcattcaagacgtttggacgacatggcttcgcttttggcggaatcatcagaagaccgatcggcaggaagcgatctttcggcgccgttatggcataatttgcgtttcgcccccttctccccttagagtggtgtatgatattagcgacgacgaaccttgttcgcccgatcattctttagccgacaggggagaaaggggacacgagggcgaagatgtaatttatttgtgatctatattgcactgtttgagttgtaatcctcgatacctcccttttttttttgaatcaataaaagtgtgctttacttccttttcgctattctcgcattgtcacttcgcgtgctttcgttgggtcggaacatgtcggtccctt

SEQ ID NO: 34260 - DNA, 567 bp, Oryza sativa
gccggggatgtaaaacatttctgttgtctttaaaaaaaaagataaaagagggatttgaagaattgtatttgaaattctgaattatacataaccaaaattgatatggattcgggattgagtcggtctggtaattgcagatagtccaacattaccaataaatcatgttggctttcaaagttttaacttaaattggtcgacatggagtactagtattgcacttgtttggctgcttgctgaagtttgcggcacttgagttaggagtacaagtgtttttttaaacggaaaacggtacaagagtgcgccttttcattaaatatagaaagaggttaggagtacaagttacgaccatccataacaaatgtttgattcattgctaaaattgaagcatattaacccttaacctcacatgttattatagccaaaacttgccacaaaatctatggtcaccgtctaaatctctatcttcggtcctgccagattagtaccaatactcctactgtgatggcgatgtcatcgtttcgttacgctgacatgcgagcgtacaccgctagtagtacaagtgtaatt

SEQ ID NO: 34261 - DNA, 662 bp, Oryza sativa
aaaggaagaggggcgaaggggaggcggagttggggttgatataggagaggagagggtttgctcctcttcctctccactgcggtgcttttctttcccttcccttctttcttcctgtctaatcttccgtttttgccggatttcgtgggtttatggacggttttggttttgggtttgggtttgggtttttaggtttaggactagggaggggagggtcttttgatatttttttaatctaaaaataaattattttgcattgtcctttgagaaatatctagctctaaaagaaatattaaaggaatattagcaatacttgaaaaaaataacaatgtcgtatacatatgaattgatcatgtgtcactctcagacattattatgcaagtattttttgcgcattacatatataatatgagttttgaagtttttatgcaggctccaagttgacaattgcaatccttagggtttcgactcctcagctggttgggacgttatgtgcatggaataattattgctcggggtatagaagttacgtgtttccttaattacaacataccaaacctatcgtttctatgaaaacattcaagatttgacatgtatttattttggtgttggttaaatcatatttttggacggtcagagattccttgtttgtgcatatcattatt

SEQ ID NO: 34262 - DNA, 696 bp, Oryza sativa
aatgctcgtctagacgtctactctgtcgatgtgagactgacttgtgatcatctgttaaattgttgatccttgtgggatgtcaatgtgacgattttttgtgatcatctattaaactgtcaatccttgtgggatgtctgctatttctgtgaagtgctcccgaccccaatagatgattgatcggtgttcggtggtgggggttgggaatcatcacccacgcacgaaaaatggagtgatttattagcgcgtggttaattaagtattagctattttttttttaaaaaaattgatcaatatactccatccattccaaattaatctacatatttcataggtataccaagaccaagaaaagctaataactctctcatactatatttactctagcaacaaactcaatgcatgcaccatccccaatatttcctagccaataataaatcaaggtattgtatatgtgttataaatacttgtgtgcatggaatgcatgcatcaatgtccatttactccaatgcacaaataacgaatagactctaataaataaacacaaatgtgtagatcatttaggaataacctcaaaaaaaactatatgtagatcgatggaatggagggagtaatattttaagcaactttcgtatataattttttttgcaaaacacacgacatttagtagtttgaaaagcgtgcgcacgaaaaacgaga

SEQ ID NO: 34263 - DNA, 1108 bp, Oryza sativa
tggagtattaactaagttagctatactttcgaacagaggaaataatttttagaattaacatagaaggttttcaactgctttcgtaactcagctgggttatagattgctaggatagaagaatataattattatgctaaaattattttcggttaattcagaaacatgttttcgtttttcttttagaaaaaaaagctttgaacagggttacaataatcatcttctccatttcccttttctgcgtacagtacgtactctgattttattttctgctacgttggacgaattatcttctggaacagtatgttaaggtgcattaataattaatttaaaaacaatattggttcgatgtagggccaggtaaaacgacctccaacaaaccaaattaattaaccaccaacgactgaatgctcatgggaaaagtagcttcctaaatcttcacactcacgagttaaacagccattaaatgcgatcaacttcttgatacttggactgcacttattaatgaacggattgtttgggcctttggttatcctcgcatttaatgcgaggcaatgctaatgcaggattctctgtgggggatgcaccgagttgacatgtgtgctctcaacgtgttttgttttactgggaagacccacctagaaatacacggggtattccggatagctccacagggtggtgagttagccggcttgtatttgatattaggtaattctctaatatttactgttttttttacaggaagacctacactctcacacactaatatacgtcaattcccttcagtttcataattcttgtcttgtcttttggacaatgatacgggctccgaaatatatcgttagttatgtatttttattatgatatatgcgataactaaatgcatgtttagtatcattatagtacttttgtaagacaaatatatatatatatatatatatatatatatatatatatatatatatatatatatatatatatatatatataagcattaagatttaagagtgaattgcacccacggtgcaacaacttggcaggtgggtgcaatttggtgtaataacttgaaaaatgagcgttctggtgcaacaacttagtaagaaggtgcaat

SEQ ID NO: 34264 - DNA, 2583 bp, Oryza sativa
aactcagaaatcacagagcgctcacgagatcagagagagcgaggactcaccatgagatcaagccgcctctcccacccggcgggaaccttcacctcgaggtcgaccaccttgtcctcccctccgccgccgccgacgacgccgccgcggctgtcgccgccgcacccgccgagcagatccatcgtcacgacctcccccgccgccccgcccctcctcccggcctcccctcgcagcagcctcgccacagagctcacgtccgccgccattcccctctcccccgtggcggctttcctctgcttctccgcgtcgccgcaagaagaagaagaatcgaaagaagaagaagcggtggcgctggtggtggtgggcgcggctcgcctatatatatatagagggcgcgcgccgccgtggccgacaggtgggacccacgcggcgaatgggcggccactaatttattggtgttgttgggaaatggttgggggaattattcatgccaattaattccgatttctagggggaaggaggaggaggaggaggagaaagaaagaaggcctctctctgtggtttgatctagtcgagttttaaatgcattttgattttttggatttgttttggtttaaagtttgcatttattctgcattccatatacctgtggtgtggtgccacatttggcattcagaaaaagatgaagaaaacctgatctgcccacctgtaaattgtagtaatggttcatttagagagggctatttttatgcagtgatgcaaatatattcatttagtgtcatgtctttaatgagaaatgatcctcaatttatttgcattattcagttccttatgtgtagttattagttcatctagaaacagatgttcattatgatattcattattagttccatctaccatgaaagaacatgctatattaatttatatgcatggcgcgtcatctgtttttagatatataatcttattaaaaataaatcacaatgatttgtcaacgaacatagctaaaacgtgttatcgtatatttcttggagctgaataatattaatctctttgtcaaaagtcatatattggagtacatgcacggtatggatactccagcagtcgtaaaaacattaaaacgtcccaaacaaacctttaattctttgaatggcaacatctttttagattgattgtataaaactcatatattcataattatcttaaaaattagctctcaatatgatctcaatgaattttgtaaataatagtcatcaactcgtgcgttgcatggctacaattattcataaggtaaatcttagaattcgaatcatatgttcaatacatagattactttttctccaaattactactactacctttgtcctattttcgtattatttagcatatattaagatttgagaagaaagactaaggtgtccctcattaaatggtgtataggtaagagtggggtggtggttgggggtagaatatggaaaattttaaatcagaagtgattaaagggaaaattagtactctattataacaactattttggcacaaatttgaaacgtacagatacaattattatgggacggtgatagtattgcttagatttaaaagggagtccatgtcatttataatatgataattattaattttaatttcataataaattgagagcataattctaagtggtacaacttcatatttattagttacaaattattgaactttggaaaaaacttaaactcaagactccatgtataatggcatgttttatatcacactaaatctcaatatgatatatagccgtgataatacaatcaacttaatcaacggttagtaccatatctttttgttaacgtaaagggcactctcacactagatatatattcttttaaacagtctaatatatctactttctacactcttttatagacaagatgatagataggtagatagatagatagatggcgtgttcgtcgacatagggattcaagatgccaccgtcgtcaccctctagccctgccgcacggagagggatttggggatagatccaactatccaagggagttggacagagaagaggaaatacaacgagcggttatctgcgaagttgtaacaggagatgtgtgatggctttctatacaaacgctctggctgaattatatcctttgtattaaaattaaagggttgattgcattagtgcatgagggctggtgcgtgcatagaatacattgccaatcgatacatagatagatagatagaaatttgttttcataatattgcaattttaggatttttttaattactctttgttccaaattagaaaatggagggatgtccgtatatatttttaaaaacatgtaaaaatatctatattttaaaatggtggtaatattataaagatggtgctgatatgccaaatggcatgtattcagtgatccaattccgtaaatttgtggcaacccacaccaatattaaggaagtataatcttactaataatgatatgatccgaatattgaagaaaaaatagttcaggcatatgacagtaaaattttagtggccaaatagggtgtcatcaattcactctaaaaatgggggat

SEQ ID NO: 34265 - DNA, 682 bp, Oryza sativa
ccttaactttcaaaacatttaattaattaacaattagtataatatgtattgaattttatttgctgaaaacaatataattggattatatttcaatatatttttatatgattataatttttttgatacaaagtttatagagaaattataggtactaaaattagtttagtagatcgtgtgccgaatacgtactgtaggtaattagctagctatagctctcctgtatattgatcgatcggctcgtgttcatcattgatgatgattaatgttgcttaattaagatacgtagatgtgaggatatgccgttgaaaaataaaaagagggcgtacgtccattgtacacatggaggtcgaccaatttcaatttaatttgtacgtgcaaattgattgaaattcatccataagcagctatgaccatttcgttcctgaaatttctgcaattcgatagacagatgtactagtactacttggtttatgttgtactccgttttattttcattggatgagttggaacttggttttatttcatatggccgtacaggctagtgatgtacttaagagaagttgctttatatttggaaaaaaaaatcaagggtagtagctagtatgaaatgaatgaagatattttgtaaccaagataaatgaattggcaaaataatctgttcattaattatatagtagtacat

SEQ ID NO: 34266 - DNA, 517 bp, Oryza sativa
ctataactatattgttatctctatataaattacatataaagttgcatatattattttaatacatatatataagttattattattataatatagttctagtgaaattatatactatagttagatttgaaagttttcccctcaaaaaacactcgacagttttttagctagtcccatgttaaaatgacttacattgtgaaacggatggagtaccaaattggtgaccgtgtccctgtgtgtacgtacgtatacgagccgaccaacgcgaacaaaggaacgcatcaacccagcttcaggcaatgcagccaaattaagaccaattcatcagaaagagagaaagaaaaatccagtgatcaccaactcaaactattaactgcccccaaattaaagaaagaaaagcaacaccaccgtctgttgcaatgcaagcaaacgcatcagactttcagagaaaaaaaagaaatgcgccgtaaaggaggtcgcttgattccagtccatgcatacgcgtttttgactcggaaca

SEQ ID NO: 34267 - DNA, 1127 bp, Oryza sativa
tgtacactgctaaaatttgtaatttcaggtaaaatgctttcaaccaaaaattacaatagtttttttctgtaatttttatcagaaatgtattgtaatttgacttgtaaccttgtatccacatataagaaatcatgtaaattagtaaactagttctgaatttaaacaggatataactatatgttccaatttagatctcgtactgctagtatttgattttaaacttagctcatgattctttttttgctgcgaactaatcaaatttctcatcccatttcttattggattttgcaaattgatcaactaaatcggatcaaaattttggtgagtttctaaactaatcagtacagattatacatatcattcatgagttagaaaagacttaagtaaatcaaatatcagaaatactgcgttcacctttattgttcaaattgatgctatccatttgaagtgaatctgaattgttctcctgttctcgtggggctgcaaagctcatcatctgaagaaggtgaagaggccgagaactgacggaggaccggggtggggagggcgccgaaggtgttattgccagcagaggggtcgcgggtagtcaccgccgccaggaaggactcgaggccgacgaatgcagccactgcggcaaaaggcgtgagcaaggaggagacgaggagtaaggggatgaggaagggtggggctcaagccatggccgatggccggcaagcggaggggacctccacccgttgacttcggtattcgtcgccccgatttcttcctccactggctcttccccgctaccaatttgcgccgcgcgccaccgccgataggctctcgggttcaacattactagaggtctccctattccaagtctgcgtggctatcctggttccggcaagggctcaccactacagagccttctttgcgcctctctgcaacagccaccatcaccacccacctctgcggcgatgtgggtggaggagttgatgtgggcggtagaggcggcgttcgcggatggggtcgtggagagaggaggaggacaagcggcttctgagcgaactcgagacaggacgctgcctccggtgggcggcgaggccggctcccgtcccgtgcggctgtgggggaagaacgggcgaggg

SEQ ID NO: 34268 - DNA, 635 bp, Oryza sativa
aatcatctgaaaaagatcaaggaatcgtttccctgtgccaaatgcgcgcgcgtgtgtgacatatcttttacatttgtgtttgtttatatgttaactaaagaggagtagagtgtcaatacgtgaaacatttctggagttttagtccaagaaatgatccctgtttgggacagtgtatcattgtaagcttctatggctgtgcaatgtgtgacgtttcttcaactgaaatatatgaaaatatatgggtttcctgcctgcatctgcttgctctgactgatatagcatactacttactaacccagatttgaagtgcagctgagtttaaccacttactgtcacatggaacaaacgaaaagtgtatcattgtaagcttctatggctgtgcaatgtgtgacgtttcctcaactgaaatatatgaaattatatggctttcctgcctgcatctgctattctgcttgctctgactgataaagcatagtactacttactaacctagatttgaagtgcagctgagtttaaccacttactgtcacatggaacaaacgaaaaataagtatagggagaatagatagggagaaaggagaaaaaaaatataagtaaagggagaaatagatagggataaaggagaaaaaaaaaag

SEQ ID NO: 34269 - DNA, 561 bp, Oryza sativa
atcagccagagtacccagtccgtccaactcttcttggctgtagtccgcgagttcgttaggggctaaaggggcaagtaaagagcttcgcgttccgcgctcggcgttgaacttgtcaagggccttgacaaccttcttgaaattctcataccgatgagccttctcctcctcggttctgtatctccggccgtgctcgctcatccccagtcctcaaattttgccttcatggtcacctcatccaccacattgtcctcctcggcggcatcatcgacgacggcctcctccttgtcggaacacttcttgtcatagagtggtttccccccatggttcatttgggagttgaggtaatcgatgtagtcaagataggcaaatgtgccatctttcctggtgaaccttgccatgacggatggctcgatcacgtccctccaattaacagtcacctcctcctcctccttcctggtctcctccccggctgctacaggtaggaaacaaatgaagctagcaacgacgaggaaccgaatctaatctaatctaatggcgcttctttcaagaacaggcatagat

SEQ ID NO: 34270 - DNA, 728 bp, Oryza sativa
caggacgagaccaaccctgtcaattctctgttgctttccctgtttccatcttctgcatgggccaagaagacctcgagagtgaccagtagagtagtacagtgtagatgtgtgtgtgtgtgtgagtgacccaataattggaggaggctatctcaatcttgcgtgctctcccgaggcgagggaatcagagccattttgtctctggaagacaaggaaaatggccatcacgatcaatcaccagagtttgtgaacgaatggctgcttgcttctcttgctcaagaatactccttttgttaaagggtagtggcatcgtattcctatcatgctatcatatgtactcctttttatcaaaaataaaaataacctagaagtgaatttgatactaactagtacaactaatcatgatatactcgttccgttccaaaaaatatgaatctagaactgatgtgatatattaggacgtggcacatccagtactatgttggttttttatgggacggagagaatactcctattcaaattcattgtatagtgtcaaatttactcataggttgtttgtttttgcgatggagggagtattggtttgactggatgggtcatggaaaactggaaaagcaacagcggtatgcatggcaaaagagggacaaaagaacaagacgaaacataggtaggattgcaggatgctcaagtgagaacttgtagttgtagatgaagtgaagtgacaagccgaa

SEQ ID NO: 34271 - DNA, 1224 bp, Oryza sativa
agttagagatatgattccaccctaaatttaggatattaaataaaccagcttataaatcatataaatcaataagctaacttaaaagactaatcctgaagaaaagaggctttaggtacaattatatagtacccctgaaaaaatcgaattgacttacctcggaattttgcagcggaagaaatgtcaatgtcttatacccaacgccattgcagattgtttgcaccaactttccacgaaagaaatatttgtgtcaatgtcgcacttgatcgtagtaccgacctttttatagacagaggtgcaatatcaaagtacccttttatgtagttcttcgatccttaataacatgtgccgtcgatgctgaccgagtacaaagaaaaacgaatgctcttttcaatctgaacaggggagtatggttttatagaaaaaaatagcaatatctataataccaaattagtttcactaagtttagcattaaatatattttgataatatgtttgttttgtattattatattttcccacatgcttgttaaatataaagaactgattaagaaaataatcaaacaatttataatatggaacaaactgagggagtatcttaatgcaggagcaacaccatgctccatcactgttggcgcatcatattatgctaagttaatcttgagatcggataaggtgctgctctattacatgacgtagctctactcgacagaacaaaccatgctccaaagagattaggagtgcacttagcaatgggctttgagatgatcactctctgacttctcgctcctccggcagtgtacgccctgattggtcgtaagcgctgacgtcgtccagctctcaccaaacaaaatctgtgtgttattttgggtcgcagccgcccatattatggagtatagtcgttaaattgtgccgtactgatcctactctctgatcaggaaaggtcctttttcagaaagaaaatatggagcggaggaccccgttttggcaggttttaaggcgaacagcgcgagaagaaaacaaaagatccagtggtatcaagaatagtatgctggcatgtgcacaaacaccctcaaaataattggttcacatcatcaaaatatttcttttttctggaggaatatcaaatcttccctccttatacaatgtatgcattgttttgtattcatatacatatatgtagtaaagcagtatagtaatttttttcaggtgcaaaaatttgttggat

SEQ ID NO: 34272 - DNA, 1649 bp, Oryza sativa
atgtggacaaaaagaaaaaccaattgcacagtttagctataaatcgcgagacgaatcttttgagactaattaggccatgattagccataagtgctacagtaacccacatgtgctaatgacggcttaagtaggctcaaaagattcgtctcgcggtttccaggcgagttctgaaattagttttttcattcgtgtccgaaaaccccttccgacatccggtcaaacgtctgatgtgacacccaaaaatttccttttccccaactaaacacagccttaggagttaggatgcctactgtagttgagtggagtagtagtattgatgtagattttggttttttttattcactctgctggatacttgatgtcgacttgttaacaacactataatggtaacaacatgcaagctttcattgtgatgagggcgataagcaattgcattagctagagtagtgttttatgtgtaaaagtagtataaatgcagatgatggtagggaaaatcaccactgtagagtcaagaaaatgatgtttgctttagtcattaggacaaattagaaaacgaaattcttaccaataaaacaaaattattatcaagtctttcagcaagctttgtacatgtagcgcaaactaacttcattagtaagagttaacatagtttagaacattcttttttcacaattccagcaaaaatcaaatccattcccctgtggaattaatgatttcaagtaactactatgctttactctactcccttcgtcccataaaaaatcaacttctagagatgaatctgtacaaatgcaaaggtaaggttttagaagtcaacaattaccttctccaattcctcacattgggccctactagtacagctaaaggtgctactttccctcctgagaagtggggactggagagagtggtgttctattctcttttgagagagagagagagagagagagagagagaaatttctctgttttttttttttgagagagagaatccagtcacattcccttgggtgtgaggtggtggtgggtcacatgcatggaggacttggagggtgaagcaacacatggccctgttccttccttcccaattcacattttgtgctgaatctgaatgccattgccatgctcacatgaatagctacccgatcactcttcagtctccacattgctggagttcattcaccactggcaatctggcattaggtgatgctgtgattggctgattgatgcgtcaggttaggtttgagagagagattggtggttcaagaagaatatggctttcagtgttgagatttatccttttatctttgatcatgcagtaacaaatgaaagcgatagccgttctgttatctgaaaatcaagtggtgttaggtgttcaaatgctgtcaatgaatttcatttcatggtaaagacagtgtcagttgttcaccgacacaagtaaattcacaaggagagagtgataagtagaggccaaattgctgccgacacatggatttcagagaggggaaaaaaaatgacgccgacgcatagtatggatgccccagaacaagattttccaacctctcccatcaattattactatgcaaattttttaagcatcttaaagcaaagataaagacttgcacctgtcaagtccaaccaaaacgcagtttg

SEQ ID NO: 34273 - DNA, 596 bp, Oryza sativa
cggtgttatagtataatagaaaatcgaagggaatattatattttagtacggagtgacgccactgggcacttgggcagcggaggcatcatccctgacgaatgaaccatcctcgattcctctctcaagaaagccgccaggaaaagatcgaggaaagaatccaaatctcgtataaaaaagaggaaaaatatttctttttttttctgttcactctccatcacgacctgcggtgacacaagagccctccaaatccaaaacccataaataatgatctgatctctctcgttctcccctcccacgaggtgagagactgagatgtgcccgcgaccgcgagtcgcgtgaggagatgcccacgcctcgtctccgctaccacctcctctccgattgatcccaacaaggcgaggtgagctccagctccccgtgccgttcttgggtttttctccgatcctgggaagatgcgtgttttcatcttctcctggtgatgaagtgttgggttttttttgtttttttggctgcgatctctggggacgaggttggttgtgatttggatgttcttgtcctgtagctcttgtttggcttgggtggctgtggttggtttc

SEQ ID NO: 34274 - DNA, 968 bp, Oryza sativa
cataagagcaataataaaattgtgtacagatcagcgaagaactacatgaaaaatggaagtaattccatttgtttctcttgtgtggtttgtggtttgtgatttgtgtttgtgcatatattttttttccttgagaaatgcttctgtgcataaataagttgatctctttgtatcatagaagttctctctgccctgcaatgtgtatgataaatcataatcaattcgtggttaatgttttatgcattattactagtctgtatttttagttcacattattcctgttcctatcaaagaattctaagttgatcaccaacctcgttttttttgcatagatgacaatttcaattgaaactattaactatgtattgtccatacgcttctgacctcactgtaaacttggagacaacagacaaatcctattttgattaccgcagcatctgggagtaaatcgaaatgaatattcaagtttctttttatttgcattctgagatggttttctaaacctctagcacaggccaatgaaaacttcgtttttagcttaattatcccaatagaaagatgcacatatgtctctggtatttaaccatgtgtagtactagtacatttctagctcatgccatgaacctgattttaggtcggcacaacaacttaattaatcggtctctgcaacgcgtgagacacgattgatgttgatcactgcctccaattgctggccttacatgcaccttaattaaacctgtcttaaggaagtctccaacctctcaatcactgcgtacttatctatcctatcagtgccatctcgatcgttcgttttccttgcacactaatagtactagctctttttctttactttattaactgctaattaaccagtcaacacaatcaacacacagatgtacgtcagagcccagctagctttacatgctccattggaatattacactttgaagagaaatatggtaagaataatt

SEQ ID NO: 34275 - DNA, 1555 bp, Oryza sativa
gaatacatgacggccataacataaaaacgtagctaagactgatttagtcataatagtattagtgttgaaagagggcaatcccaaacgaaaaaaagttatttctcaatcccaagaatcaagctttcatcattttccgctatcgtcaagacaaaccttaaaacattccacctcaactatttcatccatagaagcgtatctgacaactatgtcatcatcgtttttttcttccaaaagctagaaagggcctacctagtgcttgcatttcggggtaaagtagctttccccagctcaataagagctacctacaaacatggaatgccaatgcaatgatcagaacttccttgccaagaacatcctgatttattatcaggctttaacctttgtaagtgtaagatgagacggtgagagtcttaggccctgtttgggggagcttaagattctgagaatctgttggttggtagccagcttctgagaatctgggttttccagcttctgggttctagttcattttctggattctacaactatatattctcataatctgggtgacaatttggactgttttggggagctggagattctgagagaagctgcagcaactagaagctccccaaacagacccatagattaaggagtctatcttaattgatgtatttaacatatagagcggttacatgggttgacaatttcagattatctagcaaacggcctaccagataatctatatccgccgaattttaaagataccacatccacacagaatccatatcacactatccgcatccacatccatatctatcggatttctataaactcgtaccatattctcgttttgagcggatttggaatggatcagataagatgttatccgattcgttttcacaccaactctaacccgataatgcccgagcattatagttgtgtttggtagaatttccacttcctatctattaagcgcagatgtaagcattgcgttcctttcgatcgtcgtctgtcctactagtaccgtaagtacgtgagcctctgttaattacgacggcgactaagatcgaatgtgagattttatacgaatcaacagactaggacgtctatggtgagtagggttagctaggcaggtcgtgcagcgttcgcagcaacacaaaaaatatgtatggcgtttgtgcacgtcgaaatggagtgtgatagctagttcgtcgtacgtggaagctcttgtcaaacatcgtagctgcttcatcggcaggcgtgatgttgagaggtagcgacgttgttgcttaaaggcccatttaagtttaagttttgcaggcccaaacttaacttttaaaactcaaaaatcatctctttggcaattagatccatcaaaacttccaaacaaaaaatttacttgtagcaaatcaaaccaaaacgaaactcccgaaacacatgaattttggcaaagtttgaaatttgagttttggttggggtgcgccaggctttggcggtagtgcaacgcctaagtgacgctcaagggctctaatggcagccactattgtgagccccttcctaaaaaccgggatcc

SEQ ID NO: 34276 - DNA, 910 bp, Oryza sativa
agaaaaggaaaaacaagcaacttacatctatttacatcaacttacatatataattttaaaacttacagtgtaaatacaccgaaattacatatgtaattttgaaacttacagtgtaaatacactaaaattacatatgtaactttgggtacttgcaatgtaaatttattttatgaaaaatataacggtatatatagtcccaaaaatatcaaatcacacctcaaacaattaagttaactatagtgcaacaaaacaacgatgagtaaaaaattccgtacatgtaaaacaaaaattacacccgcatatacttaaaattacattgtaattgtagtgcacttacgttttaatcgtggtataactatgttgtgagtgggtgtagtgtaactgcagtgaaagttttaaaaaaagttacgcatagaaagaaagtagtcgtttgctgcttgctcagttggtacgatgcatgtcgtagcatcccgacatcatgggttcgattccctgttctagcgacattttttttttcactcaatggcacatacacgtatctcaaagtaaatcatacggtcaacaaatcgactgatttttaacagaaaatctgtcgccagatatgtagcaattccgttattttgatgccaaaaaaaccttaccaaattttggctatggcatagttactaaaattttggcagggtttcttatatagttaccaaaatttgatagcaaactaaatatagccactttttgtaactttaccaaaatttagtaaggttaaaaatagcatcaaagtgaacacgcccttcattttaggtccctcaacttgccagcgaaattgatttttatatccttagaccgaaatatcagatacaacgggtcattaactgttaaaaccgtgtaatgtaggtccgacagaagtatgaca

SEQ ID NO: 34277 - DNA, 898 bp, Oryza sativa
atattttgatcactattcgtcgatcagtcagtgcgtgcaagctgctgcccagcatcgatgtgatgtacttagagcaagtttaatagcatagcccactactagcttcaattcatctataggcaatctaatagcttattcatataatagttacatatatactacactattaatatctggtcccacatggcatacacacactaagtcttggagtccatgctacagctggctacaaatctgtagcccgctgttcttctttctcctcatttatctttttaaaatatatttacagctggtttatagtatgctattggacatgctcttaatggtggcaaatggcggccaaaacgacgtttgtctgtgtgtgcaggtcgttgtcgattggtcatcgttgccaccactggaatccgggcatccagctgcgacctgcgactgcatctgcatgcaccatccagatgagaacaccttgctgggaatctgagttcacgacatcaacatggttatgaagttccaaatgtagcaaatgcagagttagatagtacagtatttgagagtattaattattttaaatttaaaatttagaataatttgatttttattcaactttcatatagaattcttttgaaagaaaaacgtactgtgtttagtagttcgggaaacgtgcacgtaaaaaacgagatattttttcatctctatcttctactctcaaaaccttacagttggtgcccagcaagtttaggagattgttggcttattagccgagccatagccatggtctatttttttagcattggttctagaaccattaatgatacaaatataaatgttttacctgtatttttttttagtttgcttgttcagttttttaggcataccaactatagctcaacaatcagagttg

SEQ ID NO: 34278 - DNA, 866 bp, Oryza sativa
aatgatatgatggaaaagttggaagtttgtgtgtataggaaagttttaatgtgatggaaaaattagaagtttgaagaaaaagttatgaactgaacctccattgcgttgtcgaactgtcagtcattgtctcatcaccatgcaatgtcttgttttgcatcacatcacgctattggtttttttgcgtgaatcagcgtaagtcggatacttcaacatgtcaatggctgtggttatatctaaagtttgatccaaacttcagtccttttttatcacatcaacctgtcacacacacaacttttcagtcacatcatctctaatttcaagcaaaatccaaactttggatccaactaaacacagccattaatatgtcattgtcctgtagcagtatacccttcaatgtttcctgattgatcattgcgtaatgcataacaacactgtcaacacatcatgtttagcccataacaacactgtcaacacatcatgtttagcccctttgaatcacaggaatgaaaaaacggagaaataggaaaaacataagattatgataggaatgtaagtgtaaaacaaaggattgcaaaacacaggaaaaacataggaatgaccgtttgattggaccactggaaaaacacaagaatttgaggagagataaagactcaaaggatttctatttgatgaggagagataaagactcaaaggatgaatttgaggagagataaagactcaaaggatttctatttgatgaggagagataaagactcaaaggatttctatttgaggagagataaagactcaaaggatttcttccatgaggttctacctcttgttaaaattcctccaaaacttgtatgggaagaggcattccataggaa

SEQ ID NO: 34279 - DNA, 716 bp, Oryza sativa
aggaggaaggattctggggcagtagttactggaagagaggccagaaatggggaggaggaggaagtgacgagtcctgtaaagaaatcggttcagatgcacaaacctgaacaggctaagaaagcattgttttccattgagaaggagatggttagtgcgggaaagaatcagccccaagggggcgaaataggaggggagatgctgaaaccagctcaacatgacagagtgcaggaaaaagcggacgcccaggggaaatacatggaaaacaacgccatgcagcccatgcacgtcgacggaggggctgctcagggagaggtgccatcgggagtaaaagggccaggaggtagcaaacagaaaactttcaaaagaatgacaagggagactagaggtaagattttgccagcaggctcggggacggtgatcccgggaaagagaagatagatggagggaggggaggaagtttcgggaaagcgaaggaaggagggagagctaaagaatagtgaggaacaaaacccaatggaagcgggacttgcgatccagtcctgcgggaagaaatgaagctagtggcttggaactgtcgggggttgggaaaccgcccggcagttcggggacttctggatcttcagaagtcggaaaagatcgatattcttttcttgtcagaaaaaaaattagacaagagaagaatgcagtgtctgaggtggatgttgggtttggttaat

SEQ ID NO: 34280 - DNA, 557 bp, Oryza sativa
ggctcattttttggcaaaattatgtggtgtgtatgtttcttcacatgttggaacacatatgaatcatttttttttttttttggaattgtaatttatcatctctttagcactctaataccttaacttcctgtagaatatcgagtttgatgacgacgatgatgactggaaccaagaggaggaagcacgtaagtttaaatttgaacttctattcatatcagatctatccttctctcttcctaaaatggactactggtggttttgttaagattactaatgaaagcattctctttttcttctgacagatgaagactactatgattagagccactgtctacaaaagttgtccaatatcaagttttgtttctgttcatttttctctatagtacttgctaggtgattagaggtaaatgttttcctgtcaatatgcggtatcagaaactaggatctgtctgaattctgaaatatggagtaggctgctgctactgttcctattgtactgaagactggcaagaattgatttatatgttctgggatgtgcttcgttcgatattattatt

SEQ ID NO: 34281 - DNA, 571 bp, Oryza sativa
accatatcaacacttttaccttatcttgagggagaacagtagaaccccttattctgcttgtataattctttatgtttgttgttctatgaataatagatgaaaggatgttgcctatcagtgcaggataatcagttaaccaaatctaggaagatatttcctatggttctatagggagcccctttacctgtttttagagatttttgctgttaaatgatgcctatggcgacaaaattcttatttttctcttatgttactagagaattttttttcatgttccgaataacaaagctgaaattgagatttcctagctacagcaattacatgtccagctacatcattctgaatataaatctgacctggaaggatgcgttaatgtgttactgtctgtcatataacttatctgtaactttttctacttcatttccatctgcagttgtgtaaagaaaactacaaatacaatctccatgttaagtagccttgtgttctctaaggagaaaatataatttttcttatgctgtactttatacactaatcttcttgtattttcagctgcttgtggaggctgaaaatt

SEQ ID NO: 34282 - DNA, 615 bp, Oryza sativa
accatgttgatatctcatccctttgcaacgcatggggcctgtgactagtagaagaaaatggataatgtgaagctaaagggcctacatgttggtaacaaatatatgcataaaatgatagtaataatgggttagcgataattttctttaattcaaatcccattgcaacgtacgggcaatatgatatttattgttgtaaactttgatgatttgatgctttatccgttatcactttgattatattaacacatgtgacaataacatatgggaccatccaagtgtgtgacagtgggccaggatatcaaataatcaaaacctcatttttttctctctctctctctctctcacttattaccacccagtgtgttgtcactactatactctcagcttgcagcttgaagttgtgagtgctattagccaatagggtcatcaacttttgaggttctgggaggtgatcatttttgctatgctggattagatcaagtggagtaatatttcatctactctcacttttttttccctgctttggttcatatctaatcttctcttctcatttccgctccgttttccgtacttacacgctgggaatgtccgattccgaacacagccttaaagttc

SEQ ID NO: 34283 - DNA, 591 bp, Oryza sativa
atatatatatatatatatatatatatatatatcatgttgcttaatttgttttctgacgttgtacctgctcaaatccacacttgtaagcttgtaaccgttattttatggcaatttaaatatagcatatgaattgatttgttcctttttaattgttttttttgtttaaaatacattcagatcgttatagatttatcgaaaacggtaaacatctttaacacaagtcgttttgtggcatggagaaccatctgccgctcaagcttatagaatggacgcaggagtaggtgggtggatggcatgattcatgtggctggctattgtattagcccaactacattgtttcagttagcttttatgaaactgataaataatattgatattactactccctccgagttgataatatttgtcgttttaaaaatatagtctaagaaacatatttgaccactattttctattataatatatatagaaatatcacaaatatataattttattgaagtacatttttaaaactaatatatacatatagttttcatatttctaagataaatattttataaattatttatagtcaaagatttgaaggtttga

SEQ ID NO: 34284 - DNA, 700 bp, Oryza sativa
attcctgcagcccttagtcgtttagtttcttttttccagatggaaatttggatatggtcttctcctatgtatccttgtgctgattttttattgggtggattagagtttgattcctttcagtttcgtgtttaactcgggaaatttagaatttggaaactacctagatacgggctacatgcgcgaggctgagatgacgcaccgtgatggatggagttgggaagcgcgttttgtgcaaccggttgcaaacccaactcatatctacaccgttcaatgttcattgagattcgtgcggagaatcttaatcttaactaattaaaagattattagtaattttaccagatagttaaatgcccgtgcttcggtacggtgtattaaaactaaaaatatttaagttcaaaaaaaaactaaaaatatttgtttttaaccaaagttatttttaaccgaagtctccaatgacagagagtaatatagtagctcataataaattattatttaatagtgcgttgcaatgggaaaaaaatactgttatgataatgattacagttattttatagttccatgggagttataagatatagttctagacataaacaataccccttctctcccaacgtaagcgacagtagctgcgccttttcccaccgcaggtcgtaaaataatatgatatggttggatttaatttttattaaattaaccatga

SEQ ID NO: 34285 - DNA, 726 bp, Oryza sativa
ttttttttaaaaatatatgatctaattcgttggctaatttgattgtttttggtttatattttaaatctacgtgtttgtgaattgtggttgaatatatatatatatatatatcatgttgcttaatttgttttctgacgttgtacctgctcaaatccacacttgtaagcttgtaaccgttattttatggcaatttaaatatagcatatgaattgatttgttcctttttaattgttttttttgtttaaaatacattcagatcgttatagatttatcgaaaacggtaaacatctttaacacaagtcgttttgtggcatggagaaccatctgccgctcaagcttatagaatggacgcaggagtaggtgggtggatggcatgattcatgtggctggctattgtattagcccaactacattgtttcagttagcttttatgaaactgataaataatattgatattactactccctccgagttgataatatttgtcgttttaaaaatatagtctaagaaacatatttgaccactattttctattataatatatatagaaatatcacaaatatataattttattgaagtacatttttaaaactaatatatacatatagttttcatatttctaagataaatattttataaattatttatagccaaagatttgaaggtttgactttactctgcttcaaaatgataagtattaccaattcgaatggagtatagtacatt

SEQ ID NO: 34286 - DNA, 529 bp, Oryza sativa
tttttcatcataacaaaacacattcagggcaagctaacaaatatccaacatgatatctattgggacacagaatgatattaaatacaactagcaactaggccaagccaactactcaaatacagtaactattggaacaccaaaactatgttatatagtgttatagaccagagctagtaaaggctttgaaaggtggttggtcccaagtaacttctattagatgaaaaaaatgcaagttacagatcccttcaacagatgaatgatgccactatattggaatgatgaatatacaaaagcaataccttcatggatcccaaaaatactgccatcccctccggaaagttatgcaagctgattcctgcaggctcataataagtatcaaatcagattgttgtagtatctcaaggaacaaggaagcaaagccacacaacatatatcaagaaacagtttgaataatggcctggtgtaagttcaataggaatgcatgtctggttgtatgcttagtgatacagaagtcttattttcttaccaa

SEQ ID NO: 34287 - DNA, 761 bp, Oryza sativa
ccaccgcggcgggggccgctctataactagtggagtcccccacacacgctctggaacatataattcccccactatacacaaaaaagtgctccctttcttttacactattgcgcttatagcgcgtcacgcggatcacactaattctctttaaaaagggtggaattaaaaaaaacttatgccttttaagccaaaaaaaacttttggtatacctaatcttttttaatttttattaatttttgccttaaaaaccagaataaattatttccactttgtatatcacaaaactatatatttaaaaatttgtatcacaaaaattatggatttaacataattttcatttacaaaataatagatttgtattagaaaatcacatagatttaacatcagttttatcacaaactaaacttctgctatggatataaactataaaatgtatagttcttaatatcctcataatctgtagatgccttaaatatgcagatatgtgataaatttgacactaaatatgtagttttggttaaaaaaaacgcatatttgttttgtgatagtttggtcaaatcatcgttttataaagtttactctaaaaacaaacattagaaattaaaagtcagaatacccgatatttttttgtaaattcgtgcctatatatcgttcacacaaatatgcatatatggattagaccggcctgctctccccgttacacgtctctatctcaataaacggctggatatatatagatgtaaaattaccagtggagtatg

SEQ ID NO: 34288 - DNA, 610 bp, Oryza sativa
tagagagagaaacacacttgttcttcatctacccttctcctctctctctctctcatctggttctagctagtactagctgctgcatcttctactgctgttcttagaagaagaagaagaagaagaagaagaagaagaagaagaagaaagaagctgctcctactaggctactagctaagctaggcttaggcatgtgcgtgcgtgcgtttgatgctactctgtggcagagcagacgatgatccgccatgtccggatgccgcccacgctgacgcccacgacatgctcggctcatcaccagctcgcgatcgaggcggcggcgacgacgccgaggcctccgagcagccgcagccgcagccgcagccgccattgtcgccgcgcgcggggggcggcgaggcgagggggctcgtgctcgcgtgcgccgacctcgtccaccggggggacctcgacggggcgcgccgcgtcgccgaggccgtgctcgccgccgccgacccacgcggcgaggctggcgaccgcctcgcccaccacttcggccgcgcgctcctcgctctccgcggaggaggcaagggtggtcatggcggcgtcgtcggtggcgtggtgccgtcgtcggcggcgt

SEQ ID NO: 34289 - DNA, 565 bp, Oryza sativa
  unsure (1)..(565): unsure at all n locations
ttcctgcagccctgactgttgtgtaattgagccactgacacatggaaagagactcacatgtcagcatatgtactttctgcttgtctttttcttaaccaacgcttgtaagatcttgtattgtactccctccgtcccataatataagtgattttgacnnttgactgctctgtaacacaatggtcacaacaatgactggtcgctcaattatggcaaagtctgtgtgcttatgagtttactgctagcatacaagtccaaccatcatacgtaattagatgcgaccaaccattcatttttgacggccaccaataacacagataaccttaaatcgaagtcaagaagtgaccccagcatacggtaccatccatagcatccaataaggatcagcagctgagatcttcctttgcactatatatctagagctgcacgactttttactgtggagcatttgtcatagctctagtggaggacatcacatatgatttgttggttgtgacagaagatgaaccggagcatcagctgctacatgagggatatatggcggagaacagccgtcttgtttatatcg

SEQ ID NO: 34290 - DNA, 653 bp, Oryza sativa
  unsure (1)..(653): unsure at all n locations
gcgcccgccgccgccgccgcngtcgtgctctctttcctcgcctactgcctgcattgatgacgaggagagagagagtgagagagagggtgtctcacgtgggagaaggcggcgcggctggtttatttgtgtttttttttaaaaatatatgatctaattcgttggctaatttgattgtttttggtttatattttaaatctacgtgtttgtgaattgtggttgatatatatatatatatatatatatatatatatatatatatatatatatatatatatatatatatatatatcatgttgcttaatttgttttctgacgttgtacctgctcaaatccacacttgtaagcttgtaaccgttattttatggcaatttaaatatagcatatgaattgatttgttcctttttaattgttttttttgtttaaaatacattcagatcgttatagatttatcgaaaacggtaaacatctttaacacaagtcgttttgtggcatggagaaccatctgccgctcaagcttatagaatggacgcaggagtaggtgggtggatggcatgattcatgtggctggctattgtattagcccaactacattgtttcagttagcttttatgaaactgataaataatattgatattactactccctccgagttg

SEQ ID NO: 34291 - DNA, 690 bp, Oryza sativa
ggatgaacctgatgtctttctatttatgcatgcatgtgttcatttcgtaacaatcagttcaagaaatgctaattcacggcaagtactaaggattcctatttactgctattatgattttaatgcaacagaaaacaagctgttgcaacaattacctgttatgctatggtacgactctcataacaataggcagttttattacctagattttaattattatgtatagaccaatgatctcaagcaactagaccagctgctagcaaatgtatgatgccaaaaacatgcagataaggctgaaacacaacagggcatcatagattcatttagttatagagtggtacatgcccatcacaagtttgtctagaagacgatcgacttagttcaaaactgcgaatacagtcaattagaagatatatattgaagaaaggacgcatgcatatgcatggaagaactcctgaagatcataaatagagcagttcaattaaatcatattgaatgctaaagagaagaaaaactgaacaggccatatacaaatactcgttgcatgtggatcagtagaagaaatttaacaaagtatatgtatggttaatagaacttcagtagaagattaattgtccatgatcactcgtatgcatacagcttaacagagtgctaagaagtttgaaaaatcatctgtgtaactagctagccata

SEQ ID NO: 34292 - DNA, 707 bp, Oryza sativa
cctttgcctatctcatctgcaaaaatacctgaatacgagttatggttaaggaattccaatgattaacgtggagtgggggaggttcccattagcgcatcgaccagcatttttgttaacttgccgagatatttgcatcaacatccaacggcaataagcacttatttggtcgcacgcccttgtgtttgctaatgagaaaaaacttggcatttgccttggtcctgaagatgtaaatactgttgatgcaaatacttctgtaaggcttatatgacatctagttattttccggacgtgaacgcatcatatccttttttttttacagaacatcaatttatatactccctccgttttttaatagatgacgccgttgactttttctcacatgtttgaccattcgtcttattcaaaaaatttatgtaattataatttattttgctatgagttattttatcactcatagtattttaagtgtgatttatatcttatacatctacataaaatttttaaataagacgaatggttaaacatgtaagaaaaggtcaacagcgtcatctatttaaaaaacggttatctaaggtagtataaatcagtgacatcagaattatgctgatgaggtgagatgcaggttgctacacacaagtagtctggtgaggtgttagtactgcatcgtcgtccgttgacaatttcttgctgctcttctttttttaaaa

SEQ ID NO: 34293 - DNA, 581 bp, Oryza sativa
cgatgatatgacttatcatcatcatgtcttccgccaaggaaatgacatggttgcaagctgcggcaatgcggcattcctttccgagctgcacggagacggcatccgactgattggctaaccatttcttctgttctaatgctaacaatgtctgagtattgtacattaactatttgagtccgctgtcagccgatgttaaacctttcatctcagaagataataatttatagatgttttgattgactagcatatcaaaggtaatagacaatattagcgccgttgattttcttcggtgctgcgttactttcgtaactgcgtagtgcttactactccaaatttccagtaagctcggggctcgtttcctaactcatcgatctcgttttgcacgcgcacgttttttaaactgctaaatatttttcaaaatgttaaatggtgctttttttttgcaaaaaatttctatatgaaagttgcttaaaaaaatcatatggatctttttttttaaaaaaaattagctaatacttaattaattacgcgctaatagactgttccgtttttcgtgcatgaaacttgctctagcgaacaca

SEQ ID NO: 34294 - DNA, 622 bp, Oryza sativa
atcagcagtactctggaataacagaaacctggtgtgagaacagcacatattgaagtatttccagaacactagcaaagttagcttggggattaaaattactaaacatatatgtcacagagaagaaacaagtaataatatgtcaggccataaatattacagtaccaaaagaatacctgggcaatcaaatgagcaaggagggaaaatcttgtgttaacgctgtttttcttgtaatcatcgattatccgtctaattgctaatttgtgcaacaagattttctcatcgtcacttaattccagatgagatggaagaactggcaaatcatgattagtagtatcctccagcgttgatgccttcaaaactggggaaaatggatcaacctccaattccacgctatccaattcattgtttgaagtagcttctggagacaatggattgaccatctctttatcaacaccagaagaatgaaatccaacatctgctaatgcctgcacttcaaatttcggctccagttccaaggcatcatccaaaatctcactattttcctttgggagtgattgattgggttgacaagatgtttgctgcacgtcttcatttttagataggtctcctgaatagtctaaag

SEQ ID NO: 34295 - DNA, 694 bp, Oryza sativa
cacaagtcttgttgggctgtgacgtggtgggcggcaccgcctattgggccacccaggaaggagctccgctcgccattgatccgtcccctcccaaaaccaaaacgaaacgcactcgtgaatgccatgccatggtggtgaagcgatcgcggcgtcgtctcctacctccgctccctctccacttcatccgcttcattctctcccatccccatcctcatcatgcgcgactgcgaatcggagggaggggacgctcggcgtccatggggaatatcactaaacttgagcgtgctcgttcccatgtcaccccgcgccgcacttctcgcaaggtcgaatctgcgtcaatgtcagacaagtgcgagatccaattccaaggcgcatcaggcggtccagaacaagtcgcccaagcctccaattttgacagagcttcttcttccccaccgccgccaccgctggatcttttaaattgccctggtaactaatgattccttatttcagcatccttttcctttgtttaactcccagcccttttgtttttttttaaaaaaaaaattccctctaccgttcatcacgttgactgttttcttttgccccttcaaatgtcgtctcgtggcttcgaaatcagatgaattcaaatcactgggaacggacagactacttccttgtgacttaaaaaactctagtccgtgtgctttgcagc

SEQ ID NO: 34296 - DNA, 4779 bp, Oryza sativa
aattacacagttatgggagaaatcgcgagacgaacttttgagcctaattaatccatgattagccataagtgctacagtaatccacatgtgttaatgacggtttaattaggctcaaaagattcatctcgcggtttcctggcgagttatgaaattagtttttttattcgtgtccaaaaacccattccgacattcggtcaaatgttcgatgtaacacttaaaaattttcattatgcgaactaaacagagcctcagtcaatagagtagttcagagatataaagtactactgccaaagatgcaccgcttcagcttgcctggtgagcatattgggttatatgcatgatgatatcagccagaatggtgttaatatctaaatttaacactagaatcaaattatagtaagtttgaactaaatttggaaaatatcgaatctttcccgcgaaggacggtttgactgttgttgtgtggacggtcagaccggataatgaactgcagttagctagcaggtgtctggcgtagtggcgtagggttgaaagtgattcgaatagtttccatccaaccagacttttttcggattcggatagtttcggtcggatatattcggaaattttcgaattcggaaatgagttcggatattattatttttcggaatgaaaacgaatatgatattggtgatatccgtcggaatcggataacggtcggacactatccggtattcttatgcaaaaacatatttttcttttctctacttaggtggaacaaaacaaaccatatgaaaaagatacaagaaatatcaaacatacaaacaaatggaaaaaatcgattctaaaaagtaaccacacaaattttcaaaaactttcaattcaattctgaaaattttaaaaacttttaattcaaaaattgaaaagttttagttcgaattcaaaacatcttattattatttgaaacgaaggcagtaactattattatcgttccccgctcgcaaaaaataattgtgagttgatcatcaaggacaggcaattagagtagagggtttagagagcattgcaatgtcaaatgttgcaaaagcagcaaacagtctgcatgtgcgctgcgctggaattactatagtatagtatagaacataatagtaaatagcgtaaattgtacccacggtacaacaacttgacgggtgggagcgatatagtacaggaacttgagaattgaacattcgagtgcaacaacttgacaagtgggtacgttctagtataagaacttaacaatttagtattttgatgcatcaacttagctaagcatatgctaggtgagtttttttttcgcgatgtcgatatgccattacatagcaatcctacggatattaccttataatattgaatttaatctttaagaattatactgcacatccaattaccttcaagaatttttgttttcttcaccttcccaaatctcaaccgaaatacaataatttccacatccagtttaattgaatttcaattattagttattaggataaaaatataaatatgcttatatacaaacccacgctagtatattatcaaaataagcacttaaaaatcaaatatgtgtaaaaatgtgctccaaataattaagttgttgaataacttcttaacttattgtatcataatcatacatatcttacaagttgttacatttatgcgatcacttatgaagttcttgtattaaattgcacttatctgccaagttattgcactagaacgctcatttctcaagttcttgcatcaaattgcacccactttccaagttgatgaactgtgggcatagtgcaaaaaaccggaccggccatcgaaccggtcaaacttctggttcaccggtctgaccgctgggtcgtccggttcgactgcagaacagaagacttcatattacatgtgtattctccttaaagcaacatctgtaggtggtcttgttggcttagtcgtcgaacctgtaacgagacaaccagggttcgagtctcatcttcccacccttttttcatttatgactccttttttttcatttatgacttgggcctagtgggcctttgtagcctggtccacgtgctcgtcagaaccgctggttcagaagcgtccggttcgccggttttcaccaaaaaccgcccggttcatccggttgtgaccggttcgattgcatatccggttcttgcagcaaaccgaaccgactgaggggctggttccggtttttcccggttcaaccgccgggccggtccggtttttttactaggactgtgggtgcaatttactctagtaaataatacggagtactgtttaggtgggccataatgggccccgcgtctccttactgggctgtggcgtggtaggcctggggccaattctcccaaaacgaaacgcagtcgcgatcggtagccatggcggtgaagcgatcgcgccgtcgtggcggtcctctccttcatccgctccctctccccctctttctctccactccatccccttcattctcttcggggatggcttgcgcgcgcgcgccgggaaaagaacctgccgagcactttatccctttagtcttaattacgtatattagttaatatacttaacactaatgatagtaattaagaaaatatttggaaatttttttgggatatctttttactaacagattgaaattttttgaagttagatttgaaaacttttgatttaagttttaaattttaaagttaaattttaaaaactttcaactaagatttgaaaactttcaactttagatttaaaaactttcaactccgatttgaaaactttcaactcgagaatcaagattcaaaaactttcaagtccagatttgaaaaaaattaaaaactttcaatttgagatttgaaaactttcaactcgagatttgaaaactttcaactcagatttgaaaaactttcaactcgagaatagagattcaaaaactttcaagtccagatttgaaaaaaattaaaaactttcaatttgagatttgaaaactttcaaatcaagatttgaaaattttaaatcgagattcgaaaactttcaaatccagatttgaaaatcttcaactcaaaatttaaaaactttcaaactcaaaacatgctaaaaaattaaaaaaaatcagaaaaaaaagtgaggaaaaaaaaaggaaaaaaacgaaaaaaaaagaaaaaaaaagcgtgcagaagggcgcgcgccggcactgggccttctgggcctaaaacgcgccccgccggcgcgcgcgccaactagcttttccgattctctttcatcctcatcatgtgcgactgcgaatcggaggaaggggacgctcggcgtccatggggaatatcactaaacttgaccgtgctcgttcattcccctgtcgcttctcgcaaggtcgcatctgcgcgcgtcaatgtcggacaagtgcgatatccgattccaaggcgcctcaggcggtccaggacaagttgcccaagccagagcttcttcttccccaccgccgccactgctagatcttttagtttaccctggtaactcccaggccttttggtttgtttaatttaattacgttaactgttttttttcccatgtggcttcctaatggtgaaatcagatgaattcaaatcactgggaacagacagactactttcttgtgacttgaaaaacactagtctatgtgccttgcagcagtacaatgcctaccttcactggttttactactttcatagaggtcccgctcctcttgcatcccttgctgatgctgcctccacggtaacccccgctctattctctgcttatctctatgaaatcactacgaagttgctgtgttgggtcacgaaactctattcggaatttgtatttcttttaataaagaaactatgctaaaaaagtaagtcattggatttgcccaatacaaattaatttagtgatgactctaatacaaaattcataccaactgtcaagtgttaacaaacatgattttaactgttgttaacgtacttttatgggcacatgatgtaaccgtgtgatccattttgtgcctcttcgtgaataaataggaaccaaataattataattagactgtcatgagaaaagccctaatctgggtacagtcaaatcttccaatacggaatactcactgtacaaaaacctccaatccaaatggggcttcactatgaaacaattctttgggtattttcacttttttaagcgtttgaacctatgcccagccctgttgcttcattcatttggctgactgctgtgacactaactgcagcctccgtgggaggcggtttttgtaattgctccgtagctccttcctttatattcacagcagaattcacttaaattacaccatttatctttgaagtatttattgggaatgacatgcataagtaatgatatggtttctttctttgaaagtgtttggagaaggagaacagcatgacgctcttatggagaactgtaaaagcctttagttatattcaaggctccatagtgggtgagtgcattgttgaatggatgcgtaccgtgattaaagaaaaaggtgaaatagaacatccatttggcatcgatgctgctaaggtacatctaaatctcctggctgtttagtttggcattgattaccatattgattctgttttaatgattgaaagagaggctcactagtttcttgtattggttatttgcaaaaaaaaaatgatggatggtttcaagtgcattgctaaggaggctgagttgatttctgaatggctgaggcatgggcgccgtatgcttaccgatgatgagtacacc

SEQ ID NO: 34297 - DNA, 6894 bp, Oryza sativa
aaaacttaggacaaatgtaaaatgacatataatacggtattatggaaagagtaagatttaatatattggttaagctatttctaccgggggggggggggtatcgataggaccaaaatttcggatatttggtccaaattatttgaaatttgaaaaaaattggtcaaatttgaataattttatctaaattcacaacaaaatggaaagaaccaaaatttttgggtgaaatagtttcctatcggggaagtctgaatgtctgatagacccaaagtttccctccggaaattttgaaccctgtgtaagaaaacatggtgagcggaccggtatacgatatgtatatcgatggatgataagacggtcggacgatggcgtgtggtgcactggtaggtaaggaaggaaggtacgtgcagttgccgcggctgagctaggcatgaaactcacatgcattgcatatttgcatggtccctcccatcccatgtatagtatgtactcgtacagcacaggtagagatcgatgatggacggaccgactggtggccagccaggcagacccagtcgctgctgcttgtccgcctgtaaattcagttattagggccatccatgcatttgctttattgcatccccacaccgtaccgccttgtgccggcccccacacccagccccggcccttatgattaattttctactattaccacatatttcttgtctgatagaaaaacaaattaagagttggatgtaacatatcctagcgtctagatttattgtatttgaatatgtcacgtctaatcgcgggtttgtttttacgggatggaggaagtattatattcctttcattccaaaataaaaataacattttatactatgtttgtagggagtattccctccgttcaaaaaaacctcaaaccctagtatcccaataaatttttaagaaattgaacaaaagaccataataccattagttagtgaaaattgtattagttgatgggtacgtgagcggtattgaagtaataagattttttttatttgcggattggtggtaggtaagaaggtaggagctggtttatcttagaacaaacttcaaactctagcagttgatttattttgaaatggatagagtaatttggtagcttcatcatgtcccatcaatcagggcactgattccatccatgcaaactaaacatgcaaattactgtaaaataaaacttactccgtgcaaaatgtaggatggaaatgattagagaaagggtgtgattggttgagaagagaaagtagatgaaagagaatggttgtgattggttgagaggaagtaggtggagaaatatttttattttgagataaggtattgtgttagaaatagctatcaaccgtattctaggattaagccaaacgtcctatttgtaaacgaaaaatattttgtgaataaaacttttatatacgtgttcttagcgatctaaaagtaaaggctaaaaaataaactacgatgaaaaaaaaaccctaaaatcaactctaaatttaaggttgaaaatttaaattttggctgataagcataagcataagcgaaaagatgagaccgtgtattttggaatggaggtagtacatgcatgtagagtgggttagggatccgaggttcaaaattgtgcatcagtagttggtactggcgtacaatactgctagaaaaaaaacagtagaagcttctggcggttacagttgtacccaaaaaaaccttctctaaatctagtttttgtccttttcatattcttagaagttaactatcaaccgctacttctcagaatcttgagctcattcatacaagtcctaagtagtcacatactatatactgtatatgtctatccgctctgaaatattatcttcttcccaaaaagtgcattactgactatgcattactctctttgttttacgagggtgctagttgtgatcttaggaaatgggcaagaaagcttacggggactaaaattatgaaagagccccatgtgtgcttatagggatttaattatattattcatttcctttttttcacacagtttaatttcctgcaaggtggaagactggaagctactgtagtgatcagcacacattcctgaaattaagttctattccccgcttaattttacagctatcccctaatctttcagtattatagtaatagatgatgaatgaataatatagtttcctttctagtttagtactctacatgcttccaattattgattggattagatagccaatgtatagctagcttaataaaaattaattcagcagtatcgcaagagacgagagataaataaaaaggttaggaagaggctgatttgtcatttggtgagtaatatataattgctcatagcctttttcagtatgtagctaggttttacttatatttctttttccacgtggtagtacgaattgtggataggatcagatgcacggtgggcagaggccattggtccaagtaggatcacatcaggtgggatttccggtgggccccagatctatagcatatactccctccgtcccaaaataagtgcagttttgcattattcacgttcaacgtttgaccgttcgtcttatttgaaatttttttatgattaatatttttattgctattagatgataaaacatgaataatactttatgtgtgactaaatatatttaaatttttcataaatttttcaaataagacggacggttaaacgttgggtacggatattcacggctgcacttattttgagacggaagtagtatgaatgaataggttgacaattgccctagatagctcctctaattcttccacgcaatgagtatactattataattagtgtgtataagcgtatcgtgtcgtaatcatgtcttgcggttgttttacgtacttacgaaaatgataatctctgtatggtattcattctcttttgcaattacccgagcaagagcagaagttgagaggcttgtcgatctagccagcgtgttgttgatttcagttccattaattcactgaaatgtatatatgtgcgatatatcctgctatataaaaattgccaggtaaacctaccttgtccaatgtaaacgtgtgtgagcttgttgtagtggtgaggttcaggtaggcatgcatgtttttgttttggatatgttttactcataaatctattacatatggatggcgggagtacagtgtggttcatgagcagtgttgtatgcttggttgtgcataaaaattgatgtacaacaacaccacaaggctgagactgactagtcggtttcaaaaaaaggtgaagctagacacttggcatccgtcgtttggattggattggaaatctacaacatgtcgtcccgcattgccaggtcacttaattacggacgtcacccaatcacaatcacaatcacaatcccaacccaaacccaacgggacgaaggattgaatccaatccatgggcccaccagacccgacacggagggcccacgccacataggcttcagttgcatcccttcatctctctctaaatttacccgagtggagtcgagacctggttggattggtacggacggatagggactggattttttacattttggtccttttaaaaaacttatttcgcaaatagatctctagaaaaacttatccccaaaatggtcctttttggggcgccagagtagctggcgccgtcgtccaacaggacggcgccagcctctctggcaccgtccccctgctgacgtggcggggcgatgcgaggtggctagggggagtgcgccagagtggctggcgccctccctccccccgaaattttttttgttttatttgtttgatatttttttcacgcttagggacacataagaaccaaccatagaaaaattgaactcaaatggacgtaatatgtgacctatagaatttttcctctcctctcctctctctccgaactagtgcaaaggagagatgtgcaaattttttatttttattttatttttttgatatttttttcacacttaggaactcataggaaccaaccatgtaaaaaataaactcaaacggacgaaatatatggcatgtggaattttccaaagctctaccgaaaaacttctctcctcgaaaacacaatcttgcaagcgaaatttggaggttttaatattgccagacccggcaaagcgggggagaatcggatgtaactttttctgtagatgtctgtgcatatattatttgcctgattccgagtccgtatgagaaagttacgcctattttaatagatgacatattttgtccgtttcggtagagttttggaaaattctacaagtcacatattttgtccgtttgagtttattttttatacggttggttcctatattcttctaagtgtgaaaaaatatcaaaaaaataaaataaaaataaaaaaattgcatctctatgtactgtttaacttatatgtcatttcatgtggttatattttgaattagattaagtaatttcatatagtggtagagtgcattatgtttaacatcctgatcaaagggttttactaatggaattatggtctaattttagtgaaggtgcaaagtatactaagtggtatgctagctattttcagacttagctaagtggtagttcgagtttaaattttttttttgtggttggttgtatcgtgatcctgagtgtgaaaaaaaatccgaaaaaataaaataaaaatgacaccgttgcaactccatacagagaaacaggaatggaggcggcggcgccagccatgctggcaccctcctccctggggcggcgccagcatggctagcgccctcctcctgccacttcggttcgcgtgcgccacggtggcaggaggacggtcccgttgatgacggcgccagccactctggtgcccctaaaaggaccatttctaggataagtttttttaggggtctatttgtgaaataagttttttaaaagaaccaaaatgtaaaaaatcccgcggatagggatgcctcacccaccctgcattgcatttgcacccggcacccctctacggttggtttccgttgtgccttcagcttgttttgttgccaacacaccttccttcaatctatcctgtgaaaaaaaattggttcaaggcacgtaaaagaacactctaagagattgaggttagccatataccaaccaaggaaaaaaaacataccctaacagactatatatatccaaatgcattggacagtttttttttttgattggccaaatttgagcatcctcccctagtcatctcttccaaagttaaaaaaaaggagagactgaatggttgatatatatgtagggctagttcactttgttagcactttcaatcttatcatattttggcacattttagtgttatcaaaacttggttgtgttggatgtttaacctactaaaatttggtagaatgtttaacttgagagtggaaactttcggaattaccaaagtttggtagagtgacaatggtaaggatatgtttggtttgttagcataccaaaaattaataaggtgtgaatatggtaagaaaatgaacaagctcgtagttcccaatgggattttattgtttcatttgaattaatgtgcaggagatatagaaatgaatctttcattggctagtctctagaagatgcacaataaaacaaaaatgagtttaggagagaacggagatgacagttatctcaaaattacaaattgagtaataaagtttttttaaaagccacatattttagagtatatatccgtagtattattgaggttatagaagttgtagtttgatgataaaacgatgttaaatgtgtaatttttatatgatatgtcgatatatagtaaaaagatatgatattaaatctgtagttttttatggtacataatatttaaatatatagttatgtgatagattgatgaaagcatatactaagtagtttagtggaatttatactgttaaaaacgaggaacaagggtagaaaaagaaggcaaccggtggtggtggccaacggtggagacagcgtattagagcccccataatactcccctaaaattataatccatatatttatagtttgtattataaatatagctaatttatatgagacatgtttcaatttttattggctattttggtttagtccccgctttaattttatcctagctccgtcacgagcggtggctcaatatggagaggcgcatgtggtgaaagtggaggaggtaggggataataaggccctgtttgattcagcttaggattattataatctagtttattaggagtaagctgaaacaaacaagtagattattataatctataagccagattattataatctgataagctgctctaaaagagcttttttcagattattgagtggctaaagacccactacccctacatacttgagaaaaattatccacctatgtcatcaaccgaatagatagctgagggcattatagactttagccattcaaacccaatgatccatgccttcaataatccagacaaacaaacaactcacagcttattttatgccagcttattataatccagtttatagtaatctggcttaataatctagattataataatcataagttaaaacaaacagggcgtatagttggattttatttttctcccacccttccgaccatcggcacagttgggcccacaaaggcaacagctgggccccaccaggagggccatagtcatagtgtgtagattgggttaggtgggcccctacagcaggcccatgtgccgtccagcccgtgtgtctggcgtggccgtgcaccggctcgatccgctcctccgtctcgtcgttgcaggtgcaggtgcagcccagccgcgtcgtctctctcgcctcctcctcctccctccctcaatcattgcattgggcattggcgtctcctcctcttct

SEQ ID NO: 34298 - DNA, 1057 bp, Oryza sativa
gcgctggcgtggacggcttggagtcgacgacggcggcgccctgagcaagcaggatgaggcagtgcgccatgtcctcctcctcggtggtggtgctctcggaggaggaggccggcgccgcgtggtggcgcggcctcttggtgcgcttgcgcttgacgaccccggcgtgcttgtcctccacggacatggcgacgaacgccagagcgcgctctgtgtcggcgtgatcggtggcttgcatggcgatcgatcgaaagcaagaaacgatggatggaatcgaagtggagaatgaatagcaagtttcgatctctttgcctccttatcaatggaggagaggaaagaggagtaggaatggcaaaaacctagcctagctaccaagctgcctttgcttcttcttcttcttcttcttcttcttcttcttctcttcttctcctgtgatgtgttggtgactttggatatatatgtgtcttctcttctctgcaaggctttgctgttgctttgcaactcttataaccttccactctagagagagagagagagaattaattagggagagagagagaatatgtgtgtgtttgtgtctgtggtttagtttaattaggtggttaattacagcagctagcacaggtgcatgctattgttagaaggtgtaaataggcagtataggagatggagcacaagaagaaaggttaactggtggccaaggaacgggcacgccgagagtgtgtgttaaaaggctccctcttaattacttgtggacgattttgatgcctggctagctccctctactagctgccttttaacttcgtgtgccaaatatgtttttacatcattattagacacccttaatttagccccttgcttgttttccaaatgcttaattacttaccctcttgaattaacccatcaaagtgtatgtgtgtgtgcgtgagtgaggatgaagctgtgcctactcaactattatactagtatctatagttagcatagctgttgttttctttttggtgatgaattcaagtaatatactccctttgtcggcttcatttctagtatttttcagata

SEQ ID NO: 34299 - DNA, 542 bp, Oryza sativa
aatccttcttcagagactgaaagtagcacagcatcttgatttactgttggatgccgcacgccgcgtggtcacttggccaaatatgcatggttaggcaagctgtccagtctcagattccttagccttagatgtgatcttttagctcagagtgtacaatctgctggctggatgcctggattgttaccagcaacatttgtagcatcaagtccttgatgtctcttgatagtatttcagaaatttgcctagcaattgtacagaactatggctactgatgatgattagtaccgaaaaataatttcacagggaggatctccggctgtgcacggaactatggctactccagtttctagtccgttcaaacttcaaaattgtattactgcatatgattggtcagcagtcaaatatattcgacttatatgactagctagttagctatttgtccactatctatcaaggtcttgattagcaacaagttaacaactcacaactgggaaagagaaaaggttgcatgctaatttccatatggaccagcgaaggaaaaa

SEQ ID NO: 34300 - DNA, 520 bp, Oryza sativa
gcaagcaaaaactgaaaatcccttatattgtgggacggagggagtagtgcccattttcttttgtattttccaagatgttagttattaaaaactgaaattgtactgtcaatactcaaccacctataatgaaaactagaggatgccaggaatccatggaattacctttaactgaaaacattctatgtgactatatcaatgaatacaggataatgatagctgaaacaactaagtagactatgcatttgccatcatggttgaagagttcttttctttaattaaggttttgcatgtttctattccctgttactgttctgacaaaattttaaaatagaataattcttgctggattttatctcttcatatttttttcctcgataatatatttattgctcctcctatcaagtgctctgtgatgtgtaacacaccttcatgtacttcaattaccactacagacccaagaataccagccagagataactcctgtgaaagctcaaggttcaaatgaggagaccaatggcgg

SEQ ID NO: 34301 - DNA, 975 bp, Oryza sativa
aatgaaggtattgtcgttgtataaaaaacatgtatgctttttatgttagatctctcttatatgagaccgaatagatgatgtcttacgaccttgattatgtgctctcgtattaagaaaacttttctgacagaagattcccactaatagtatctttcattagattaattgtgatgatcaggaacccccacattaatttggtaaccttaactaggcagacatgcagatattgttgatttccatcatacacacatttgcaattcatggtttataagtcatttaatttagcaatactttcacaacaagaactatatatttagattataaattctataagcaaaacttcaaccaaggtctctcagtatatatatcattgcaaaaatataatcacaattgaaactggatggcagttacattgtattgatcaaatacaatcaatatgagttgtgtaagaatctacaggaccattcccaagcgagactgaaattttgagacaataaataaaaccttatgtatgatgtatagatgtatacctaactgatcttgtggtccattgcatcacaacaatatatatgtgtatggctttgcaaagtacatcaaaggcacccaaataaaagatcctgtcatgctcatgcctccactccagtctaaaaaagaaagggacaaaacaaaagttaagtgcaaccaattaaagtatatgaacccctaagcttttttttaacaaagcatttgcccactaattaaactagtggcacatctcccagagatggataacctaagctttgtcaaacattgatggggtggtgtgcatgacatctctaacacaccccaaacaaagcagcagattgattaattagttgcgtactaattaaactgcacaagagtacagctgttgtacaggtaggtgtttgatcacaagaacagagccaagttccttttttttaaatctgctcatagatgaattaaaggaatctcgca

SEQ ID NO: 34302 - DNA, 697 bp, Oryza sativa
aacggatgaccattttaggctgcacaaaatttcctaaggactacaactacgaaggcttgcagagctgtaggaaccttaattctgtggaactgactattttctatttcttctgaatcaggtgtcatgttgaacaaatgtttctacacccattgctgttaacactacatgtctagccacaactctgtaaataggactgaacaagtgccttgactagttagatctaacattctagctttaaggctagctagagctatagtttggctttacaacgttctataagcaccttagcatgctacagtttggctttactgatatgtaagcatatcagtaaactggatgataaaacagacaaaaacaaaaaattaacattgatatcgttgttattatacaactttgttggctatgctcctgccacatgccatattgagaactccggagatgtaaaacactccaacaaaagaaggccaactatcaaccaaagacacataattgaatctgagtctagaattgagaaaatcttgctttgccattctcattttataagacctggataagtgataagatgatcattgatcatcttaacaaacagaagaagaaatagctggatgtatacaatcaagatacttacatattggctgatgagaacaattgcaatgtcctcccttgtagtgaattccttaaatgcatcttcgatttg

SEQ ID NO: 34303 - DNA, 1079 bp, Oryza sativa
caaatacgcaagggaattttacatgcagatgtaccctccgtcccaaaaaaaaatccaatcctagctacgaacctggacatatgcgtgtccaggttcatagccagagtttggttttttgggacagattagtaagaaggaaaacatattttgctataattaatttttgtccctcaaggtgatttccacttattttatgcatgttgcctaaaatgttcatattttttttaaaaaaatatactccctccgtttttaaatatttgacgtcgttgacttttttaaatatgtttgaccgttcgtcttatttaattattcattatttttcctatcatttgattcattgttaaatatacttatatgtatgcatatagttttacatatttcacaaaagttacttttaataagttgaacggtcaaatatgtgctaaaaagtcgacagtgtcaaatatttaaaaaggtgggagtaatatacatcaatatgtgatatatcattacacaaacataagttaaaatttgacctatacaattttaaaaaataaaaataataaatttgactatgatataattacatgttatgttcagagtcattttttagatatagaagaactgagggtccgtttcatttctagagggacgaatagacttccctattagaggtgcaacctcaacattttgtactcctacgcattaaggttttaagaaattttataccaatgagctgaaagtatgcgagttccaggcgagtttgatccaagccacgagccaagagctttttttcatctctagcttaatggggccaatcttacacccagggtttctcaaaccgccgggaccagggttaccacacctcggcggtaagcacggttgccacgtggtaaccgtggcgaaccatacgaaaccatgtaaaatttattaaaattttaaaatattttttaaatttatttgaatttaaggtggttaccgtggtttttcttttaccgtgttccgtggtaagcacagtgaccgcgcggttacccagttttgcaaacacggcttacacctactgctagctggcgtgttggagttggactcttgtttcacgg

SEQ ID NO: 34304 - DNA, 544 bp, Oryza sativa
tatgagttaattgctttgccacaccaccaattacgatgatccttttgaccttacatattgtatagatgcaatatttgaagcggctatatgtacattacatctttatatggacctatttatcgcttaagatagataatctccaataggggaactgaagcaatctgtacgttagttcagaaccctttcctggttttttttggcctctacctgtaaaatggtaccgactattccttgctccatgtcatttcatatgttctggcaaaaaatgagatgcaaatgaaatgctgactaagataattactcgatgtagtttcatgtgtttaaaagctggtcggattaactttgatattgttttaagtgatgatttttacatttccttatgttatgcacttgtacacagtgtactgaactttttatttaattatatatgcttcataattagctttaatttcaaaggtgcccccaaacagtgtatagtacttgctaacatgtaatatcatccttgcagttttttaattatgtgctattaaaatttcaagaccgg

SEQ ID NO: 34305 - DNA, 706 bp, Oryza sativa
ctgccttttacccaaccagcatgcatgaagtacagctacagaaagctttacgatccttccactcaatggttaaaggaccggctgtccaagtattctccaagaagctaaaagatgaatgccaagcaatatgggaatctggaaggcagcaatgcgatgctgtcagtcttactggcagaccatgtaagcaccagagacacggtaaatcctctccatcagatgcagcgttacagcattctagtggatatgttttcctccatgcatgtgcctgtggccggtcacgccgtcttagggatgacccttttgattttgaggcagcgaacatgacctttaactgcttctctaattgtgaagatctgttacctactcttgtgcttccaagagagaccaatgctggtgcatttccagtatcctcttggcgtttggtgcggcttggaggagcaagatattacaaaccaacaaaaggattgctccaagcaggtttttgctccaaggaaaaatatcttttaaggtggtcgatttctcttgggaaaggacaagggaaacatggcactcatgctaccaataaacctttctccacggcatctaatgcagatcctcaggctccccctattgttgctggagaagtaaaatcggccgtgacccaagtcacagcagaaattaaatctatgaaacttgaaaattctagaaaacaacctgaagtcgagtc

SEQ ID NO: 34306 - DNA, 995 bp, Oryza sativa
agggggggcagtgtgacgtgtccgtgtaaaatgtgaaacgggtggccagcctgcacgccaaatttcgccgcgtgattggttgggtcatcgaccaagcagatcaaacagcagctgctgacagtgttactactagtagacatgagtgaattaattagtgggcatgcgtccgtgcgtgcgccctgctcagttctacgtaactgcgtagagattacgtatagaatagtgatgtttcgtccagcagagtgagtggacttgtaggggttaagcgcagcagttaaccataaacatgcgagttggcaggagtttggcagggctagttaaaaactcaaaagagccattaacaaatgtactggcatgacggatctgtcaggagatctctcggcacacggtatatggggaggtggatggagtttgttcgtaccggcatgaggccagttgctgcagacagtttgattcttgtgaccccatgaacttgaataataaactgtgtgcgtatcagcgaagagctagtatatctattgaaatactatgaaatgatgtgcgtggatactctgatatccagctggtgtgtacgtctttgtcccgaccaacaacccaaatattttcgtgttgctgtcctctcgattcagttttcatgcatacatatattcagctcaacgaacgttaacacgtaacaccacagcaagaacacacgtcagatcatatccttgacaatctccctcttgacgtacaatgcatgcattccagaacttttttcaagcagatcgatggaaaaatccgtccgtacataaattagagtcttggatcgattagtcaaaccgttgagcttgaggtcacaggagagccacacgtaccgcatgccacgcacctgccgatcgatcgagccgcacgcaacgcaggcacgggggctcgcgcgatccgcaaagtcgcgatcgatcgatggtggccgcgcgcgcgcggttaggtacgccgtgagccggcgaaacggccggagc

SEQ ID NO: 34307 - DNA, 919 bp, Oryza sativa
tgatgtccagaaggtgaagcaaggtaatttctcaagtgatgctttggacataaacatgtcaagctgtcaactcttcttagttgagaggcagtacctgacatttaactcaagaagaagagaagcaatttgtattagagaactacaaaacctgctgaatttctgggctatggtacattcatgttctcgtaccaaggtttgcagtcactttacttagaacttacctctactaaaatctgcttcacttactagaagaagtcgtttcgctgactggccgaaccgtgcttgtcggggtttgagtggcactattttcttagagatagtaacagctatgcatgaactcatacaattgacgcccccatgtgccgtagtgtattgatgcctgtgcagttggccttcccgtatgtgtgtactcgaactgttaagtggatagtaaaatgcacagcttcagggtaaataggtgtaaaaaatagtgtgtgacagacttgacaatgctagtgctattgtggtacccagcatacttgctagaaaagggtgtgtttagttcacgccaaaattagaagtttggttgaaattaaaacgatgtgatggaaacgttgaaagtttatgtgtgtaggaaagttttgatgtgatggaaaagttggaagtttgaagaaaaaatttgtaactaaacaaggccttaggaaaatggataatcattcgtcatgatcatatacgtcagatttgcaatttttattgtagcttgctgacgcaggatttgccggccagagcagtgaaaggcacctccaggtccggactccagatgagagctacctcgaaagataatgcctatccagcaggcttcgcagaagggtccatgcgaaggaatttccctaatccagacactttaggtaaccggtcacatcaaactcaaaaactacat

SEQ ID NO: 34308 - DNA, 692 bp, Oryza sativa
ttcctgcagccccgccgcgtctgccagatccgccgccaacaccgccttgcccgggtcatcgccaaggcaacctgtcgtccacccccccgccacggaggatgccgaggtgctgtcggccacggccgcctcatccggcgccgcatccacagacggagccgaggccgcggacgaggaggacgagcggcgagtgcggcggagtgggaagagaagcggagctggcgccggacggggaggacaagcggcgggtacggcggtgcgatgagaggagccggaggggatggaatggataggatcgaatgggcggagtgggaggggaagggtaggtggaggaaattatttcttccactcgcccatgctaaccgcacccaggtcacgcgcactgtaggagtagttgccttgtatagcgtctccatccaattaaggccctgtttgtttcagcttttgattcttataatttagattattaagccagattactataagttggattataataagctggcatagaataagttgtgagttgtttgtttgtctggattattgaaggcatagattattgggtctgaaaggctaaagtctataatgccctcagctatctgttcagttaatgatataggtgggtaatttttctcaagtatgtagaggtagtgggtctttagccactcaataatctgaaaaaagctcctctagag

SEQ ID NO: 34309 - DNA, 764 bp, Oryza sativa
ggagactgtcgtcctcttcagagcccacactatcggcgacactcactgctcctccttccttgagctcgtagccacctccttagctctatcgttgctcatcctggatctggtgagctcgatgctggagggacgtcgtggtggtgcttgcagtagcggctagcagcacacgagcatgtgacctcaaggatgtcactggctgtaccgtttgtactcgtggcctactattgccttcttgactaccccactacctttactatccaccaccctctttcattttatggctttggtggtgccatcaacatgtcaccactctcggctctcctatagcctccatcacttggcttttctaaacccactacctccctccctagcctgatctaaatccctaaccagagtcgtcgctttgtctttactatcggagggtcacgtgagttggtcgagttgtctgagttaattaaaggagccggcctagtgtatgaatcataagttaaatcgatggttcaaaatttgtaagattttttctctaatttcctattagataccagctagaaatgcaatataaatgtcgaagaattttgagtagtatttgtatttccgtcgaaagtgatttacaaacggatacgggatacgactggcattagaccaacaaaaattgattcagaatcagatggtcacagtcgcgggctcacatggcaaattaaagggcccgtcatggtcaccatcttgatttcttgacacagaagacgggggcaagaacgaattaa

SEQ ID NO: 34310 - DNA, 596 bp, Oryza sativa
ttcctgcaccccagaaaattaatgatctaaagaattaagagtaatagcatctgaagaaagcgcaacagtttcaataaaatgatgaagggacgcatcaagtaagataattgctcgttaaactaaaagtaagaagtaagaacattaaatattccctgccaaaaaaggaagcaacattaactgacacgggaacccctaaaatttttacactaataaaggcagacccatcattttagatcaattcttatgtttgaaactaagaactatactaataagtctaacagttttgcaactaaaacttacaataaagttgatgcgatatgatactgattgcaggaaaaaaaatgattgttggtgaccatttacttgtgacagaaagaactgaaaagggggaagttctcttgtgacaagtacagaggcaaaagaaaatcatgcagcaaatgcatcaccttctcatagaaaattcggaacgaccaccatacagtagtgcacgtcctgcaaaggattacggcagcaacaaattactcacatatggaagtctttttttttctgcgaataacatgttctgtgaaaattagaggcttactttggcggcctga

SEQ ID NO: 34311 - DNA, 668 bp, Oryza sativa
gatattatttagtaccactataaatctggatatgacatattcgtattactagatatatcatggatcctgtttagatttgtagtatcacatcttgtcttaggtgactgtaatttgggacggaggaagtatcacaattttcgaatgactattattggccgtacactcgtacttatttatcacctgaaatgatcgttctacgtcctatgctcaactcggttgcttttctctacacagtttcttcgttgtgtcggtccagcatgtggtgaccacccctcccccccaccccaccccaacccacatactcgacctgtggagtttcatggtgatagatctccaaaagtacgtacctgccctgtcatgtcccgcgctattacagtgtactagtgtactactgctctgctcctacttgaccatgctcaatcgatcaaaacctgagctttctttcagtaaaaaaacgaaaacggcgttgcagactcggactagtccgcagcagtaaaacgcggcaccgaaaaaaaggatcacgaagagatccacgagaggggagtaggaacggaacggggcctcgtgacaagaaaacgggggtccaactcgaattgaacggccacccgcagcgcgacgcaactgcaggcacacagtcgtcgccagtcgccgctcgtactctctccgcg

SEQ ID NO: 34312 - DNA, 573 bp, Oryza sativa
cccaagaaatcagttgattaaatatgccatgctgactttattctcctgttcatatgaaatagtacagatttggttgcatcatttatggtgacttcctaaaggtatgactccacaggcttagttaaactgagacaattcagttgtgttcacaagggaaattgttgcctcttattattatataaatcaaccagttgcacattactagttggttctttgctcagtttaaatggactctgaataaataagtacaactgattcatgttctgtgaggattactgatcagtcttcctgatatttcagtaaaatgtactgaaagtgtacaagcaggactataccaggtattcggtagaactaattttaactcggtggagtgtacatctccaccagaccaccaccttggttcgagttgtttaatactttgatccaatttgtgtgctttttatctgttttgttaataagaaatgtagttttcctacatgttttaattttcatctttgttccaattatttacttaaaaaatcaataattcaaattattgctgatgttgcttaccaatctccccagtattaatta

SEQ ID NO: 34313 - DNA, 672 bp, Oryza sativa
ttcctgcagccctgcgcgaattgcgtatgggtttggggggcaatcggtccagcccggtctaagtttcgcccgagattgcgaaagatcaacagtccaaccggcgaccggtcgattgcttgcgcagcgcgctcggagcaactttgggttgggtccagattagagaaacactttcgatcattccatcgatcggcgacgtgcaaccaacctcgcatgcacgtcgcaggtccatctctccctaaagcgaccgcacagggaagggacatttgttcttttgctatgcggcatttaatgtccgactaagacttccaggactccaggtgataagtgtaaatcagttaattagtgtcccattggattggctatcatcgactatagattcgtttaattagagcaagtttaatataatagcccactactagctccaatttatttatagccaattaatacaatagttgcttactgtactattaatatatggtcccacctatcatacatacattacgtcttggagtccgtgctgcagctggctacagatatgtagtccgctgctcttctctctcatcttttatctcattaaaatatgtttatagctggctaatagcctgctattgtacctgctattaggtgtaatgaaacttcttgtttgatttttcaaaaggaaaatactagtaa

SEQ ID NO: 34314 - DNA, 676 bp, Oryza sativa
tttcattatgtatctagcatagttgattagatatactaactaccttttgggcatgttgaatgcgtgctctgtttccaagctaggattgggtgtattagtcctaaaaaaagttaggtgtatttgaggccggttaatgcttccaaagtaccatgtaggttcatatgtttgactaataagtagctggtagttaatcatggaatttgttgaactgggataagtgactttcaagctattctgggattttcatagttaaggcattccaaatattgttaggaataaaaaaaagtgctacttcccatttagtatagaagagtgcatttcaatttctacactacaaagtacggactgtatttttgcaaaaaaatcaaaaacagaagtatggtcagtacatcactctgtcactcctgtgatgtgagttaactttgttaagcgtttacatgctaactgatgttgcagcaagtatttttactagagtgcaagttacattttcatgtggttagagggcacatgcaaaattctccatgctcaaacttcaataattggtcatgtttcgccattctcccttcttgatcctgtcagagatggagtttgaacttattattgcataaaagaatgaattggaataaacagagactgggttcactttccctgcgtgctgtgaacatgtgttccggat

SEQ ID NO: 34315 - DNA, 521 bp, Oryza sativa
aatggtccaatggggagttcaagaatgctgttggtgagatactatttgagctgactgatgaaccaaacccgttcatttccctggaactcttgtactcaccgggtcacctgcgtcttcctgatgttggtcgacacgcaagatgcattgaccatcccaagactgtttctttcagggaccagattttggttgctctggttctgctcgttttcttctacctcttctggagataattgtacccaggtttgctcattaatcatgccctcctttgtcaaggcaacgaagccgtgaggtcaagtgtcctagaaggcttatttttacagcttttcttggacttagcttcctgtacttcttcattaatcgtgggggagagcaccgcacgggtggcggtgatgacaggtagtttgagtttttgcctctgtggtttcaaattcagattttgttgctgttaaacaatacgtgatagagtggatatccaacttgaagaaaatgatactgggtggattttgatttgttgattgagg

SEQ ID NO: 34316 - DNA, 597 bp, Oryza sativa
cgcctccggcaccgtaatctcgtcaagctcgtcggtaagctctactacttttctgaacattcaaatcttagctcgatattgtttatgtttttgttcgatgcatgatagtatctttttgtgatttagtgattaagaatagctgagtaggacattgatgccgccctgatgaactgctaatttcgtgatgaaatatttcctcaagaacatcaccttaataaatgccaacccaaatcgccagattatcttttgatttgatttgatttgaaatattttcgcttttattgaaatggatgctccgataagtttagactttgtactttgtacttgttattagaccgcgtagatgttgtctactcgtgccaatttttaactgttacattctcagcaacaatttccttcgtacggttgcgtgaaaatgaaagcttccgagttccgagccgtcggaaatttcagtagccgtctgagaatagacaaaagtaagcaatttttcatacccacaatcacatgaaaacgatacaccacgacaacgattactgcctttatctcaagaaaagtagcagataaaattctaagataattacacacaacagatgtact

SEQ ID NO: 34317 - DNA, 681 bp, Oryza sativa
attcctgcagcccgtttgactcgacgggatagatagatatcagtagatattagagcagttacaatagcagctataaaccggctataaccacatatcgagaaaaaaaagtgaagagagagaataaagcgggctacatatttatagccagttacaacacagactccgaaacgttatgtgtgtatgagaggtgggaccgggtataaatagtgtagtacattttatagtaaactattatatgaatagtctattagattagctatagatgatttggagccagtagttgactatattattaaacttgctattaggaacagtggttctaaatttccaactctccttcggtcattttcagttttgtgttcgtctgatgcaacttgtttttgtccaagtgcgtgcttgatcttcgcttcgtcgactattcgacctctctatacactatacagccacgaccttaatgccgacagcagcgaattaattagggagccaattgcctcgctgactgttcatgcacaagtcaccgagaaacagtggcatgaattggattgtctgacaagttcaaatgacgggatttgttctggaacccaagaatcatttcaattttaaatcggctgacttccttcattgccagggaagcaatttggtttcgactggaagaccagatcaccagatgcaatgcacgcg

SEQ ID NO: 34318 - DNA, 646 bp, Oryza sativa
taagagctttttcctcagagcaggttagtactttttagttattctgcttgtgagttgtgaatgctagtagtactagcagcttgttgcaccttgcgaattgcgatcttcttgagctcgcagcttgtgggtagtgcagctagatagagaggacagaagtagcaacagttgcagacaaaaaacctagcaattgaatcactgcaatcctactgctcctattgtttctactcatctcatcatatacaagagtggctgtagtatatacgtagtaggagtagtagtctgtagattccattcctcatcaatgaggagcctgtgtctgcagagcttgaggaaagaattcatccaacttctgtaaagtatcagtgctacatactctgaagtctgaacttgctagtagtatgttctttctccaaaacatgatgctttccacagtaggagtagaaggcaaatgtctttgttgtgttaaaaatagtagtattagcatacgaacaattcgatgaaatcatgacatatggatcgtacctactcgacaataccaaggcaacaatgacagtcttactaaaatgattgctcatcttgagtcttctggtcaagaagtcgcaatagtgggctgcattatatagtggaccacatgaacaaaaccgtc

SEQ ID NO: 34319 - DNA, 626 bp, Oryza sativa
ttcctgcagcccgtggccatggggagagaaaggccatcaaggcatcaacctcttctagatagtaaatgggctgaaaatgcaaggacatcagatccgtgtatcgcacgcgataggatttagcccatcaaagtaatccttatccgcaggaataagttcaacagccgtccctcaacttcgcgtcgggttatctatagccctcaactatcacaaaccgtgcaaaaaaaaaaaagtcccgagcagtatcgatccaattcttcttcggtttcgctaacgtggaatatatgggccccatatgtaagtgagaaggaaatatgtggggtccgcatctcttttctcttcttttgtctttcttctcctttcttctcttcttgggcgaggctggagactggtgcatagcggtcaggggcggcgagcgagctgccaccgtgggatggcgtcgggggagctatcgctgccaccgccatcctctgtgacaacagctctaccgaccttcgcgagctctctcacaaagatgtcgaggtctacgttgacatcgtccgcagccacagcagcgccgcctcggcttgcgttgggatgggacggaggaggtcgaccaagaacccgccgccgaggccgagggcgtgccg

SEQ ID NO: 34320 - DNA, 682 bp, Oryza sativa
attcctgcagccctttcctgccacataaacttccaaactttccgtcacatcgttccaatttcaactaaacttccaattttggcgtgaactaaacacaaaagctaactagaaatttatgtaaaggagagaatttaaaaaatgaagagggttagctttcatataaaagctactccctccgtcacataatataaaggattttggtggaatatgacacatcctagtactatgaatatcacatcccactaaaatctcttatattttgggacggagggagtagtacatagaaaaataaatacattaaatacataggtgagaccgtgagagataaagaaaggagaagaaaaatagagcttttttttattaaaagggtatgacctctccatttctattagaagaaaaatagagataaccttacgatatattaactctaatatgagttatatgttcatagttggctctagctgacacatttccctaagctacatcaataacaaataaaattatcacataactaccccattattagcaccctaaacgtttataactagatacgcccacttctaacagtgagactgtgagagggctcggaggcagccaaatggttggacacgtcaatagtccatgtcaacacaggcaccgtagcggagtccggttacactgctaaggcctggtttagggcatg

SEQ ID NO: 34321 - DNA, 676 bp, Oryza sativa
tttagatgtgagtgtgccagaacgatcgtcttgctctctccggtcgccgacggccgctactcgccgccgctagtccgccaccttccctccttccctctctaagctaaatcggggcctttgtacctggtcgccgaccacctctccaagctaaatcaggccatctgtccctctacctctgctagtaccgagtaacagtctccaacccaaatttcgacattatcgatttgattcagttgaatcgaggcaaggtagaatcgtttaagatcaatccaacgtatccggcgcctgtttttttaattttcactctctcttctacctaattgctgcctctcgtcggcggtaagtatctctctgtttttttttctgtatgctgaattgctgattgaggtctcctgagcgatctatttggaatcacatacctccggttttcccacctaaattgacaaagtatagtatttacttaatttcgttttgaatacggaaagacacaatccaatttcaatcaatgaaacgtgtcgtttttcaggtccggtgacctgttttttcggtttatcatcaatctgcaatggctaacaagggagggtatctaagcgtgttagcgcccattgaaactacaccaaccatcaagcaagaccacattacttccgtaagcgttttattttgtaaatctacgtca

SEQ ID NO: 34322 - DNA, 557 bp, Oryza sativa
ccagcgatgacgcctcatttagcgcgcacggagcgcataatataggtacttaagccgcacggttcgtcgtcgccgtggccccgcgcgcgcgcttaattttttcgcggcctgtcgggcgttgcgcccgccgggcgagcggcatcgccgactccgtctccacctactcggctacacgtccttcccgatcgatttgttaaccgcgcggaaacaaaagcgcgccagcatcttggttcccctgggccatgcgtggtgacactatttgcttgccttcttttccgggctcctagttacctaaactgcttattatcaaatgttaagagtgtctctctcactagccatgcaggcaaatggagtgcgtatcagctggctggcttcctttgacttggaggcatttccgtgctagttgcagttagccaacaatggatgggctcagctcaaagaaaaaaaaaactacgaaagggctaacccttcacaagttgtgtctgtatcgtggatggaatgatgatacgttgatcttgtttgaaactgaagcagataaagattttttagagaaaagg

SEQ ID NO: 34323 - DNA, 838 bp, Oryza sativa
agtgttataagactttgcgcgacaataggcaggcacagtgttaattaatgggggaaaaatgtgatctttcagtgtatcttaaggttgtcgtcttatgtttgagtaatggactgatgttgatagctagcactgaatggtattttaagaccaggtgatttcccacaacggaaagcccttctatcatgtgattgctgacagggtagagcccacagtgtgtaagctagcacatgcactggaggtactggacaatgcattatcaatactatgtttacttgttctaagagctaccagctaaatgcagataatgccagctcatagataatacctttctgaagtgttcaccttgaattgcctttttatgttcgcttaaataataccgaatgtgaatgaatcattggtttgtgctctccaaacttgagaatatgtggatttaagatctcaacctctagtgtgtatctttgcaccttcagatgttcagggactcagggtacacacatctactgacagtttacggtgttagaattttcagattaatgtcatttgtcttttggagtttttctgtgttactgactagtaactgtcgctctgtagtcagtatccttagaggatctattgtctctctctttttttttaaatgtacgatatgttgttttgttttattttgttgtctggaacctttacgtaattgtaggctcatgttcaaaagctttggttactgtcattaagtacactttagataacagtaggcttggttccaataagttattgttggttttcatgtttctaattaatgtatcttttcttacattgttttctgtcatttgagagtactgcgaaa

SEQ ID NO: 34324 - DNA, 1222 bp, Oryza sativa
aattgtacagtgctaatggagacttaactaacggcgatggtaaatcatagaagttaaacaaaaagtgatgatatattatggaattaaacaaagtcagtggcagattgttgaactagactaaagtcagtggtgtatagtagattctctctacaatcccgttgaatttctgagaaaaaaaatgtttcgctccaaataaagccgggctccttatggtttgtggagatgatccgctctctgtttaagcatcttcgtacaatgaagagggattagaacccaattgaaaacatgatcaaacatcaattgacgggtgattgatcaattcaattccaagagtccaaacagataattcgagtgctgagctataattgcaaacatacttttccgatgtgcagacgataattaagtcacactgtgcactcaaactgtactccctccatttaaaaaaacgaatctattattatatgacaccacataatacaacagatttaaacaaatatatattacatatattattaggttgattttttttagagttaattgtatattggaccactaatatttaccttggttgcacattggactagaggtaaatctatcttttcacattgggcctgctaaatctacaatagttatatattgaaccggtattcttctccaactctcttctccgttgagttgaattgtacccaatttgtaaagtctccatacctgtcatctagctcaaggtcgctaccacaaatgagcaaggctctgggagaccaggaccttgagtgagctgctgccggctggcgatcaagcccctgccctacgctgcatcaagctcgaccttgcactggagctacattgagcgttgcctcgtactcgagctcactattggcggtgagcagaccatccagatcgcgccaccaatctagcttgacctcctccgatccctgcctgcgcactggagctcaagtttgagctcgaccttcgtcagctctggccactcggtcgatctcgctcgcacccatccctgcatcaagctcaaccctcctggtcctgcaatctctcaagctaaacctccatccacaagctgttgcaagggagaagttgatggtgagtagctacgattaggttgagtaagcgttgcctgagctccttcgtagatatccgtcccaaaaagactcaattcttgggtttccgtgttcaatgtttgaccgtccgtcttatgggctgcaggaat

SEQ ID NO: 34325 - DNA, 516 bp, Oryza sativa
ttaaatttagagcctctggcgtggtttaattctcaacttttttttcaaacttttagacttttttatcaaataaaattttttttacacacataaacttttaactttttcatcacatcgttctaatttcaatcaaaattctaattttttgtgtgaactaaacacaccctctcggagtctcggagtttttgttgtgaacgcaagcggcgaaggcaaatctcgcagactgaccgctcaagctccgagccagcgaccaccaccagtagtagtactgttgcttgtctcgcccaggggtgatggaaataaaaggattaaacaagaggtcccggacaaggatgcttttcgacgcgtaattaaaggcctgatgagatgagaaagaaagaaaagaattgaaggcagccaggcaaaggacgtaaccacaatccacaagcgagcgaagcgaaatttcttcagatttcatatcatatcctgtctactgtagtagtatatcctacgtgcagtgcagcgtaggcccattct

SEQ ID NO: 34326 - DNA, 547 bp, Oryza sativa
taaatatttgaattcaaattcaaatttgaaacgggtatgtaaactttttgcttataaactttgggtctataaactaatatttgaattcaaattcaaatttgaaacgggtatgtaaacttttgacctataaactttgggtctataaactaatatttgaatttaaattcaaatttgaaacaggtatgtaaactttttacttataaactttgggtctataaattaatatttgaattcaaattcaaatttgaaacgggtatataaacttttgacttataaactttgggtctataaactttaggtgtataaactttagatgtatagaaatactatatacagaaaatatttgaattcaaattccaatttgaatcagatataattcaaattcaaatttgaaacgggtatataaacttttgacttataaactttatgtctataaactttaggtgtatataaatactatatgtaaaaaaatatttgaattcaaattcaaatttgaatcggatatataaacttttgacttaggtctctaaactttagatgtgtaaac

SEQ ID NO: 34327 - DNA, 1016 bp, Oryza sativa
attcctgcagcccccatcttcttttgatagtcatatttctaaatctaaaaaaattatttttgataggcatatttcaatccaacaacctatcctcttaatgactttctcggatttaatgcgtgactctacattcttccacacaagattggctacatgggcatcgagaaatgtaaatattaatgaatcgcttgtttacaaggaataactggtagcatatttaaatggatgataagtagaattactttggtctgtgtgccaagatgaaatatgactatagtttaagtatgcaatgcggtagtacgtacattgcatcggtaccacactaagcgcgcattcaataagcatcaatcaaactgtcaaaaaaaaagcatcaatcaaagactccaaattaggtgcttgtcaaattacggtttgattaatgattaatccatgcaccacaatgtctcggatgctcaactaacttgacacgtcgtcatatacttgtactgaagtcttcaactctacatcacgtacaacagtagtggtgtagtaccattggacactactacatcctacagataagaggcagagccaatagcgaagaaatactactgtttgactccattagatttgtcattaatattatcatttatcaacaccactatttagtctttaccatagttgatttctacagtactagtagtaccctgttttgcctggattagcctctcacatttcatactagctactgtagtatagtaccataaatgtaaagagacagaagaacagcatagtatcccaggtctggataacactatttatcatacccaattttaggatcattaacaggctagagcaaaccaagattctcaagacgacagctcttggcacgatgggactcattggattcaccatgcaagacaagagttgcattgcattgcactagcacgagtgagcttgagactgagctcttccgctacatcttgatgtccgcgaggttggcccagatatgctcgaacacgtcgacgatgaggtcg

SEQ ID NO: 34328 - DNA, 765 bp, Oryza sativa
tttctttccagatctgtgatgctatgatttgtggatgatttggggatatatagggagcagatcaatttgagcaaagaaacaaaaaaaaaaagaaaaaaactagggatcaaccggactgcttccaccattaccaactgggattaaagatacccggatttatagttccggttgtatagggggttcccaactaggattaaagcccctttttccactagggtgaggtacgtttcgtagggtctaaaatttcagcaacgctatatcaacgcacgtacgtacaggtagcctagctacccggccattacccagtgagcacacaaaatttatcatgcccagatgatcaggcgtacgatgggaagaagaggaagactggaagaggaaagtaggaacttaccgcgtgtactgctgcccgcccagatgatcaggcgtacgctgcgggcgcaggtacggaaactccctcccccagaacgtacgccgggccttccgccgtgcagcttgccgctaccgcgacgagatgcgtcgcacactcgcacgcgcccgccgcgccgggatgcctggtatagttgtacggtgggcggccgccggccggcgctgcgcaatcacgcagaaatccggtcggttagattttgtagggggcaccggccggtgtccggtggccaagggctaaagccagtagaggccgcgatatgatctgggctgagcgtacccagcctgcgagccctgtaacataggctggctgggccgcacaggtagttgggccgtgaaggt

SEQ ID NO: 34329 - DNA, 673 bp, Oryza sativa
ttcctgcagcccttttacggacaatggaagtaaattgaatcgaactttcttttttctgttttaatgtttttttcgcccgtctttcgttattacggacaacggaaacgtttttaatttttttaagtagtagagatagagaaaatagagatatagtaccatgtcaaatataataggattcgatttttttactgcaccacatataattctttttttttagatttgttttttttttctcttttttttaccgcatccacgcggattcgttttttttggccggtctttttttcacctggttttttttgcgccccttttttaaggaatcggacagattccttttttatttcttttctcccttttttttaccacggaatcggattcgtttttcctttcttttttttgcccttttttgatgggacagatttggtttttcttttcttttttgcccgttttttgtccggtttttttagcccgttttgttttggatcggatggattttttcgtctggtttttttttacggacgatggaagcacatcttattttttaagtagtagagatagagatagagattttgttgaaatatttaaaaaataaatttttgttttgaaaatttacaaatttagaggtctcacgtcctttaaaaaaaaagcccttccagagagatctaaatgtaat

SEQ ID NO: 34330 - DNA, 896 bp, Oryza sativa
aatggaaattgtacctcacaacatactgattagcaatatccattgttataggaaatctagtctctaaattgtccgtagcctaggcattccttactggagcaacaagaatggaacttaaaagagaggtcaaggtaattacccgcaacggctgtcctaattcgacttccccgctcatgttgcaaatatagatcgaatcagttcttctgcgcccgtcgatgccagcaaggagagagtgggtctatgggtgcactaaaatgatcttgtgtaatggcttaccggagcttttctaagagttgggatccccgttgactacaatgctagtctgttgtggggagacttgagcagggtcttctccgaaagctcacaggaaacctgaaaggtttcatcatcaaccaatggaccaaccaatggtcattgtgattccccgttgaggcgttgacctgcttcacatagatgatggaaatctagatgctaaatagaaaatgtatttgaaattctgaccattgtagagatttcttcatgaggtaataaaggtttctgctacataaaaaaactgcgaatgtatgatgttcagaacctcttaaaaaaccacatgagattttctcaaacaatcaaaaagcatggatattttcagtaaaacctactagtatgttttcttcctcggatttataatcacttctacgtatagaaataatataatgtcgattctcctttgcaaagaacagccacctagaataagaaagaaagctagttatgtggattcacttgcaaaaatgttgaattgatttcttattgaaaacagtccatgacagacataagcgagtagacggctatccaaggaagaaataaagggaccagtcaacaaaattttcacaaacctaaaatacgctcattaa

SEQ ID NO: 34331 - DNA, 662 bp, Oryza sativa
ccaagctagttcttagaagataagtcccccctatagtcttattctggatctgcccttgctactaagttcctttagtttctttcaaatttaatgtaccataatatagagaacaacatgtatatataggaccaaattaggaaaacttggcaatctgatgcttgactccaatgtgatttgacaaaggccttcttgacgaaagaagtcataagaggtgcatcatcaggtagaaaatcgagcaagatcttagtcttacattattgtcaatgtaccgggaacaaataacatagaaatgttaacaaaactctatataaattaacgggatcaaatcaggtgaaacagtacattatttagtatgatcatctctttaaaacataagctgattaaagccatgaaaattaaaaattaatccacatgattatcactaccacccattaccaagcaaataaacggccggcattatggtgaacaaacaataatatatagtggttttttaaccaccaagttaagtatttcattcatcacaaaaatattctgtttaaggcaaagttgcaaggtacagttatcattcataagatgaatgtaggttgaactattgccgactgcatattttaatcctgtttttgcatgttctgcatcgatattttatgtttaatctgaatact

SEQ ID NO: 34332 - DNA, 679 bp, Oryza sativa
attcctgcagccctaatcaacaagaaatataagcaaaggaaccgtggttaaatctataaatgatagccgatcggctagatgccgatgacatatcatttatctttaagccgatgtcatctgtgcatcgatcgacagtcatgaataagtaaagaagaactaaatctactcgatcggctgtagatattcacgatatatactccttatatcgatgtatacttaaatcaagtgattgggatagatcggtcatcatgccgagacagtataaatcacttagatcgaaatatatatcaataacaggactatatatgtttatagcatagccgatcagatagatctagcatgtatcggctaatactccgatactactctatatcaggatattaaagtaagaataatatactgaacaagagcctaatatacttagacacaacaatatcttgatatagagggcagatttaacatgtcaatgaagcatatagaacaaatataagtaaatcagataagatcggctgaaactctgacgctattctaatcggcaactagaaggcaggctatagatcggtattctaagcacgactcaataggtcaaactcaactgatacaacattaagtatgaaaagaataacgatatctagacaatcaagccgctagaagtttcatagaatggtagatatctctt

SEQ ID NO: 34333 - DNA, 1156 bp, Oryza sativa
cggtagtctggtataacatggttcagacttccgatggacgaggaagctaccagtccatacacattacttcatgcacatactttcgagaccatttaatatcgttaatttgcctacatatattgtcctggtacgtagaaagcaatgtgggtgtgtgcaggcatatgctgaagtgatgtgagtcggctgttctatgcatagctatgccagcttctactagctaattgcattatattactaaaacccctgtaggactaggggcctttccttgacgtgcagtgtttgcagctagctcagctcgatcgtacttggttgagttccaagcaggcaaagtagacacacacccggcctcgtattaaaaactggagcaaccagcacggcctctccttccagcgtccatgtgtgcgagcgagagagagagagagacagagagagagagtcgttaatttgtttatttccaagctaaaatgggttgggttgggggagcttggcgtgtgggatgtgattgtgatggggatttggtccagcgtcgtgcttgcttgaggtggcgggcatccttgcttgcttgcttgtccgcactcaacaccaacgccgatgcttaaaagtcttcgctaacctcgaaaacccagcacgggatgcctactactcatgcatctccactgttcctgctcgtactactaccacatttgttgcactacatgttttttcatgtatacagtagagtatatggcctgttgcaacccaacacagtagttaggttgatcagtgttcaggctttcagattctggacctggaatttcagctgtgagctgaaaccggacagattacgcactgcgtgttaggtttaggtgtatgttcgcggctcactgcacatgcttcgacgactggcggtcggtcggcgccgcgacggtgcgtacaccgcaccgtttttttgtttgtataagagtgacgacggaataatgtaggagtactagcatagccgctccattgactagaggagttttgcatgccgactgcacaaatcttgaggtttagcacgtggtggtggcagcaatacgcgaccttgtcgatcgtaccactgtctggtgactgtgccggtgggagaaaaatgaccgagattgaaaaaccggactgctttttccagaccgatacataagtg

SEQ ID NO: 34334 - DNA, 688 bp, Oryza sativa
agatagtagccaggacgacgataggttgatgcttattttgcctctcaaattaatagagcagtgtctttttactgcagtaggttgattatgtcaattgcattcataggcaatcttcaatggacttgcatctcactccaaaatgtaaaatttgaagaggcaaagccacataactatctctaatgcaactggtatccagctcctcgtcattgtagcacttgtgtctcgcccaaccacgctggccatatataggtatcgggccaaaagtcgcttgctacttcatccttcttgccaaccaacgcggttcggaagaagccaccatacaatcacgtattcatcctctagaagaagagcaccatgggttgccaacttcttgttgggtctccccatgtcgaacttgaaccccaatgcaactccgtcgtctctcatttcctccccaaaggctgcacctggtagcccttgtctcctgccaagtcatgagcgccaacactgcactagatttggtgccgctgcctcctctcctctcttctctagcgccaactctgccgtcgctgccacatcagctgagctcgggagggagcgatgaggaggaaagaggagatgatttatacatttttttatgactagctatagcatcatgatgtaggccaacagatgaatcgatggttaaaaagcacacctagttaaactt

SEQ ID NO: 34335 - DNA, 795 bp, Oryza sativa
tactgttgttggaagcttcggccaggatcgggtctgagaaatgacaggattggaagccaatcggttgtggtgggcatgcacacggcaatctgtgtcccggtttgcagcttcgactcattcagagagaaattcatggatgtatgagtactgcgtatgcgtggtttgtttaccgttctcgcaaagatcgtttatgaacgactgccaagaagcagaagaaccagtttcactgcatccagtgtcaaatactggagtacacggagtattactcctactgcaccccacaagctgcagatcagaacctccttcctctactacagtaggagtatgctgtacacaattactcctactctacacacacatcatatactactgtacatgtaagcctgacaaaaggcgctgcagctgcaagccgcagccacacacatcgggcattcactacgttctctctcggaggcctcagtgattagtcagtgaagggctttaacattgagacatcacatccgactatcgagagcagggagaatgcagtagtaacaatggaaatggggagcttaattaactccagcaaacaagtgactgtgacacccctgcagcagagaaagagactgaagaagagacggctgatggccagtgctcgtccagtgcagagtgaatggttcatgtctctcaacctccagtgcagtgtaactacggccctttgcagatccaattcaatggtgtaacttttggcacagcctcgaaatgttactactactaccagcagccttcatgagtgaccgccacacatcagaattg

SEQ ID NO: 34336 - DNA, 1235 bp, Oryza sativa
gtaaacaagtgcgcagaaggatgccagctcgctgaatttcattacctaacggagcagcacagcgcgccgcttgaatccaccacagccactgccaccgcaacccgagctgaggcagacgcaacacagggagatggccacagcgaagaagcacaaggccaccaccagctttagcatggaactgccgctccgcctccacctcccccccgagctcgccattggcgcctcccccaaaaaccagctccttttcaagccgcacgccgcggcagcagctgtagagcggaggctgatcagccggccagatttaggaagctggaaggcagggtcagtcgaagccggccggtgccgcgacgcgaagggacggttcggcttcacagctgtcttgtagccctcccactggccactgtagcggcgtcagatctctctccgaatccaggcaaaggccaccactgcatgcatcgatcgatcgggtttaatacatcagcgagaaagaacagtggcactagcaacgtactccctctatttaccatatctttgcatcctcgcctgagtcctcccttcgtcacttcacttcactcgtgtgtgaattgtgattgctcagtgggaagcggggaactactacgtgactagtactagtacgtcagttggtccagcgccaaaacctcctgagggcctcttcggatggaaggattttttaaggattttcaagggaatactatatataggaaatatttcctttcctgacattcagtccataggaatcaacccaaaggaaaataagaggaaaaattcctttcatgtggaatcaatagagaaacaaaggaaaatttccatccactcgtatcttattttttccatttcctatgtttttcctctgcctatccgaacacatatttaccaatcctatctacagaatttttgtgtttttcaatcctctgttttacacatatatttctatcatattcttacgatttttctactcctacgtttttgcagtaccgtgatcctaataagccctaaagttattcctgcccatggagaagtagggatagtcgtaaaggctcgcatgtgcaaccccgaaaaggctgtgatacttgccagaagttactccctccgtcctaaaaaaagacaaaccgtgggttttcgtgccaatgtttgattgtccgtcttatatgaaaattttttataattagtatttttattgttgttatatgataaaacatgattaggggtgcagg

SEQ ID NO: 34337 - DNA, 697 bp, Oryza sativa
ttcctgcagccccgaaaggccaaaaaggaaatttctagagtccctgatcgctgataaccgatagtattgggtctgttcggcagccctatacagcggctgtgcagctgctaccattgatcttctataaatttcactgtagcagctggctgccaattgagctaccgaacaggccaattcttttttgttggagaaacgttattttctttcccgatggcgaatccctactgttctcgagatacgttggcaaatgaccatttgataatccttggaatggtaaaacatagagcaggttaaaaatgcaaatattaaaaaattacctaatatcattttttcctatcaaataaataaaatgagtaagtcctcaaacccacgctggttagcccatcaaattgttgagggaaaggagaggacctgtcactcagttttgaacctttgaaccgaattaacgaaatattaatttttgttccaagatgaggttcttgttggtaaagctgcgccgttttggtttgatatcaaaatattgccataccaatgttttggtagtttaaatagtaaatgtgatgatttggtttaaagccaaatatttggtaatgcctatactcaatttagcacaattctagaatgttcttcaccacaatttaaaatttggctctcaattggcatcaatccaaagacactcatttaacttgcctagagt

SEQ ID NO: 34338 - DNA, 620 bp, Oryza sativa
ttattcttaccgggcttcaacagcatacatgagtacatgacatgtgttggtttcttctagcagcatggaacagttggaagtgtttgtttagggtatgattgtgaagtgctcgacgttcaatcatgttagtgttttacgtttggagaacgaagaaatgagtgttgctgtttggtgtgtacttgtacgagaccctcacatttgaaggcccatcaatgttgctggtaccacccagcccaactattgatgataggaataagttcactggaaatcactacatctaaactatcacaaaccgtgccaaaaaaataaaaaaggtcccgagcagtattgacctaatttttctcctgttttgctgacgtggtatacatggaccccacatgtaagtgagaaggaaaaaatatggggtccgcatatccttttttctcttctctttctcttctctttctcagcgagctggaaggctgggaggccgccgctggctgagggcagagcggcggcgggtggcactttgttgcgattcgcatcattccatgcaacggcacggccttagcctccatcatcccaacaccatgcatcagcgtagccttggccttggcggtagcgggagccgcgctggtcat

SEQ ID NO: 34339 - DNA, 522 bp, Oryza sativa
catatggtactatattttcgatgaaagctcatctcttgagttgagtgtttgacaaatttgatagagtcataagttctgttttgagatataagctgacatcacaaggtttattttttaaatagttgaatttaacctaaaatttgtactgcaaccctttcccacactccagggaggacccatcatctgaaaaacaagggattagatttccccatcctatactgtagtctgacaatgcccatccgttttctgaagaagaaataaaacaagttctcgatagctgctactagctgttttctcatttcttaaaaattaaaacaatagaagttcgaaattaccactaaataagtaattaaccgatttgtaactgccgaattggattttttttccatcaaaagtgaaagcttcctatctcgactataacgctttggatttgttaaaaaaaacttgaatcgtgggatacgctatttttaaatgagaactggaacatctgagttgaatgcttgacaaattgagttgtaagtt

SEQ ID NO: 34340 - DNA, 598 bp, Oryza sativa
actgacaaatgagaaatatgataattcaataccgaaaccagctagaacaaatagaaagttatttcttaaccaatccagggaagataacctcaggcagaaactggtaaaatcaattttctcgatggggtatgagaaacatatgaatcaacaatttcagtttcaggagtcagtactttaaaatatgaagtcaaattcaacaggatcatttaaaagttttccggttctttggatttctcagtgaggaaaagacatctctttttgacatatcaggaagttgtgagcatcatgtttgtacattatttccataccaagattagcacggttgatgatatccgccgagtattaataatacacccttggctatcaactacggaatgattgaaattgttgaatgaaattacacattcttataaataagggttggcacataaatatagcatggtgaacccccagttcactacacttttaggatattttttaaatttatgttctatagcaaagctatgctttgcatgaaaaactctagttttatcagctattatcttggctgcagtggtcactagtttagttcttcaaccattataacaatgtacgacac

SEQ ID NO: 34341 - DNA, 690 bp, Oryza sativa
attcctgcagcccgctccctgtctctcccccttcctccttccctttttcttttcctactacatcataaatatttaaatttaaatttagaattgaaacggttatgtaaatttttgacttataaactttgggtctataaactaatatttgaattcaaattcaaatttgaattggatataattcaaattcaaatttgaattgggtatgtaaacttttgacttataaactttgggtgtataaactttagatgtatagaaatactatatataaaaatatttgaattcaaattcaaatttgaattggatataattcaaattcaaatttgaattgggtatgtaaacttttgacttataaactttgggtctataaactttaggtgtataaactttagatgtatctaaatactatatataaaaaatatttgaattcaaattcaaatttgaatcgggtatataaacttttgatttataaactttgggtctataaactttaggtgtataaactttagatgtatagaaatactatatataaaaaatatttgaattcaaatttaaatttgaatcggatatataaacttttaatttataaactttgggtctataaactttaggtgtataaactttatgtgcataaatttactaaaataaaaaattaatgcggtgaaaaaaaaaaggaaacgtgtacggatggag

SEQ ID NO: 34342 - DNA, 502 bp, Oryza sativa
ccgctattggaacttagcgcctagaaggctacaatagcaccctttatcagcaaccatctactcatacattaatccgtgaccatttgctattctatatttattaccttaggtgtaagcatatttatatttgtgtatattagtttatgcatcttctatttaaataaaatatcctatgctagctttttttttcctttggaaacttattccgatactagtattttgttgaatccaagctaggtagaattattgagatgcacaaccaacaagccaaaacagaggacattcggagtatcagcccaataattatcatctcaccgtcaccttttagcaggtttagtgtcacatctcctcccagataaaaccaaactaaccctaaattattgatcctaacaaagctcacttttttttaggctttattgctactagtatattcgcaaatcgcttgctcgatccagttcatcacgagtccttaattcggtgggccccactcgtcattgaccat

SEQ ID NO: 34343 - DNA, 894 bp, Oryza sativa
  unsure (1)..(894): unsure at all n locations
gggcttattttcactccagacaatagtacaacaaagactcttttatggcaacttctactgctaactgcggcaggattgtactctatccgtcccgtaataaaaggattttgaaagaatgtgacacattatagtcttacaattttggacatactctttgtccagtttcgtagtattagaatgtctcatgtccatttanaatcccttatattatgtaatggagggagtataatctaagtgcgtgattggtttgagaatgaggtgagataatctatattttttatgaatggaatggtttagtcatatgtttgtcatgacagatagaatcgttatattttctttacggagggtgtggctcatttgtcaataagagagaggaggtgggtaggattgattagtccgttagtttctgaggtgtaaaactgacccaaatcttatgggattacgaaccatcccatgatccgatgtcacttattcttaaatcaaacaacttgaaaaatggattcgcctcatctcaatctattccgttctttcaaccaaacacatactaaatctaattacagttgatcataagcatttcatacaatatgcgaatttaccttggttgtgtggtttttggtagaggcggattatgtgaaccacttccatcataaataagttaaaaataccatataatataaattttaaatccaatttttgctcgtcaaaatttttaccaccgacattagcatgtacagtactcccttcgtctataaatgatggtattaacatgcgaagtgtttcttttgtccgtaaatattaggggttctaggttatttaacagtagtatagtattgagctggggtgaaattgtcctataggtttaccagattagtaaagataacgccaactatgcaa

SEQ ID NO: 34344 - DNA, 1265 bp, Oryza sativa
ttgatcatatagaaaactttatatgatcttcatatttaatttgatgcataataccttactcttttaacatctcatgggtagatgttaaatgcttttaagcatgattgcatgagaacatagaaagaagcattggttatcattttatgtaatttactattccaaataactttacaaacttaggaatccggttaaaatgggcatttatgagttgagattatgaatgttgtgattatgaatgttgatgaagtttgtgatgctggtgtggggagtttggaaagtttttgggtggtttaaccggattataattacccccttataccatgggaaatgatatagttgcgtccatccacacaaccaagtaatttgacttagcctagtatattgtcccattatatgaaagactattgggtggctctatgagcggttttggggtgaacttacgtaaggagtttgggcggcagtgtttcacaacagtgggattcatgaaagtgtgacgatatagataccttgcctaggcctagcaagagttgaccactatgatgaaccaagaccccactgtgcagtaactagtagtaagtgggactctcgaacggctatgttgtcctcagccttgcaaactgttgacatcgtgcgggtaaaactggacagtctctgcagaggtgaattaaatcattcgaatgtgccgtactcccggttctggagttgtgccattagggtgattcctactcctgaagtataagtagttttaaaaattaaattgttgaggataaagatgatttatggttttcattactcctttactttattattgtttatttattcatatctattcatctttaattatttataatatgtcttgctgagtacatatgtactcacccttgcataatttgacatatagaggaaacgtgctaataaggagatcagaaggaagcgagatctacgacaagaacgagtttttctaggctagtctacactcgagtttttgcctgtggagttctttgaagttctttggaatttattaattgtagttctagtagttgaagaagtttagcagtttagtactttggattttcttgtatttcaaataaggatattttagtttggatcttttcaccctttaacagttgtataattagcttgtatgaacaaacctgtgtaaataatcgaaagctgttctgtatatcaatctatgcgtgatcgaaatcctgaacgatcacgagtgaatttttggggcaccaagcctaaattgggtgttgccacac

SEQ ID NO: 34345 - DNA, 530 bp, Oryza sativa
cgtataaaccatttcccaatgttttgaaacaagaaacaaagaaagcctgaagcaaacagaaagaatttctctgggaaatttttgctatttagtgtcgaccatatcatatcacaagcaaacagattgattaagattcagttggctgtttagtctgtatgttcagagtaatgatgaacgccatgatgccatcaatgtacttatcttctgttagatgcaaaactaatctaacatcaacgttaagaatgaatttcctggtttggtttcaagttaattatgggaaagcatcacccagtatcgaatgcaatactattggagcataataggagatcctaaaaaacataacgagattaaggagtacaacaatgagaataagagacaaaacacaagcatattaacatcaaagtttgtcccttttgagttctgacaagttagaaccaataggtaactccatcattttgttctgaaactaaatgcatctgaacttctgaagggcagaatattgatggactaatttcccataagagtaagat

SEQ ID NO: 34346 - DNA, 2282 bp, Oryza sativa
gacaataccaaaattctggtaaattgacatcattgcctggttttgatatggtaggctaaatgtaatgttgtcaaaattctttaggaattaacggcgtttggtaacaaactaattgcatctacatgtttatccattttaccaaacaagtggtataacttaaaatgacaccaatccaaacaagcttaaaacatgggttagattgaacatggttagacaggttaaggctacaactacctaagtcacaagatttataaaaggtttactccatagattcatagacatgattttttcgaatacttttataatgaaaatgtattagataccgatatcttttgtacataaccatatcctacccatttatttttaaaattttgagtcaactgattcatgacatgatggcttttggaatattttctctataatgaatgtgttgacagcagggtttacattaccgtcagtaaccgcggttaccgctcttaccgcgggggtacggtaatagaaataccgcggtaaccccttaaattttaataaatttaaaaaataatttgaatttttgatcaattttacacggtttcgtacggttttttatggttaccgcggtaaccgtgcttaccgccgggggcgcggaaaccccggcccaggcggtttgggaaaccctggttgatagtgatatacatgtctatcaacacatgatagctttagggagtattttgtaacataacctaggtgaatctgttggccttttatttatttcttttttcttgttggatattttaattgcccattcaatacaactggttgtttttcacccaacgagaacacctggggtcttaaacacacgagaaaaggcagcttttccaacccatacacatccaaaagtaagaaacctcgttcctctcgagaaaaaggtaaaaatttcaacggcgagcttttaccaccttgcatggtcgaaacgtcaaggtcaattactgatccattcacctgaacaatttgagagagaaaaaaagttggtgattcgacgagcctttgatcgtgtgatactaattaagagcaagtttaatagtatagctaattactagctttaaattacctatattcaatgtaatagctaatttgtattgtagttgtttactatactattaatatctggtactacctatcatacacaccgtacgtcttggagtccgtgctggctacaaatctgtagatcgcagcttttctctcttcctttatctttttaaaatatgtttatagctgacgtatagcctgctattgtatctgctctaatggttagctcaacaaaagtttgatggcgagagcatctaagtttaatacagtaaaatacttcatccaaaatactcctactactccataaacatctatgcgtgtttttttaaaaaataaactcggatgatggatattcaaatatacttttaaaagccatacttatatttcaaaatgggtgtagtagtactacacattatgtaaataaataaaataaagacatactcccttcatctttttcatataacattagctaattaaaaatgtataaaaaaggaaaagaaagatggaaggaaactgttgaattttaaatcgcatttggccggtacagccatggcgaagctggctggaatggccggtatcgtccacaagactacaacctcggatatttcaaccaaaatcacaatcaaatttgacgagcacatgtcatgccaacattctctacgcagacacggtggaaggaggcgccagttcatttctcgttgtatgaaacggcgatcgagttgggcgacacggtaaccagcgagcgacaagaggcggacgcgagcgctagctccatcggcaccagctagcgtgcgtggctccatctcctctccctcatcttttctttcgccttcgatttggacggggaggccgacggcgacatggatccgtatcatccttgaccattgaccggaggacaaaatccgtgcagcccagccagaataataattcccccaaaaacagagacacggccattttttctcttactatgtgtttagttactttggctgtaaagttctttttaaagtatatcgacgcatattcgaagttttatacgcagactaataataaaataattatagaatccacctgtaaactgtgagacacatttattacttaattaatctgtcatgagcaaatatttactataacatcacattgtcaaatcatatagtaattaggctcaaaatattcatcttgcaatttacatgtaaatgtgcaattagtttattttt

SEQ ID NO: 34347 - DNA, 558 bp, Oryza sativa
ataaactatttcattgaaacggcacattgttcttctatattatttctatatcgcaaaaggaaccatggtaggaatttgtgatttttggaccgtgagatttgtgctggctgggaaaaaaattgcttatgaacgcgggggagaggttggaacccacaatctgtaggtttgctgctgcgctagcacagtttttctgacatatttacgtacgtaatttaaaaataaattacattgtagatacaatcaagttacaacgaaactaattagttatatttaaaagttttcttccaaaaaaaatagaatgttatatacctatttccataaataatatattggggaagtagttttgagagtaatgtctatgtgacatggcttggtatagacaccgttaagtgatgtagtttagacacaatatcactttgtgttggaagacatgcagttcttccctcttcagttcgttaaaaaaaaaactcccaattggcaagtataatgatcgatcacaaaacccttttttgcgtgtttgtgtttttcctctagcttctactccctccatccaaataa

SEQ ID NO: 34348 - DNA, 569 bp, Oryza sativa
agatatcgcacatcgctaggatgcatccacatagatatgtgtggcataagtacaacacgcgtatatatagatatatgagtccaaccactacaagatatgagtctaaccactacaagataattgagctattgccaccaaattattatcacaaaaaataatttgtagcaatatattgtactattgcaacgataatttttctgtggcaaataattatattttaatgcaacgatatacaatcattgttttatttagtacttttgttgcaatagaaaatgagatatcgctaaaaaaaatcgtactgttgcaaaaaacatgttctatcggcacaattttaatttttgtggcaatttacacagtacatgttacttttcactatttttttggtgccacgatcaacaaatttattgcaataaaaaaattaccggattataatttaacttaatttttttatatggacacggattgagacaaatttttatgggaattatagctcttgacgagatctacaattttataggtgataactttttcatttgaaatcttttagataatcaaatctatgattcaaa

SEQ ID NO: 34349 - DNA, 2481 bp, Oryza sativa
  unsure (1)..(2481): unsure at all n locations
gaatattttcttttctgatagtagtacgcattataaggattattatcataaaaattatctaaaagaaatatatttagtgctactactaattaatactgttgttttttctcattagaattggggaataattttcttttctacgcattataaggtttatcaaaaaaatatatctttagtactgctaaaactgatattgtacgcatcagaatttggtgtgtgtggtcacttgtagaagggattgaggagaacctatccaaaccgtcagatggatcttgacaatggatgaaaggcagtggtggtggggacagtgacgcgtgcatgtgattttgggtgaaggactggaggtagtggccttgattagtttagcatcatctcctcctgcaattgggcgcttttccatcctcgagataaaccccactacggtgcacatacttctaataacatctttttacgaaaaaaaaaagatcattattcattcggcttttagaccttctgaagttctgatcgatcactcacggggtacatatctcactttgcatattgttcttcttcctacaatcacttgcctgggttcacatgatgagaaagaaccgtgtagtgcatcacttccctttacaggagaattggctacagtcgctgtagcatttttcttttcttagatgctagatgtatacaagtttatagagctaaagtctttgaccagctggcccaaccggaacccgaccgggtcaggttaatcacgctgggttttctcttggccgcaagacgcttttagcaaagcaaatattccagcacacgcatgacaagatctaatctggcacaattagcttctcataatgacaatattatattgttatgtatggttgacaacttacgtctgtgctggaagtagtagtactgctacttgcttccattttttctgtacacgttggcacttgattttctcgagaagggtacaggttggccaacttgcccatatggctgcagttgcgccacccacccgtattctgaatattcgctcacgatcgagcgtgtacttatttcttaatcatttcattacttgagaaaaaaatgcgccagatgtctggatgcataacgtttctttatcagagaatgatgatgctcgattgctcgctgactcttaggcatttgacaaaaataaacgatatgccaaactgtgcgcacagaactgatcgtgcctcggatcatcagatatagttatgcacggcagcttagctctgaagatgtagcagtacatgttctccaggaaacaaaaacaaaaaatgcagtgaatgcagctgtgaactgcgtcacagctgcagataactttaatatgtgattgtgggcagcagcgaaatgcagaccacttaaacagaggactagattcacgtttgacaggatcatcataatctaatctagtcaagcaacaacatctgaactagtaaaccgaaattactccctacttgttatgtagcaaatgcagtgctggtcagaggatgagtacgcacctaattaagctgccgctcggcgacggcgagagttgcaagaagagatcgaagccggtctcagtcggtagtgaccagcaaaaaaatgtttcggcaggcagcagatcaagagtgcttagttggtggtagttgtgtgcttagagaaagaagagcatgcaagaacctaaatgtatacccatatataggcatggttaaggcgacagagtaattaacagctaccaatgagccgcaaagatcgttattactagtatactaacactgtactcggcaggtcaaagccatatcgccatcgccaacctcccagatggcaggacaagcatgtgggctctctctctctctctccctctctcggattgacgatgcagcaacgctacgctgcgttatctaatctaatcatgcccaatcaggaagattccgatacttttttgtgcatggatccccgcgcaataattccgaaaagctccactttcccctacttgctcccgcagccagttgcacgccacgccgaccgtccgcgcgcgcgggtcgcgtgcgccattacaaaattgccgtgagacgccccccgcacccgcatccgccgcgcgcgacgtacgcgagacagcattacgcggtggagactactcgttctcgtcagtcgtctcgtctcggctcacggcgcgcgcgggcgggctcggcggcggcggcgacgggaggacatagattatgcgggcatgtgcgcgagggggtacgtacgtacgcccatgtgtgcaagttgcggctggctcgcggtcgcggacgccgatcgatgcgtacgcgccgcgggtgggcgctgcacatggcggtgtggttggttttgtttggagagtagcgtgtggttgcgccggttgcgacgtcgcctgacaatctgtcatgcgagaaagaaacgcgggaaggggggggggggggagtgttgcanaagtggacaagcgatcacttttcggggggggggggggggggg

SEQ ID NO: 34350 - DNA, 678 bp, Oryza sativa
attcctgcagcccatacaagaatcaatagtaggactagccgcgagtaactttacttggtaggactaggtaatatagattagtgcagcaattaatctagtgcatacatgcttgatgccaaaattaccagtgcgaactcccaatgataagctcagatactattaggatttaggactaggatatagcctgacgcccatgggtgcttgcaagggttcacaccttcacatggcaatatggcataaacatggccacgtacgtaggcgatcaaaaaaaggtgtataaaaatcgaaatcttcagacaaactgcaggcatgtttgtccaagttcacgttttttgctctgacaaacctgaatgggcattcttcgttcatctcctctgcatatagtactgttctttttcctgtgacatgtggcagagtgacaggtggctgcaataacacgtctctcgctgactcgctccaaacctactctgatcctgattttatcgatgtaacctcgtgcctcctgtaaggatcggcctgcaggaaatgttggttagtggctcaaggaatgggactattggtgcgctcttccaccggtttgcttgggagtatattcatgatctgcacgttgcgaacttgcagtgcatttcttcagttgcttttagtgtagcaccttttctttcgacagtgtcgcgtatc

SEQ ID NO: 34351 - DNA, 1228 bp, Oryza sativa
tggagattaaacacgagacattggggttgacaccatatacctcttgccaccgcaacatcaagtgcatctcaaaagcttttatctatggtatgttccttaaaaatgttttaaaaatacagtcaattgcaagatgtagtgatggcttattttgtgatggaggcggagagattacacaccaaagcggcacaaaatattgaaaaaaaggtatatattgaaaaaaatccaaatagtttgagcttggagcctaaaatatgaggttcactgcttcagttttgtttaccacgattttgaataagaaatggatgaaaatgatcaaaaacttcttctataaaaaactgaactctggattatgaattttggtgtagcatcagcctatttgtcgcaaagcacaaacattccaaataagggcctataccacatatgaaaattactacattcataatttaattccgggtgtgtttggcgctacctttcccaacctcaacattaacagcttttcacacgcacgcttaccaaactattaaacggtatatttttataaaaaatatagaaaaaaatactttaaaatcattttaattatttttcaactttttagctaatacttaattaataatacgttaatgagctattttgttttcaatgcggggagaatgagttacaaaactgcactatcgagcatacccttagaaatcccactgctttagtaggattgttggagaatttttaaagtttattgttacattcgttctcaataaatgatgtcctaaaatatgtgcgatcaaatcttgaaatcttatatcatttataaatagaaaaagcattagaattcaatatgcctagcaatgctaatagctaggggtgggcattcggtccgatagaaaatttcggtttcggttttcagtttttgggtcattggaaagtgtagaccgaatttcaacgcaaaaatttcaggaccaacaaattcggtctcggtcttggtcctgaccgaaatttaacaacattttcatatatgcaaagaaataatcgaaattttcaacacaaaatcaaaaaaaaattataagcacgtatgagtaaagactcttattaggttgcatgcctagaagaagtaggaatgtgaaaattagagtttaatattattgaacttagtggattataggttgcatttaattttttttttattaattcggtttttgcgatctattcgattaaccaaggagactaaccgaat

SEQ ID NO: 34352 - DNA, 660 bp, Oryza sativa
tcctgcagccccttgcaacacgtcggatctcaattagtatctgcactaaccatattgatctaacaaaacatgattatagtgtaagatcaatgtgtgttttgattcttattctgtgatgaacaattgacatatgtgattatcggttttgatatttggagattatcgtcgaagtggttttggagataatcaattttcaggagatgaatagggtttactgatttgtcgggaccggtcagaccgggcggttgttgccggtcagacaggagctatgtgagcggtcagaccggcttgcccgcggtctgaccggccgacgctgtgtcggtttcggtttcgggttgtttctttggatatccgtgattgtttcatggttatggcttatagatggatactatacgtatataatactgttgtttgctacgaatgagttaagttggagatagcttggtctcgaaatatggtttctttgtttgtttcatgtataggtgactcgatgcctcgggagagtatttgcggtgatggaccgggagtcggcttagtggtaagacgatatccgtggtggttagatatcatacgagatactaagactagagttgatgcacgtggttggtgaagattccatatggcatacgatggaggtattgtgtgcgtatgggatgcgga

SEQ ID NO: 34353 - DNA, 687 bp, Oryza sativa
attcctgcagccccgggacgccctgtgatttatggccgagtttagtttctaacttttttaaaaaatttctaatttttttatcacatcaaaactttcctacacacataaacttctaacttttttttcaaactttaaattttaacgtgaaactaaacacaacctatgccaatatgccatgtagcggctactgtagcaatcgataccgtgcaatgctgtcgcattgattgctcggctagatcagatggctgtggccggcacatgcatggatggccggctaggggaggaatgcagattttctcgcacaaaggtccacacaactgtctcgtaaaaatggatcatgggcaaacagatggtagatttgtagtaccacttgtactaaatctaggcgtccagcgcgcaatgctgttcgattgggtaaatttaagcctttagaattgcaggttatatatgatcatagccagggttaggtggggaaaaaaaactgtcacaaccaacaagctgttaaaccgtgttaaactccccccggtttgaagaacttcaagaattccacccatcgaaaatgacctatacctaatccttctatgggtattaacgccaatgattgttgtacacttgcacgtaggatgtctgtactagagctatgacggtactttaataaataggagtattatggaaatatgggcagtc

SEQ ID NO: 34354 - DNA, 1228 bp, Oryza sativa
attcctgcagccctgtcatgtacttatagtagtggacctctcttggacaccctgaagagcacatattttttgtgtgattttgtctgaaatagtactgctaggagtagtatttgccgcagcagcattgcggagttgccaacgcctcgaaggtattcatgggcttattagattgatgggctgttttgtacagacaatcacggccccggttggctgtcagcctataactccatcagattgtgtggttttggtttaaaagaagagcaattttacaattcgaggtaccatgaggtaccatttttttattgtaaatttgatatctcttgatacctaggtactgtgaggtatcatgagtgaccaatttttacactaaatttttagtacctcatggtacctcctcaagtaccgtagaattactctcagaaggactcattttgatcggttgcaaacacgtagtctcgcagttaaaaaaaaaaccacgtagtctcgtgaaataagcctagaattgatcgagtcgagtacagttcattcagaggggaaaaataaaaggaagattacgatcgtcgattgggaccgaaattccgaacggaattgcaattgctgaggtttgttgacaggcgactgaactcaattcttgtccggtgtttccggctttccccacttccttgaggcacaactcagcccgccgtcaattccgagaacttatcaaatccatgatgaacaattgcgacgttcgctttcgagcgggcaggtccatggagtgtaacaatgagagaataaaaatcgacagtgtaaggcaggaaggcgacgcgttactgtgcacgatgcggacctcgaaacgctctagtacacagcacacgcaacgggccggagttgtagtgaagctcttttttttttccttaacgaacatagcgaagcttgagtatcagaacaaggcattttatacgcatggggatcacatgatgatattaaactacttgaccgacacagcgttcatccgtgaaattatcgcccaaaacgcaatgcctcgtccagccagtagtacatcggctctgggtttcttcattatagttcagttggatcgtcggtttcatctagacaagtatccgaagtaataatctgtcgcatcggtcaatgactatctgctactggctgatgcagggagcagagcatactctgctctcgcaacgtaccgattgacgtacatggcactcacagcaatgcagcatcg

SEQ ID NO: 34355 - DNA, 781 bp, Oryza sativa
ttcctgcagccccgaataaagtagtaatactgccagaaagaatacaaccacaaggcatataaaattgttacttttgtaatgtgaatttgtaaacaggaaggctcagcaggccttgctggaaaagtatgtctactgaataaccacgctgagagaaatactgaagaacaaatggaccatggaaccccaagaaaaaggataattcagttgtctaatggacctaggcgaatttgcattgttatcaatcagtattggcatcctttattgcctatacaaagattgtgtacacctgtgtgtgaagtgtgaacctcccacataggccgaattaaggagtgaaccgcaaattatagcccgtgttctatatttgtttagctctttctgtactgggacttaacagtatcaattcagagttttttttactgtctcaattcaatttgattatttaattctgagaaaaaaataaaggaattgaccatagctaaatagtatcacagacacgaaagtacatccaactaaagaagaagcggatcaaccatattagatattaccttctcagccgaaagagcatcggtgcatacattgcttataagttgtgagttcacctgttataataataaataagttcaacaataaataaaaattgcaaagtggtaaattaaatgcgtagtatttttgaatgggcaacttggaaagttatccatagcacaaaaaacacactttcgcatacataaacaacctcaattgacaaaaccaaacatgcctaacaggtcaggggctgcaggaa

SEQ ID NO: 34356 - DNA, 676 bp, Oryza sativa
attcctgcagcccatgtcaagtgggatcctatcatggcgcggtgtgggccgcgcgcgtaacgacggtgggagaggcttgcgttcttcccagttcggaccgttccgttcattattggctcgatagcgcccggcccaaccgaaccgatggcgccgtgcacgcccccccgcctactcatccatccatcccgcgtcgctctctccggcgaaaacctgccctgcgtcgcgcggcgggtggttggatggagcccgcaccgcaccgcgcgtacgtcaccccgcacgcacgcgcgcgatcccggaggatgagacggatggccgcacgcgatgcaccagcggcgcgcgggtcgcggttgcgcgtcctgttgctgctgcctgccatgtgccatgtgcttgcgcccccgcacggcaaagcggcatttccgtcgagtctcgtcgatccgtcatccgtcggctcaggagtcgctgcccgcgggctgttctcgtggtccgtcggcctagaggcatgcaggaggccattcgatcgagcgtgcggcgaggaagctaggtcgcgatcgatcgatcgaccgctcgctgttcacggcgatggaggaacaggatccgactgtactgccgatgtgtgccgatcgacgggataagatgtttgtgtactgcgcgctacattggacgggatcttcaactc

SEQ ID NO: 34357 - DNA, 673 bp, Oryza sativa
cttcattcgaagcacacatttacaaccttttaactaatctgtatctttgttccaaaaaaaattgcagccattccagactttgatcagattgttgtcaggtctaccgatgatctcctgccgctggagctggcgtagtcctcgaccgggactgagttccgcttgatgaactcgaggcagtcggcgatcgcctgcgcgtagaacgagttggaccgcatgaacgacggcggcactgtccgccgcccgccgtcgacgtgatgcttcccgccgccgacgaggaacctcgtgctgctgctccgtgagcagccgcctccagccgacgacgaagacgacgacgacgaccgcggccgcctcaccgccagcagctggcgcacgtaccggccgacgaggccgaggaacgtgagcagcttggcccgcagccgccgcaccgagaaccggttcctcgggcacagccggaaccccctcgccggcggccgccgcctccgccacctcctccctatcctcacgtagctctccggcgaagacgcacaaccctccatctctcttcgaatcttcgatctcctttacgtgcgtgtgtgaattgcgatcgattctgtacggcctcctggatcgcgagctatactctgcttgatgctgccgctgccggctgccgctgctgctgctggtcaagtggcag

SEQ ID NO: 34358 - DNA, 674 bp, Oryza sativa
ccccatggtgccatgacacgtaccttttgtaggggggactcctgttttttcaaaccaaagtcccaagatgcaacaatgtccaatccttttctatcgtcgtcagggcataggtgcatttgtgcaaaaatggagtacgcaccagtgagagccgagccggccagtaggtcgagattctttccaaggacctcgcttaatgaacctactacggcaactgcaaatcttgttggattaatgcaatggctggcagcctgagaccaaactgatcgaccggttgaagaagaccctagtctatgtacaatgggccagttaggatcatgagctggattccaattaagacgggtataagatgaaaaaaaattaacaggggcttagaggttagagccagaggctttcgctgcggcgtccttgtcattgaatagctagttctacggcctcggcgaggcgagaggcgataccctaccctgcgcttgctttgatgtgcttcacacgtgtgttgtcacgtcaggtcaaactctccaacagttgttatcctcaccctagcgattggcagaaacgagtacttatggttttgtgagaggggttacctctctcccaaacaccctctatagcagcacacttactagctatgtacggagtacatacgtacatcttggatactatacacaggtagcacg

SEQ ID NO: 34359 - DNA, 660 bp, Oryza sativa
ctttttttttttctggccttggtgggagatgatacattaggtacgacgagggaaaaaaaaaacaacagacaagccaaccaacgaaagcgtaggaggctaggagccgttccgccactgaaagagcacggatgacgcactaaccggcggcggggcagacgtgacgctcgtattagcgacccggcacgcggcgccctcttgtccgcccagcgcgacaccgccctctgccctctcgcgagttacgtgaaagcgcccgcgggcctctcgcggtcgtccgttgaggtggcgtggaagccacgaacggtggaacgcgcgacagctcgcgctcttctccccccatcgtcgtccgttcctcgtcagcgtcgagggtcgcgctttcgtttactcacgcattccgacgaaccagccgttaacgacctcggcctcgacccttgtattccggatgatttaccttgctgccatcgctctttttgcgacctgattggagtaatacccggaccccaacggcaagaattgatagtttgaacagcatacagcaacagtcattggccaaaacctctcatcttttttgcttcctcgtactccgtttccgttctgggagaagcccagcgaaaatctcacaattgggccatgggccaggcagccagcgatatttacctgtcc

SEQ ID NO: 34360 - DNA, 679 bp, Oryza sativa
attcctgcagcccaaatatttctttgccaattttccatcacgaataaaccaaaatcacacttggttttacatagatcatgcatacgtcattagtccatgatacgtggttttgtcaggcttaaacgggcattatcaggttcgtgcgaacagaactaattccatcatgtaccataatccatttcgttatcttctgatggtaggtgattgctactagtagtactattttctagtactcctgctcgagatatcaatcaatagaaattaggtgcaagcctttagtgcaagactagtacatctctgaattctaatgcaccgataatagccatgcataggtgcagaccataccgtcctcttctcccaacccaaccgattgatctgacagtgctcttgcaacaaactcaaaatgttcagggtagttaacaacatgatctcctggctgtcagtatgcaggggatggtcctttttgctgacatgctctccatatgaccaaatcaacaagtataattcaagtctgcatattactagccagtaacttttgctgatggagtagtttatatgtagttatgtatagtactgatcagtattcagtactagtacagtagtaaagtttctatgatccgcctgtaagacacatcaaagagatcagaaaagagtacagatttgaacaacctgctactct

SEQ ID NO: 34361 - DNA, 1125 bp, Oryza sativa
gtaaagaattcaactgaaatcatttctaggtggccacttacctctctgtggacattgaggcatactcccgtgcttgggaggtgtatgacgagatggagatggacaacaagaacaaaaagaaaggaggaggagatgtagagttgtagatagggccggaggagagaagagggtatagaagtgtaaagtttggaattgtaaggaaggaaagagtgcttaaaaggcaagggagtaatgagggggatgggcagcttgtacaattggtagcgagtaaatgggcaggaggggaagaaatgttggcgagtgttgaaaggttgactcgatcggttggcctggccctcggcgccctgtagccctcccctcgtgttcctgcgggtgtttctgctcatgtcaagggaatgaaatgctgttgaaaacgaagcctgccgcaaccactggaccaatgcatttttaactcttgtgtgtgactaccttactgctacgcaacctggagtacaaaattacagctagcgtcttcggttttcagtgccacccaggatgccagctagtgcttaatggttctttacacacgtacgtaatttttggatggatgaaagacatacagcaatgtttgtccaattccaggctattttctcaccagtttggctgccaatttcgggatgacaagtactccctcccttccgaaataacccaacataatattaaatggaatatttcccagtatctattcagatttactgtactagaaaatatcttatttaataataagtttatatttttgtacggagagagtattgccagtatatatgggtggaataaataacttgaaagaaaagacaaatgtagcacatggtgtgagcgcacaaaattttcaggtgagcgtacatgcacgttcttatttctagaggttttcaaaaccatatatacaaattcatttactccatctgtcccaaaataagtttaaaaactaaaataccctaccttatcaaatcacaatgtaattattctacactttatttatttctaatacaactttatctatttctgatgtaattatttcatacttttacaaactccgatacaataattatttaaaaataaacttatttgcgagaacttagagggact

SEQ ID NO: 34362 - DNA, 719 bp, Oryza sativa
cttattccactcctgaattcccaagccctgcagagtttcagtcttgcacttgcacttgcagcaaaggaagctaggcctagctgtgtgggttggtcagaacgtggtgcggcccacaaaagttggttagaaccggattcggaaaaagtacatcgaaggtccctgaacttgtcatcgagttataaaaacgtccccaatctgcaaaaccatatatcacacgtctcttaactaatcaaaaccggtcacaataaatcccttggcggttttgatcccggtcttgtcctacgtggcggctgaatcagcgtagaacctatgtgagccccacatgttagcatgccacgtcagcctcttctctatttcccctcttctctccattcctcctctctctctctcactcctctgtggggctctggacggccggcggtggggaggaggtcgtcggggcatggaggtccgacggccggccggcgatgaggcggcggcgacccagaagggaaggccggcggcggcggcgggagcacggatagcaacaccagcgtcttgtgccgcgtccaccgcggcgtgccagcgccggcggccggcgaggtcgtgttggcggcgccggacattgctgctgctgctgctgcctcccgaactcgatcgagacacatcaagggatccaccagctgggatttatctacggccatcgcagccattaaatcgggaatcaaagcttgcaattt

SEQ ID NO: 34363 - DNA, 793 bp, Oryza sativa
aagaaatgtcatcgccgtcggttttccattaatagccaatcgtgtttactgtcggtcaacacggtcaaaatccgccgtaacaaaggggagctagatgcatctgaagaatgccgtaaacgctgagatcgactgcatcctctccatgtctggccgaacgcgagtttgccgattgctttgcagctggtgatctagcggccgattcctcgcacgttgcatcgacatggaggagccccattgccggcaacgagaggagggtgggaggagaaagggaaggagagatttgtacacagctgcagccaggtgagacccaccatggtacgttgcgccgcgccggcttccgcgcggcggcaacatgccgtggcggtggccgcagatgcctcgactgcaaagcatgtcggcgcggggtgcagcggccagctgcagccgtggtcgtcttaccgcgcgcggtccgcggtgcttgccgtgccaagacgtggagctatgccagtatgcctctcgtgcgtgctatgttatgagcaaacaccacgtagcatcaatataatccctccattttatattataaaactttctagtattatccatatttatataaatatttataaatctagacatacatatatatatatacatatatacatatacatatatatatacatatatatatatatacatatacatatacatatatattcattaacatctatatgaatgtgggcaatgttaaaaagtcttataatatgaaaaaggggaagtatgtcgcaaacaccacatagcatcaatatatgtcgcagag

SEQ ID NO: 34364 - DNA, 656 bp, Oryza sativa
cccctgatgctccaaataaaggggggagagatactatgacagtatggcactagcttagtatcccggatttggagaggcttgaccaccagatattggtgtggggatgctctggcatctgatctccaggactccgagaggacaaaggttgcaaagctatgagcaagttccaaagctctgggccttctctctccccccacaaattatgcgaaagtgtgaaacgtccctctcctctttatttcccattaagggaccgagaccctatttccagatttgtacttcgagaatgcaagatgcatgatagtacaagtaccatagcagatggtgagaatcttgcagctagtgtcaattttgggcttggcatctcatggccagcagctttccagattttgcagctctgccctgctggttaaacggaacctcactgccactgccttgctacagctttgcctgttggttaaacggaacctcacctagacacagtcttaagtattgctatatatactacagtattcaatcacacatataattccaagcaatgaaacgccaaaaacatgactgaagatgtcagagattcagaggccattataaaagctgcaggtgaaacaaacagagggagggcagaaggctcctgcctcctggtggctggttccttctgg

SEQ ID NO: 34365 - DNA, 500 bp, Oryza sativa
tagggatagttggtaccagggtatgcgagattgaggtaaaagagatggaaacaaggatttttatacaggttcggaccccttatttgacaggtaatagccctactcctgtcggccgaagccggtgttactctttattcatctggatcacacaagtacaataattgggataacctatcgagctgtcgtcaacttggcggcatggataaccaacacatagttgacgacatggtagtcttcctcctcgagtatgagctcttgagatcagatttgacgctaaatccctcttgttggtctttctaggcttaaccctaatgttgatgtctgacggcatatgttggcttgtatattgtgtgtctatctgttgttgtgtctcccctcctattaaggggtcttgtatttatacccatagatacccctttgtccaagtagaactagggagaccaatatggatacaattcgagtagtccttctcgttttcatatagaactgtattcgtcatt

SEQ ID NO: 34366 - DNA, 589 bp, Oryza sativa
caacctgaaattagatgagatacataatgatttcatgaatctggatagatttttttattcacattcgtattcattgtaaaaagatacatcctgttcggtctcagtttactatatattttatgctgaaaagaatatttgagattagagtgacctttgagactctaggacgccagtgacattgaatgtatgtttgatatttttttaaaaaaaaagttacaaaattatttattttgttatgacttgtattgtttattgaagttgttttaagtatgatttattatattcgcatatttacataatttttaaataaaatgaatagataaatatatatgccaaaaccaaaagtactttaaatttagaccgtgagtgctctaaatatgtagtaccctatacacatgtatttagctttgcaagaccatcatataccatttgtacggaaacaactctcgtgcatatagcggaagtcctaaatagataagaaatgagtcacataaaataaatacagagccctcaaaaccgacgatcgtatctatgtttatcttcttagttctacttaaaaaggaaacacctaaaaatataagtacaagat

SEQ ID NO: 34367 - DNA, 535 bp, Oryza sativa
gagaaatgcgattagtatatgattaattaattattaatatataacttttttatgaataaatttgttggatttttttaacaacttctttatagaaagttttcgcacgaaatataccatttggcagtttgaaaagcgtgctaacagaaaacgaggagaatctaatcctataggctcaaaacgagagcctgtaagaaaaggatagaaccctacacgaaaagtgttcttcaaaatagcttttgaatttgattttttctatcgacgtgtaatgcgtcgcgtacgtctcaaaagtcagactgattttacttgtcgcaaaaagtaattcttatcatgtttcaaggctgtgtgtttagatctaaagtgaatccaacttcagtccttttccatcacatcaatctgtcaacacacaaacttttagtcacatcatctttaatttcaaccaaaattctaactttgcacccaaaacacaaccttcctctctctctctctctttttctcttgtcgcgtcaaaaagaagtcagaaatgtgcagctgtgct

SEQ ID NO: 34368 - DNA, 761 bp, Oryza sativa
catgcatcaaattaactggagatcatgcaccggaaatgttgcttttgggcagcatccagttgcttcaaagcaagctcatgaagatcatgcgtctactgatcgatggatcccttatttcgcgccgaatattcaaggattttcccacgcgattatgtgtcccctgtgatcctagcccacccattactctactgaactttgaaaattttttaaacttacttttcgatttttgctttgacttgctgcgatgatccgtgccacaaatcagcaccaaatcgattaaaatctgacaacctcaagtcaactggcatgaactctagtgctaataatatatcataattaacttggcagtaaaggcagcatggctctctttcggcgatcactatgctgcattgttttaaaagggtttgacttgtgcgaaattaaaatcgatggacagcgacctgaacaaagatgcaaactgcactgcaccgcgatatgctcactcatgatcgctctcttcagatatccaattagtaaattgttaatcgcatccgacctacttagtccactcaaagtctggatggtaaccaaaagcttcagcgcctgtagtgggacaagaacagattactaactaaaactaactaactaaagccttttacagttcagatatcttagtgagatcaccattgttaattatcgaaaatacttgtaaaatgttactaatgagcaggggcgaagctagcgtccaaacagaggtggtgcactatcattaaagagaaaat

SEQ ID NO: 34369 - DNA, 507 bp, Oryza sativa
cggacgacagaagcacctagagaattttcttttctccaatccaatacagatcggatctcttccagggaaatcagattttttttctccagggaatcggactcttttttttcgctttttttattcattaaacggtttgtctctcggacttttttttccctttttaagggatcgggtgttttttttgccagggacgggtgtttttttcgcccggtttttttttcactttttttttgatcggactttttttttcgtccggtttttttatcggacaaacttggttttttctgcccggttttttttcacccggtttttttgacggacgatggaagcacctcttattttttaagtagtagtagatttattttatgacttactttattatccaaagtattttaagcacaactttttattttttttatattggcataaattttttaaataagacgagtggtcaaacaatgcaaataaaatctcaaaatcccttatattatgggacggggagagtgt

SEQ ID NO: 34370 - DNA, 6658 bp, Oryza sativa
gattttcgtgtgcacccttcctattctgctaaataatatgtttttaatatattttctatagataaattattgttttgagaaaaatcatattaattcaattcttaagtttaaaacatttacaattcaattaattatatcctaatggttaatcctgtttttgcatatcttttttccactctttttttaatccattgctttccatctacactacaacaacccagctttccacacatcgccggcagcatcaacaacagcccttctcttctactccctcggtaaaaaaaaaaagacaaaccctgagtttccgtgtctaatgtttgactatccatcttatataaattatttttataattactccctctattcctaaatataaggcacaaccacccttaacccaaagaccaagaaatagttattatcatcttgtaattgaatcatcctaataaatgtaatgcatgcatccaatagagttagagaatgtgaggatgaaggatttaaaagaataggagtgaatttcagaaaaccccatgttttgaggctaatataacacataaccacaggttttgtttattttctcacataaccccgtgcattcaatccaattaacataataccacaggtttaagtaaaagaaagtgccacaagggcaagtgatatggcaaacctgctccacatcagctggccccacctaccaggtcaatacatggcctattagggtgggatcacgcgggagaacagaagcgcgtgttccctgtttctacgcacacgacacggcgcctcccgtctttcttgcgcacgctggcggtggcgacgttccccaaccatctcttgcatgatggcctccggtgatgatggtgatgttgacctagctggaggaagagaactcgttgggtaccattcctagcaggtaacattcatcccttttcttgtgatgatcatatgaattgactccaaagcatgctggttggtgatttgcaaggacactctgcttcatggttctttgacgaggaattaaatccagccattttgatcatgtttggcttgtcaagaaattaggcctagtaaaatgtaatttaggggaaccattattgttagggcattacaactatgcaatcgttcttctgtttgtcattgcaaaattgcttttcatcatttgaccataattttttaaataaaaaaagcatgtagattggaccgtgtataagactattgtattacaactattatattgcagtcagatataaaactaaccacaattaacatttaaaggcctgcaacatttttttctgcttcacaaaagagcagacatggcttcctctttttttttctcggtaaataggttgtatttttctctgcttcacaatgtatatatttcagatatggattcgttttgcaaatttcctatgccctggacctgcaatgggtcacatattaactgttgctatggtgcttttattcagacatgggatgtttttataacgtttgctccattgttctgcttaatgcatagaaattgtcagttttttcctttcatttttttttcataggaacacagtgtcaggcaccttggtgatcgacctacttacaaaaaattcgagcagaaacattgtcaggtcctgccgtcctggccacgtttaatcaaatacacacacaagctttgtattagaagataggaagtatatgtacagtttgatcagttgatgcaaaacagaacaggcgatgcttgcctttgcatgtgcacgacgagctgcccctctgaacttgtaggaggaggaaaactgccgcagcgagcacgaggaagacgaggggtgcgtcatcgcgtgcgcgggaacagaggatgggtgcttccccgcgctaaatagcccacgcattgatctggcaggtggggccagctgatgtggagcaggtctgccatgtcacttgccattgtgacactttcccacacttaaacctgtggtattgtgttaattggatagagtgcattgggttatgtgagaaaataaatagaacctgtggttatgtgttacattggctccaaaacaatggggttttctaaaattcactcaaagaatagtaatttaatgaagaatacatgcatgtcttatattatgtaccataaaaaagtggttgtgttttatattatgaaatagaggtagtagtatttttattattgttagatgataaaacatgattaatactttatgcgtgacttatctttttaattttttttcatattttttttaaataagacggacggtcaaaacgttagtcacggaaacccaatgtttgtttttttggacggagggagtacttgccctgcccgtacggtgtatacgtgctgtcgtcgatcttgccttacgagactgacaccggcccactcaaaagggataccataccaaccctgtaagactcttaacatttttttttggcaacattgctcatagggttagtacacagtacttgctgatccattgattgacagccgtttcattgggttgatattcaagggcgagaggacagtacattagaagtactagtaatcaacaaaaaaaaaagcattaatttcttcatgtacgtgggcgtgcttacttttacatatgtaccacgcatgcaccttaaattctcttaatttagagctcatcaacagtttgtatgtacacaactacggctgtctgccagctagcttttctacgtatacccttggcaaaataccctaatttacggttatgttaattaattgtgatgaaatatatatcctcctaagtcctaataacagtctattgccacatactaagttctggaggggtaaaacatttcacacacaattcagagaataattttggtacagctccacctttaatggttcttgtctagctctaacttcaattgttgcgatgatcggatggacgttgtttgcgtcgtggatgtaaatttcttctttgtctagaagacattgtcatatgtttcttggtcattggttgtacatacagttgtttattcataggaagtcagagctgctcttttgagctcgacaacaataatttatgtgttggaattaatacgtggctaaaacttatatggagattaattctttgaaaaatcataaaagcccatctcataataaggtatacatataaatctttagtaccacctcacttattataggagagggatgcctcctaaaaaaaggagattgctcttctagttacttgagccatgtgagatgaagaggactagagaaacgcacgtgctcccagacgaggcggcgtgagcatgaatggtcacaaaaacggtatttatttttggaaaccagttttaggaaacacaccgaactgcgtggaacgacatcgagtttggataagttacacacaacttatccagttcggttatacggtgaaatttggtgtttgttatcggaaacataattgtaggaaacacgctgaataatccgttgcgtggagcggcgtcgagtccggataagttacgcgcaacttacccggttgggtttatagtgtaaagatcgtgtaggtgtcctgatcacacgtcttgatatctctctctatataaaccgagccaccacctcctcacaacatacgccaaaacaacctagggtttgtctcctcctctatactacattattgctcgtaatctactacatcccgctcgccggcattcactgatgatcgggagagcaggtctccgaaaccttcgccttcggtttcatgcaccgggagaaggcgacgataagagttttgggaaacgattcgtgcgactggtcgctgttctttcacaataatttgtcttcctctacgcttgacgtaagattaagtgagaaagctattatgttcacattttagacaaggtagtgtcttaaatcactttattttagtctacaaatgtcatatttggcacagctcaggatctgacattttctggagctgggtgttcctagcttcacaaatccatggattggatttaggattacattgataatatatggatgaaccattttgttcgtattttataaaatttcaaactgtactataacttaatatacaaactttaaatttagtgtatctaggatttagagctgtaccataccaaaccagaccaaatttagtacacactccatatcatgtaagaatattaaaaaaatatatagctctaacaaaaatctgaaaattagctagagctctaccaaaacccggagttttcagctgctggcagcccacagacgacaaaagcacaaaatgccatgatacagcgcacctttccctttgggcaccatcatatcagtccagcgcaagtttaacatccgtgacataatttatgtgtacctaatgtggcccccatgccatcaccctacccacaaaaagagacaacaaataactctagtttgctttgctagccactcccttgttttatgaccaaacttaaactttttattagtggccatcaaattgaatataacggcttcccttttagactagaagaggacgacgcagagagaaaactgaaagtttttttttcactaatgtcttgattaatctcaccctcagtgacgatgcgacactagtttcatatctagattgaaattcactaagggcccctttgaatcacagaaatgaaaaaacggaggaaaaaaacataggattttgatagaaatacaagtgtaaaacaggtgattggaaaaaacaggaaaaacataggaatgactgttcgattgggccgcaggaaaaacacggaaatttaaggagagataaaagactcaaagtattctttccatgaggttctacctcatgttaaatttactctaaaacttacatggggaaggacaatccataggaatttcataggattccataggatctatttctttgattcaaaaggctatatagaaaaaaatcctatagaaatgaaatactctaaaatttctatgaatttcctttgaatcaaaggaaccctaaagttttatatcaagtacaaattgggaaattaccggttggtaggctagctaactttaacttaactagtggcgccaattaaggatgtgttcggacccaagggttcccaacacctctccatggttttccgcgtgcacgcttttcaaactgctaaacagtgtgttttttgtaaaaagtttctatacaaaaattgcttaaaaaaatcatattgattcatttttaaaaaaaaaattagctaatttctaattaatcacgtgttaatggactgctccgttttccgtgcgaagaagatttgttcccaacctcccccagcaaacacagcctgaagaagctttcgtgcagcgcggcgcgcgcgcgcttgcttctcctttttctttaagattgcagctaaagcaaagagctaaaaggtggcgaaacgggaggcctttctcgccgcgctgcgccccctcttcttcgtgccatcgccattgccgcgcaacatctgagctcgggtagccattgctagcccatgcagggcctcgcgtccccgcggtgcgctcccttctgcggccgctccggcgccggcgcgggcggggcgccacgcgcgcggcggcagcagggaggtggctgcggccggccgctggaccgcgtggccgggtgggtcggcggcggcatcgccgcggcgttcttcgcctccctcgagcggtgctcctgcgtgaacgtccgcacgcacgacgagctcgacgacgagacgagggactccgaggcgctgctcatcatgttcgacgtcgtcgacggcagcgaagacgctgcctccgccgccgccggcgccggcgggaggaggggcaggaggagcgagaagagcaagcgaggtggcggcggctgtggcgggcagctatggtgaataattaattagcagctatatataatttttgctatgtatgatcgagatcttgatgatgatcgatggatgcttgttaagtttgtgcaagattatttacgtttatatatatatgtctagctttcatcttgtgaaagatacatattttcttggatgtatggatcgatgataaattgtattcaaggtggttttttgaagttcaatggcaatggaacactgattctcccttccttttcattgtgttctcaagatgtattttccatcctcaaatgatacactgttctattctcaagaaaagttttaagttatatgtaaagatcaattatatggcataatatgtttttatatggttagattgttaaaaaattttagggcaatcatcctatattttgttagttcattcctctctttttttaatgtgcacactaaagcagtggtggttctcactgcaacaaaaagcatctctacggattttttttttcaattgaacatgattgaaaaaccattttcttatggggtaacccattttcttataatccacctaggcgttcaacccaaatgcttcctggctctacgttctaacataatgtcgtgtgtgctccgattttctttttgtaatcatcaggagtttcgttctcattgatcgcatataagagaaggaagaaagtgttccattttctttaagaaaaacatgtgctatttcatgtttttaataataggctcagagcctcagattacaatcggtggaaaaatatattacaatgtcgaacaaaatatgctcaattgccggaagcacattgctcaaccaaacagc

SEQ ID NO: 34371 - DNA, 517 bp, Oryza sativa
atgtacatatgtactgtatatatatatatatataaaatatgtatgcatatatatgtattggcacatatatatgcatgggctatatatatatatatatatatatatatataaaccatgcagcaacagggccatgcaataaaaaaaaggtcagctcgatctttagtcccggttagtgttaccaaccgggactaaagatcgagctgaccttttttttttgcatggccctgttgctgcatggtttatatatatatatatatatatatatatataaaccatgcatatatatgtttcaatacatatatatgcatacatattttatatatatatatatatacagtacatatgtacatgcatatatatatttatacatatatatgttatgcaaatgcatatgtgtatatatatatatgaccaaaatatatttacattatagaaaatgtgtacacatgcatatagaaacatatgtagtcatgtattaattataatccattatatgtcctagctagctacgatttcg

SEQ ID NO: 34372 - DNA, 710 bp, Oryza sativa
attatttctaaattgtatttctatatggactctagtctcctcttctaatattccttattttttaattctgaatttcagctatttctaaattatatttctataaggactctagtctcctcttttaatattccttattttttaattccgaatttcagctatttgtaaattgtatttctatatggactctgctttttctttttctccgactaatgtgagaatttctaggtcatgagagcgaacgtgaaggctcctttttttcccgaattttagttagttttaaattcctatatggactctatgccctacttctaatatttcttattttttaattccgaatttctttttttttcttaattgtatttctatatggactctatactctacttctaatattccttatttttaattccgaatttctattatttcctaattgtatttctatatggactctatactcctcttctaatatttcttattttttaattccgaatttcaactatttctaaagtgtatttctatatggactctgctttttctttttctccgattaatgtgagaatttctaggtcattagagcgaacgtggaggctctttttttccgaattttagttagtttaaattcctatatggaatctatactctacttctaatatttcttattttttaattctgaatttcttttttttcttaattgtatttctatatggact

SEQ ID NO: 34373 - DNA, 1280 bp, Oryza sativa
ccccccccccccccggccccgcgacgcgcacccgtgtcgacgtcgcaacctgcaaccaaattaaggtgatcgatcagtgccgtcgttgcccgcgcgcgcggtcgatccatccatccatccatctatatctgtatcgatcgagtacgttgatggctgtgggatttttaggtggtttggctcctgcgggcggctcgacgtacgactgagactgtatttagttgcaaattttttcaacaaactttcaacttttccattacatcataactttcatacacacgtaaaattttaaccttttcatcacatcgttctgatttcaactaaacttctaattttgatgtgaactaaacacactctgattcagatcctttatctttaaaagcaccatacatttatcattgacgggtggatgtatgagtatttatcgagctcacgtggtagtgataaagacacgtatgttttaaggtagagatgcgtacgtacgacgcggccactagggcactgcatgctcagcttcgctgatctctctgtcgcgcgcgcgcgcgttggaacaaattaggctggtggtgggggctgtgcaccggcggagtcgggccggcgccgccatacaccgcgcgcagctggaattgttatgtacgttatcgtgttactgtggctagccgctctcgtttggggcttttaacctgggaaaaccagagtttggtttccccaggttgtaggcaatgggagtcaattaaagaacgacctactcatctgttggatcgacttgccgtcgtccttggtcacccactcgatcatctgtgtcttcttctcgatcgggccgggggtaatcatcgcggggaaagcgacgcgatcctcgtctgcgcatggacacagatagtgaccggccccagcttagagcaagtttaatattatattataaccaaccactagctctaaaatatttatagctaatttaatactcttaattcatataataattgcttactgtattattaatacctagttccacatgtcatatatacattacgtattaaagtccgtactgcagctggctacagatagactgttgctcttctctcttctcttttatttctataaaatatatttatagctagctagcttataatctgagtacctgctctaaataggactggtaaattaagctactacatcgttaactcttcatgtaacgtttgactatttgttttatttaaaagtagtataatattatttattttgttacgacttgttttattatcaaataaaatataatcttaatt

SEQ ID NO: 34374 - DNA, 819 bp, Oryza sativa
attgattagcattcaattgcagttatgggattgtccagtagctcccataattgatacattttactccctctgtcccgtaataagttcatttttagctccttccatttgtcccaaaataaataagttcattattagagtaatcattgcatcggagttcgtgaaagtagggaataattgtattgggagtagataaagtgaagaatagtttcattggtatttgataaagtaggggcattctagtcgttttggttgtgtattggtatgtgtggaatcggtgaaaattggacttattttgggacggagggagtactgcattgcatgatttcagaaattaattaatgcttattattcagcatgccatgttatcttgtaaactaatgacaacatgtcacattatgatttttctgtattcatttaacccttttccccaaactaacctacaatcatagtcatgtccattctttggactatagttggtttcttgttccaaatggacctttatttttattaagtagtgacagccttcttgtggtccattcaatctcttgatgtctaattggtaatgcataaaagtggtaaatcaggtattaccacaaatagcaatgctaaacttccgcattattgttcaataaacggtgtgatcgtatactctctaaaatctgtaggttgccttttttggaataattatgtccagctgcatttagatgccattattgtttgaaacttttgcctcttacctcctttttattatttaaaaatttggatttttattcataccaaatgatgacttgtatttatgtatattaatatttgactgga

SEQ ID NO: 34375 - DNA, 2880 bp, Oryza sativa
ccactcgtcaaatatggccgtttcatatgagaatgtcaagaagcagggatgtgttgagatcgtaggttttttttgtgcgtgttctcctctttaacgaggtgtgagtctaagtgctcttgtatcatttggctgtgtatatccctcgtggatatagaggccggattaatgaaaatccattatctattaaaaaaaaagatagccccccagaagcccagttactcgtaggggatcttttctgcacctccggcagatatcatgttagtaggaacctgcaaaacaaatcatctaaaagaaactactggaaaattgctaaagcgaatcatagaaatttttttgagtaaatttcacattggaccaccattacttaccaatgttgtggcttggaccaggcatgagcgtttcttttcactttggaccgaatgtattaaccaaatattccatttggactggttcttcttcctttggttgtcctcccttttctgttttgtgatgtgcaaccttgcagtacccgtgaacttggcctccatgctctctgtgctcaagctaacaaatttactgctagagccaaccggagctagcggcgttgagaaaaatgtgagaaaaatgtgaatgcaagtggaacgaaaggaggtgcttgtgctcctggacccggacaaggcagagtgttggaggttgagaccatcaagatcaaggagaggaaaaaaccaggagtaacagagagcatagtgtcgctgcgtcggtgttggtggagcctaccatggacaagcgtgggggtaggggaggggtcctgctcaccaacatggagggctcgatattgagaagggagagagaggatgggggagagctagaggaagaacaggtccaatgtgaaacatttttcaaagaacctaggtccaaagtgaaaagcaagggttacccatagcccaagctgcaacattggtgaaaaggggtggccccatgtgcaatttacttaaatttttttgaagtttttttaaatgagtttcaaacaccaacaccctgtaaaacttaacaaattaatgttttagaatcgaaaataaagaaatccaactgaaagcatagagttatcaaaggatggaatatgaagcgtcaagagagaaacctagaaacgtttgatacaaggaaactgcgattttcatacaagcttcaaggtgcaacaaaatcgatgggtctagctcactacaaggttatttattttcgataaacatggacacaactatacaactcaattatacaactcaatcataagttcaaaattaacttctgagcaaaataaatcggtcaggtgtaaatgcaaaagaatattttgtttttataaacgagaaaataaagttcaaacaaacttaaaggagatgaaccatgacaacccaaaaaaatttgaaactcgaaaaaggatatttgaagaattgatgcaagacgaacgttttaaaatcaaagaatccaactaaaagtacaaaatataaactcttggatgaaaaaatgaagcctcaacggagaaaccaagatattgtttggtacaaccaaacttcgatttccataaaatcaataagatgtgaccaaatgtagacgtctagcccacaactaagttttttttttcgataaacaaggagacgtaactctagaactttgttataaggccaaaattaaaacgtcagagcacagaaaatccgcaaggttgaaatgcaaacagatattttcttttcgcaaactagtaagtataagatcaaacaaaattaggaaattaacaattcagaactaaactaaagctttaaagtccaaagcgaggatcaaaagtgttaatacaagagaatattcgaaaataaagaaatccaactaaaagcataaagtataaacgaaaggatggaacacgaaacgtcaagggagaaacctaaaatcattcgatacaaggaaaccgcgattttcataaaagcttcaaggggcaacgaaatgcatgggccttatgcacaacaaagttatttgttttcaaaaaacagggagaccaacctctacaactcaattcaaaattaacgccggagcaaaataaaacggccaggcttcaatgcaaaagaatattttgtttatataatctagaaattaaagttcagacaaatttaggtaagacgaacgataacaaccgaaaaaacaggaaactccaaaaaggatatttgaagaatcgatgtaagaggaacatttcaaaatcaaggaatccaactaaaagtgcaaaatatatctggatgacaaatgaagcctcagcccgcaaggttgaaatgtaagaaaatattttcttttcacaaactattaagcataaattcattgaaaatgatatttccgaactaaaataagcattaaagtccaaaggaaagttccaaaaagataaactttgtaattgaagaaatcaaacagaaaataccaaaatgcatgggttcaggtcataataaagttatttgttttcaaaaaacagggagaccaacctctacaactcaattcaaaattaacgccggagcaaaataaaacggtcaggcttcaatgcaaaagaatattttgtttatataatctagaaattaaagttcagaaaaatttaagtaagacgaattatgacaaccgaaaaaattggaaactccaaaaaggatatttgaagaattgatgcaagaggaacatttcacaatcaaggaatccaactaaaactgcaaaatataaacttctcgatgacaaacggagaaaccaagaaatcgtttggtacaactaaactacgattttcataaaacaataagattcaaccacatgttgacgtctagcccgcaaccaagacattttttttgataaacaaggagacgtaactctagaacttagttataagtccaa

SEQ ID NO: 34376 - DNA, 1121 bp, Oryza sativa
taaaacaaagcttttaaagtacaaagagaagataaaaaaagagaaacattgtaactgaagaaatcaaaccaaaagtaccaaattgaagctcaacgatgaaacggtaaagaagtccaattaaaaacataaagtcaaagcataaagcataagttcaaacaaacttaaggaagacgaactgtgacaactaaaaatattggaaactccaaaagtgatatttgaagaatcgatgcatgaagaacctttcaaaatcaacgaatccaactaaaggtaaaaaatttaaaacttatagatgaaaaatgaagcgtcaacggcgaaaccaaattttttttttaggacaagcaagctacgatttttataaaatcaataagatgcaaccaaatgaagacgtctagcttgcagccacaagattttttttccataaatagggaaacgtaactctagaacttatttataagtccacaattaaaacgtcatagcacaaaaaagccgcaaggtttaaatgcaacgaaatattttcttttctcaaactagtactacctccgtcccaaaatttagctatttttagcacagtaacttgtctcaaaatgaagttatttctccacgtaccctctcctctcaaccgatcacaaccattctcttcacctactctctcttctccaccaatcacaaccatgctccaattatttctatctactttcctaatatccgtgcctacctaaaaaatacatacattctaggacgaaggaagtatgcacaagttcatagaaaattacggaaaatgagatttcagaactaaaataagctataaagtccaaagggaagttccaaaaagagaaattttgtaattgaagaaatcaaactgaaaataacaagttgaaactagaggacgaaaaaacaatcggtaagtgaggaaccaaattaacgttttaaagtccaaagagcaaatcaaaaccattaatagagaagaacgttcgaagataaataaatccaactaaaaacataaagttcaaacgaggaaggaaaatgaagcgtcgagggacaaaaaagccgcaaggttgaaatgtaagcaaataatttcttttcacaaactagtaagcataacttcttagaaaattacggaa

SEQ ID NO: 34377 - DNA, 692 bp, Oryza sativa
ctaattaaacaactatatcacaaacattacaagcaaacaaggaaaactgaacttagaaacctatcttgcaaaacccctaaaagtacatgtatcaatcagactgtctgtgaaactaatagaataaacaaaccttgacaattccacattatgaaggattagtattcactatgtacctgcatatgtgctgcaaagtcatggaggcataagctagcaccccagaacaattgggttacattctcctcgacttctcgtctcctcgctgttgccttgccgccgatgtgccgtgcgactgcgaggaaggcagcagcaaggctccggaggggcctgcgacggacgggggagttggtctcgggtttgcccccagatctggtggcgcgccaacgccggagacgatggggccgtgggcaggggtggggggcttgcgcctggccgcgcgtggtagcaaaggtggtcaggagaacggcgccgcggctggtagcggcgagccgtctgcggtggcgtttcttcgggaggcggtgggcactgtggaggatgctggcggcaggcgcgatggaggtctgtggcggcggatgtggcagaggacagcgatgacctaagcgtcgacaaccagccctcggcagggagaaggcggatccgacggaggtggcttcgtaggtagcagcgaccctaggagtggcggttgacctgcgagt

SEQ ID NO: 34378 - DNA, 2621 bp, Oryza sativa
aatttattaattttcacctttagctgatgtagctcaccaattatagaacgatcaacatattggacagaggaagtaaaacatatattcggaagcacattcatagggatataaatatgttgttgcgtgtgtgcgtataagtctaccatgtaatcgaaaaaaataaagaaatactgtattacgtgtgtagtgcatgtgagtttacggtgtaataaaaaaattccatcttaaaaaaagaaaaaaaatgcaaaacgctgcataataaaactagtactactagtactccataaactaaagatgtggacatcacggagaggtgggtcccacggttcaatcagggaggccaacacgcacatggccacatgggccatggccgctggtgttagctcacggcactcgtctgcgcgcaacacgtgtccccttcccccccgcctatctgttgcttggcggtctccatgtgggccccgcgcccttcctttccgtgtctcggataagtgggcccacgtcactcgtcccaccaccacctctaacccacacagggccccacgcagactagacaaaaccatagttattgagacgggactggtaatcgaaccggtgaggctgtcggttcaatggttcactggttcacccggttggatcggtggtctaatccggttcaataaatactaaatacattgatcattcagtgtaaacacaaagagccaagtagtctggtggtggaggagtttaactaactcccacgtggtcgtgggttcgaatcccacccacgccaaccaccaccaggccggttcaaagcggttttataccccggtttaatagcggtttttaagcaaaaccgggcggtctaaccggtttatagccggatcgattgcatgccggtcttttacctggaccggaccggtggggctctggttctggttttttccggtccgaccgccggtccggtccggtcttaataactgtggacaaaacacaaacaagcaagcactgtagaagctaatatcttgggccggccaactgctcaaaagaaaagaaaaagaaaaaaaaaagaaaaactgatattggtagtcaaagtttattgttcatgctgtcttattcataattggtgctattacgagagaagatttgcaagtgttcgcccatttgcacggatgctttggacagtttgtctgacgaaaaacagctgctgcagctttgcctgttttgcgagcagagctttctatggagtattatccatcacattcatatatactcctctgctactccctccgtcccaaaaaaagacaaaccctggtttccgtgtccaatgtttgaccattcgtcttatttaaaaaaattatgaaaaaaattaaaaagataagtcgcatataaagtattcatcatgttttatcatctaacaacaataaaaatactaattataaaaaaatttcatataagacggacagttaaacgttggcacgtaaacccgtggtttgccttttttttttgggacggagggagtatgctgcatttctctctgcattatgtgtgtgttccctgatttccatgtcggaaatgccagtgacacttgcattcatctgccatcggtttttggaacaaccattgctgtctgtctgaaaaatgcagatgcagagcttatcctgaacgaaacgacgcagcagtttttgggtttccagccgctgtttcatcaagtggccgagcaagcagaagcagcggtttgtgaatgaaatccacgcgccactcatattcatggctgatcctgaactgaattcaatgtgtcccacagcttagcactagcttatcatgcaccgatcgatccagtcagtggcggagccaacgatgtcatcaaacccaaacgataatatgtatttcttacttattagtaatggcggagccacgttcaactcaagtggtgcacacgaatcccagatccaaaatttcttacttaagaacactaaaatgtgcagtgctacattgattttttttctaggcttttaatgatgagaaaattccctatctagcatcagaaaaaaaattgctcttccctctatagcacccaactttcaaaagttccctatctatgcaccatcaaaatttttgttccctatctaacacttccgttactcccgttggcctccaccgtcaaaacaatcatggacccaccctcaggaatttttttcgtcgctctttctctaggacagagcgcgagcgcgacctgctttccccaacccgcgtgcgcctctcagcaaaaccctagatcgccgtcgcccccatggatggagaccccccgggcggcgaggacggcgaatcagccgtgcagcgaggatggcgaccccctgggcggccattggcgccggcgggctcccccggacggccagcgccggcggcacgggaggccatccctaggcctgctcggccggctaatcccaggcgggcgcaggacaggcagctcatggccacggcggcacatgcaggcagctcccaggcgggcacggacagcaaccccctagatggtgcgggcaaacagtccggcatggcgatgaacacaacctttttcttgcttttgccctggatgtgaatttggatgatttggatggttatggttatctatggatgtgaat

SEQ ID NO: 34379 - DNA, 833 bp, Oryza sativa
tggtttgcgtgatagagaaaacataggattggagaaaacgcgtgatttaaaatggtacccttctctaatcatatagaaatgaaacccatgcaaaaataatagaaggccccttaaatgccataggaaaaatgaagaaaaataataaagaaaaggtgagacctctaggtaattttccgattaaaatgaaatgtacaaatataataatatggaaagttttcttccttttccaagtttaatgtaagaaaaaatattttcactagaatttgaattctatgaaaatcttttgccaatccttagtagcttcagatcaagcaagttttgtttaactataacatttttagaacggaaggcttatcaattgaatgatcaagtaataaataataaatttgggaagcacccgtggtgacttcatgacaaccaaggttcaaatcctgatacacgagtcagggtgtgcatttgcaagtatatgagtgaggtatgcgtgtttgatgatatacacgtgcgtatatgtctaccgtacaataacgataaaaaagagagtaaaggtctgttcactttgatgccaggttgctaaaaaaaatagctatatttagtttgctgtcaaattttaataaatataaaagaaaacctaccaaaattttggtaactatactaaaattttggcattaaggttttttttacatcaaagtgaacatgccctatataacaaaatccttccgcgaaattcagttgaacagcatcgccatctctgcacaaaattcagcgaatcagcgagagaaggaccagttccaactccgaagtttacgcggtccacaaagaccaagtgcaccgaa

SEQ ID NO: 34380 - DNA, 889 bp, Oryza sativa
gtgtggcgacggcgatggtggaaccgacacagcgtacgccaacactcaacacgacgcggcggtgggtaatacgcagcgccagtgcactacgtacgtaccttacctcattgtttgctaaattttaatttcagaattgattttaaaatttttttaatgtagttttaaaatattagtttcctgaccacatatttacccctatattataacttataatcagctcttaataactaaccaatggaagagtgaatcactgtgcagtcgcagttgagtcacttacacaggacatttaaactatttgccacctttaatatgtgatgtttaataatttattactcacaatctatgacgtgcccttttacatatctacaagtacgtagtaaattgttaaatgtccacttacatataagccccgctctaacttttgtgcagttttcgacatttcctgtgaatattataactgtaaactgtgtatctctataactgtgtacaaggaagcctcacccaacaatggagttgtggttcattttagcaatgaagggcttttagtacttccaattctaacgcaacatattgaacgcacttaactgtatgaatatatcggacgcactcctacatcccgctgcgatgcaagtcgaccacggattcacgacccagagatccttttaacccctgactacaattttttgccaagattttcctgactcgtatttgcatacactcgaaaaacaatcgcactggttccaaggctaaacatctgcattcatgctctgaaactaaatctctttataaatatcaaatagagcactaatacgagtaaagctaaaagccgatatttcttatctacatgatgagactacgactagttcacggttgttgccaaataaggtta

SEQ ID NO: 34381 - DNA, 1023 bp, Oryza sativa
  unsure (1)..(1023): unsure at all n locations
ggagctcgccgacgccggcaaggtcttgcaggacatcaaggtgttcgtccagagcaacaggcggcgcgcgccaccgcctgaattgagattcgagagtttgatctgcttcgtaccgtacacgcgtcgtacacttcatatacttgagattttgaattgggatttctgtgattcaaggtgaaagtttaaggccgcagttaaaagtttcgtatgattttatgttgaaaactgtataatttgagtatgaaggttttaagttttcatatgaaagttttaaatttgaatttgaacggtttttaattcaaaaatgaaaaattgaggtcacagctaagtgtcatgtgaaagttgtatgaattaagatgaaagttgtatgatcatgcattgccaccgcgatgaaattttggcatttcatacgaagcgagtgtaagatcacttggctaagtttcatgtgttgaaaacatgctcaccccaacatgtcatagacttactagggtgttcgtatttgcagctaactatttttaccctttttttaatggtaggtgtcatacccgctttatactgaaagatgttggatcagtctttggagatgttcatacggatagagagtgggtttacaccggtgcagtccttggagatagtaaggagtaagtgtgggtacgtatgtaagtgtttaccccctccgtccaaataaaccaatcctaactattaatctggatatatgtgtgtccaggttcatttttagagtttgttttttttttgacaaattagtatgtttgtaccgtgtttggcaaaaataaaaaataaaaaaaaggcatttggtatagaaattatgtatgagtcgacgactcgtaagagtacatacctccaatagttacgcattcgggaatgtattttctacactcangtgtatgcatgtagtttaaatagttatataaaaatttcataaaatttgataagatggactacgataatataagatactacaaacatgtaagtctaaattcgatatacacatgaaaaacaaaa

SEQ ID NO: 34382 - DNA, 645 bp, Oryza sativa
atccagggctaggatggacggttgagatgactccccaatgacggttggagggtattaccgaccattccaaccgtcataactgtcattctcaagctatataaagccctctcatcctccatttcaacacacacctcaagcaagctctctcatactctctcaagattagtttaatattctcaagctagtggagtaggaatagaatagaagtctgagtccggaagtcttcagaagagttcggatatggctctagcagctctcctttcttctttttgtaagacttgtactttatttagaatattcttctgtatacaactctagtattgtgctactttctgagtatataaataccaactttactttatatctaagttatgttgattatactgctagcttatctgggagatgcaatggtgcggtataatgtttgcttatgcaattactctatgccatgacgatgatattagagtagtatctggtagtttaggcgtggtgtctagattactgggtatcattatttggggttatatgctgtggaagagcggtgggccgctgatagtgacagctcagtatgggtattcctccgcgcgagtatataatcctaagttaatttcctggggagggtattcctccgtatttagccccggt

SEQ ID NO: 34383 - DNA, 698 bp, Oryza sativa
acgttcaatactttaaatgtgtgtccgtatacttcaaaaaattttgggactattagccagctacaaacatattttaatgagataaaaaataagagagaagagtagcggactgcagatctgtagccagctgcagcacggactccaagacgcaatgtgtgtatgacagtgggactatatactaatagtataataagcaactattgaatgaattggctattagattggctatagatgaattggagttagtagttggctataccattaaccttgctcttaagaaattcgtaacttttcgttcatcacctcttttttttccgtgttttggtctgtcaatgcgctaatttggttgaatcggactcgagttcagcagagagataaaaattgggttctccggagagataaactcaagttcgagctcgacacgggagcgatttccacaggattttcttaaatttcttgaggggaagatagagtagaagatatagatcaaaagttctcaactaatttgagattatctccacgagtttggttgaattggacgcgggatcggggtggcgtcacgtgttggctggctctggctcgactggagcttgaagaagctactgtagtgatagggacataatttagacttctgctgggacttcttttcgtaggcccgattgaaggaggacgcaaactaatagaagggctgcaggaat

SEQ ID NO: 34384 - DNA, 2537 bp, Oryza sativa
cgatatcgaacgtcgacgaagagtttgtgcattactgttttttcggctcgtcaagaaaacaacgggaaaagaagagtttatgcattactatttttatagttcggctcggtgagttagtgatattttccacactcatattccattgttttcaatcctctgttttacctataaatttttttcctatttttatgatttttctatcttatgttttttctagattatttttgaaaacttatgtgccaaactaatttaatgatctggtgtgctttggtcccatattttcagctatattagatagacctatcatataacataagcatattccactcaatatggtgagctactttagtgatttggtgaaggaattttatgattcttaattgttgcaataaatgattcagtaataaatttgttttttcattgcagacaagaagatccgttattacaagtggtggtgtgttcacgctcctcattatatgttatgagtggtggcggggatacatattatgaaaaaaatatatctcttaatattattgcaaataattttgataactacttctccataaccatccttcggagctttaagatcctcagtattgacaatggttgagaaaacaatctcccatatcatggcggtttgtaattttatagcaatattttaaatataatttttccaaattcataaactatataaaattacaaaactaatagttaaataattttaaagcagaaaaataaataataagactacaagattgataaggaatatatagatataagtgtttattgtaatctctctctatctttccgtatgttatgaacaacattttttttaatagttatattatttagcttacaaaaaagataattatttaccgcttagcacaaaacttaaaggaagtaacgataattttagtaataacatcaaattataaatagggtaacaaaagaagaaaagcttagagaaatttttactaaagtaacattcgttgaaaaaagattatttgcaactataagtagtaagaatataccaactatttacaaataagttgatgtccaacaatatcattgtcaacaataactggtttactcataaaatcttacttaatctctcaaaatattagactgtttatcttttttagttttgtatcagcagaatcactgtatatttttgttatttatattatttaaaacattttgttaagaaaatctaaatgcatttaaaataaaaaattaataatagagggtttctttttataaatcatatagtttctttaatatattttttaaatatgcgtgattttattatttattctttatacttaatttaaaataatttttattttacatcaataataaacaacacactaaccatcatctctcatatttcaaaagcgtttaatagcattttatatcttaatgatattttaggattatatattgtcattgtaatgcataattttttggtgttgttgctgcaattatcgctaaatatattcttctcattttctcttatttcataattttgtcagactcttattcctttgtctttcctaatcaattttgaatattctttgattagtcatttttacctagcaagagaggggtttaaatttattttgttgattggcaagaaaggactagaaagggagggtcttatatagttatgcttatctgttggatttggctgatacagcttatgttgatgggatgccatttggcagtttcataaacgcgtagttagggatgcttctctcctcaacctcaaaaccacatgataccctcaacctcctcggtacggccttgtggggaggacgtaaatatatacgtttgatgaagcccgcgtaagcagggtatgcccatatcaattcaagagtattcatatgtataccaaataattttgaaaacataggtataacctatgtgtatttaaaaaaattaaaaagaggcctcaaacaggccaagaaacaagcatgccaatcttcatggggaaaaattcatctaaggtcccttaacttgtcaacgaatccgattttcgtccttcaaccggaaaaccagatataatgggtccctcaactgttaaaatcggtgcaaaataagtcctaaggcggttttaacggcggtttcagctaacgtggcacctacgtggctaatttaacttggtcttcatctaacgtggcacttacgtggcaatttgatttggaaaataataaaaaccgtgggcccgcataccagttacacaaaaatattttaaaaatggtggggcccacgtggacctagggatggcaacggggcggggcggggccgggttgggctggaacggccccacacctgacccccgacttcatcccccgcccccggccccgattggagatgcggggacaaatctggccccgtccccgatccctccggagccccgcattgggtagcatctccatccaatcaacacaaaaattataagacaatcatcaattcggcaagaacaaatattgtacataattaacaccataaaaaataaatagcatcaaaaaattcag

SEQ ID NO: 34385 - DNA, 593 bp, Oryza sativa
tacagtagttcatcactgcctcaccctacttttttgtcatgtccataaaccacataggcacaggcccaaccaaaacaggttgttagctagtcaagtttgtaagatcaagagtggcctccaagaggttcagtcaaaattagaaatagccagtttatccagggatgtgaatgcaattctcacctgaattaaattagacccctaatttaattctcaattaaccaggtactgtcctaataattttctcccaacatccccatcgatcctgactttgtctgatccccactgttttttcttttccttttggccactctttgatttcttttttcaattctattgcgggtggagactttttggtttggccgcaatccaccaccccattcctatccatcctccttcagcttcttctttcttctcctcctcctccttgactgtcctaacaaaaaaatcgattttttgttctcctcttgatggttgctgcgaccttcgatgtccctatgcggaatgaaatctcctgctggggcggctaaaaatcggagattttctgtctttttgatccgtctttagtggagctttttgagcctgatttatgcgat

SEQ ID NO: 34386 - DNA, 686 bp, Oryza sativa
tttattgttatgtattttcttcgtaaccataaaaggttaatttgcacgtcataaatagatatatgttatgttgagttttggttatctcgttgccgcatggaccccgcattcctatggtaacctttaatagccgtcatcggaactacgacacggttgatcacatccttgtgctagtcatgacgttactagcctacacgtggacaaaaggatatattaacagggacgacacgactaccgtgtactccatacatctctaattcgatttatatagtttatactacataactacccgcgtgttgttgtgagagtttagtataatagcaataaatacaaataatatgtgagaactagatgacataagtttatataagtcgatgtaatttacaataatttaaaaagtatatagaatggtgttcaaatgtaaaagtaaagtgacgtggctttacgagaaaaaaaaaagagaacggttgtttggactatagattaatcatctaagagctaaaaataattgtgatgatatggttttatgagatgagaaaatgatgaagataatttagaccacagattaattatttaagggctaaaacaattgagatgatatgtcttaataggagatcaaaaaagagagataatttgggccatagattaatcatctaagggctaaaactaattaatatgatatggtt

SEQ ID NO: 34387 - DNA, 617 bp, Oryza sativa
agcataggcaattcagcgttgaacttaacttcaaaagatgttcaaaaaggtgaaattctctagtaatcagaaaatcagaataaccataatacaccaaatataagaaaagaggaacacgagggtttcatgaatgacatcaacaacactatagatgtaggatactgcctgtatcaatgtgcatttacagattgatttgatactatttacactgtaaagcgtaaacatgcaattcatcgctaatttttgaagtataagttacgttatgtttgttgaaaattaagaaccagcccaagaaaagaactgcagtcgcattactacttgcacgcataaacgcatttgcactgccacatacattcaactgatagcactgccgcatataatgtacttcttactaataaaaattatgggttatgacaaaatacatctcttggaaactgaataaggtcaattttttctccaataatgaactggaataaggttcaagcaaaggcaactaatagcacaaaattatgaattaaatatttcatcaagttcacagaaaatattaaaacatctaaataattacagagacaaatgtgatttataacagctggaaccaatgggtacatacctgatct

SEQ ID NO: 34388 - DNA, 580 bp, Oryza sativa
tgctgagtagcagtctaatccagtgatttctcccttttttttcttcttccccagggtttccttcaccgttcggctgcgcattgccttcccatcggagctacttgcctcaacagtttggtcggccgcatgtgctcggtcgggaggccctagggcctccactttatctgcgaaggtgatccaatgaaagccttctagattacctccgatcccatcgctccaatccctatttccatccgacctctctcatctagccttcgcctcctccaaaatccacaatatggtgtgccgctgatatgattttcccctccctcctcactagaaatcctttcttccattggtgaccatggtaatcctcacctcctccacccttaggtaccttcctggacgctatcctcgcatctttgaccaatagccacgaccagggtctgcatcacggcacggggacctagcctcacaatctgaggtgaagcaacagccatggctgctattatgcgagaggaccataggtcagtacgagtggggcttctctcccttctgcttgtgccatgctgattaggtctttgttctgttttggtcgtat

SEQ ID NO: 34389 - DNA, 1138 bp, Oryza sativa
cccggtaccaatgatccccgtactattcaaataccgtagtcgcgatctcaaacgtcgacggtattccaaggtatcatatttatttaatttcgaagggaagatttataagagagaactatgctaataatttatgtataccacttttatggtcagagtctaagtaggggttaatacattcataagggtagagtgacacgaaacaaataactcatatcttctcattaattaatcctaaactatgtggaagaagaaatagagaagcaatcaattcctttacttctagtatatactcaaccttagtttacatctgctagtatataattgtgcggccaaaaccccctaatagtgtcctcccggtgtttcaaaagaccacctggggttgccgagtttcttacaacaacctgtcgtggccgtccaaccgaggctaaatacggagtagtaccctccaaggaaagtgtcttaggaatatataataacgtggagggatacccgtactgagctgtcaccatcagcggcccactctgtcccgcagcatatatgaccagataatgatacttaataatctagataccaagcctacattattaaatactactctatattcccaggaatgacatagagcaaccaaataatcggatattaaacccacaccattgcacctctctggtatgctagctacacaactataatgatacagatataaagtaaagccgatactcagacaaattaaagtaccgagagtatataaagaataatatttcattaattctggaagtcttacaaaagaaaaaagaaaagctactagagccatacctgaattcctccgaagactccgagaactccgagagctattctattctactccacttagcactagaatactaaactaaagtatagagagatcttgagcttgcttaagtgtgtctttggagtgaatgaggtctcctccttttataggcaggtaaatgacggatacactatgcgaattgtccaactaccctgcaaccgtcattgaggagcgatcaggagcgtccacgtggaaggccaggatgagaggagcttgccagggtttggccgaacccctggttcagtcgacctggcccggcccagcaggcctccaaacttctctggggcactg

SEQ ID NO: 34390 - DNA, 1653 bp, Oryza sativa
cattatgagtcatatattgagattgataaactcattaattattagcataatttctcgttgtcgatgttgatgtatcattgatgttttttattgttttgatacgtatcatcattagttgaaagccataatcgtaaccaaaagttgacggtgacactatcgatcaaaatgctagatctgccccaggtttcgtaacagcctgcacacaggatttcatatatatatatatatatatatatatatatatatatatagacacacactacctcccttctaaattagttgtgtcgctttgatttttttcttgtaacatttaaccattcgttttatttgaagaaatagtgcaaatataaaaaaaagaaaagagatacttaaagtacttataataatgaagcaagccgcaaataaaaataataatattttcataatctttttaataagacgaatgattaaactttataaataaaaacttaaagcgacaagtattttgggacggaggtagtatatagctttgcgtgccccctgcgtcgtccgatcccatcctctcgtttcattcaataatctactgacacgacacagccagtgtaagattaaacacacatttgtaactatatactagtgtatatatatccttactggtgctagtgcctagtagtaccggtttggttcgtgcaaaccgtgcagcggcgctgcctcatccgcgggcgcgtttcggcgccgtacgcgatagcgacagtaaccgggcgttagccgggacagcgacgcgccatggtaaccgggtataccaggccgcggccggcgcgtgccgccaaagcttagctgttaagcggtaaaatgaatatcttcttcatgtcactaattaaccagcgatctaattatatgtactagagcgaggcaaaaattaattaaattaaagagaaaaaaagacagtgtcacatacccggccctttggttacctcggagaggaccgtgacaggatgatatacttgcagctggtaacgtcaccatcttggttaattagtccaattaattaattagcaacctaattcaaagcaaaaccgacttgtgttaagaagatggatggagttaattaaatagattaactgatccgacggcgcgcgctcctcttttgtcagcgatcgattggcacgtcgcggggcatgtggcccgcatgcgcatgcggcggccggatagatcgatcgtgtggttgtggttgtggtcgacgcccacgtcacacccccccgggccccccaaaaaccctgcctgatgaccgcatccagcacaggctagagcttatccgtagcgcgtgcatcatatcagcggcgcgagtcgtcgatagcagtagcacggccgctggacgcccaaaccgcggctctgcatgccggccggcctcactactctactattaaccccttcttatcccaaacctaattgctacgctacaccgctactctcgatcaatatatgcatatcatgcacgcgtacgtagtctctgagcattcgatcgacgttgtttaattgtgcgagcctgtttatagaaaaattaccctattgttttagcctcaagctttagcttaaaatgaaagtcaagacctaaccaaacagttgtgttccaaattaattaaagttgaatacatgagtttattaacgcatata

SEQ ID NO: 34391 - DNA, 709 bp, Oryza sativa
caaatatgctgttgttgctctcaatgctagcaggaagatgaaatttgatactttggatatgtattgaattagtggatagatgtactgatattgaattttaagacttgtggaatgtgaaatgcatgtgacattgcaatcatttgtggaatgttaattcatttgaatctgattttgtatgtgctgaaatattgtatctgggctgaattgtatgggctaaaaaaaattagttgagttatgtgggctaaaaaaattatatgggctggaaaaatatatgggctaaattgtaggggctggaaaaatcatatgggctgaattgtgcgggctagaaaaatcatatgggccgaattggtgtgggctgaaaatttgtacaggctgcactcattaaaaagaagcaaataatatgctgggccaactagaaacaaccccagaaaaaaaaatatttgtggcccatgagctacatgggctttagcaggccgaatcttattttgtgacgttttttttcaaccatgtcaactgccaagtcagctgccacgtggcaagccctaggattttgtgacaataaagcaatgtcatatgcttgtgacaatagatgtacaaacgtcacatactaaatttataacggtggctttttgacgtttgaaattacgtcaaccgtttgtcacaaattgtaatttttgacataaatttacatattatgacataataaaat

SEQ ID NO: 34392 - DNA, 643 bp, Oryza sativa
ttcaacctcttggaaagtctcttttcatccaattcgtatgttttcattcggtccgtccaaatggtttcccatatgttttgcttttttttttttgtataggcattcttgccaacatcatgtgttttaccatcgttgtgtgattgtgtctgtgatagctaacagttacgaacaccatgattcttttaagaaaaaaaatcatgtgttataccatccctattgtttcaaagagggttaaatagctcgcagttctacataaaagtatggtgaaacaacttgtaatgaaaagcattcccaataagcatgatcaacaggcctgggaagcatgatagagatctgcaagttaagagtagtatgataattcaatgagctatgcctggctaggcatggttgaaaaaaaatcctatgtgtttggaatgatacaggcggcagggaaaagagtacaactaagaaaataatacgtactgagaggattagttccatactcagtacgtacttgtatggaataaattagcctcaatctccatgtgagggtttaaccgaaagaccttacagtctttacagtcttacatatgctaacccgcgaaacaatgtccacttacatcccagttcagagtacaagcaaaaatatccaatctgaaccaga

SEQ ID NO: 34393 - DNA, 537 bp, Oryza sativa
tcgggtgatataaaatgtgttatttgatatgagtcactcgcctggagtgatatggaagtttaattccgggtgaagatggatgttgtggtgtgtgagcccgtgcatgttgttataattatcggtggaaagtgtatatttacacttaaagtatgcacgggcctgtgctagtttcagtggctttccccggatataaggactacccccttatgccatggaaaatgatgtaatttgcgcccatccacaggactgagtaattagacttagcctagtacattgtcccactgtatgaaagactgtagggtggctctatgagcaggtctggggtggacatgtggaaggggcttcggccaggttgacatgatccacaacggtggaacccgtgaaagcagcgaccgtctagccttgcttaggcccagcaagtgcctgactgctaggacggatcaatatcccactgggcagtaactagtagtaagtggcactctcgaacggctatgttgtcctcagcccttgcaaactattgacatcatgtgggtaaag

SEQ ID NO: 34394 - DNA, 620 bp, Oryza sativa
ttccattacatatgtgtttctaaaatagaaaataatgcattaaaattatttaaagtcgaaaaattaatgacaattacttcgaaaaattattgttgactgtagtaaattaagtggataaaacgtaataagcaaatatatgatttaaaattaataaaaattctaataatcatatatacttagcatatgaatgatattaaattgttaaaaattctaattaacatatgtatatacatacgacatgcatgatttaaaattaataaaaattctaataattatatataattagcatatgaatgatattaaattgttaaaaattgtaattaacatatgtatatacatacgacatgcatgatttaaaattaataaaaatttctaataatcatatataattagcatatgaatgatattaaattgttgaaaattgtaattaacatatgtatatacatacgacatgcatgatttaaaattaataaaaattctaataatcatatataattagcatatggatgatattaaattaattgttaaaaactctaattaacatatgtaaatgccacatgcattatttaaaacttttaaagattctaattatcgcatatacctagcatatgcatgattta

SEQ ID NO: 34395 - DNA, 1321 bp, Oryza sativa
atcactctaatatgctatgaagttgtgataatttttaggaactcctattcaccccccctctaggcgacatcaaggtcctttcaattgccacataggatcaaaacaggattgtattggcacagggggtttatttgtctagcttgagaagttgaggggagaaatgtctggtttgttgttcaagtgggtaattcggaccatcgcaatagtttagggggtaattaatttggactattttatagcataaagaggataatatatatataaaggtttagtttatccatagttttttttttagtaaacttcactttgggccccctttattacccaaagtttcaccatggacttttgacaagcctaattttccacataacaacacatacaattaccaatggttgctttggactaggtcacatggacttcatccctgcttaaagcccaagccaccaagcagcagctggtggagcatcaataagatcaatcggtatggcacagcaattgagtattgcatcgtgcgagataaaaaaatcagtgcaataatttgtttatgcaattggcaggtattggaagtgcgggttcaaaaataataatttcgtattttggtattcgatggcaagggcttcggtggtggaagcccttagatccattctcataatttgtggccgcaaattgcacaattttgtagcacaaaagccagcatggcagtccaagttgtctaaccccggcctgcaaagaatggtaaacatatgtgatgttaagggaaaaggttagcttatttttaagagaaaaggttgctcctggttcctagaattaaaaatagtatgcctagaatttccaatgaaatgattatcataatatcataaacttgttgcaacctattctaatataaaattgatggtcaaaattagattcaccaagggaaggttcgcacgtggcaacctgtggtggcagggacagccaaccatcatagaacctcggtggatcgttgtgacagccggtgagtatggaggcagtcggacaggctgcaagcggaagggccagcatgggcatcctcattcgttgcaatagaagggagtaaccgctttgggctatgccagcatcgaggctcaacaagttgatgcgggtgatggccgatgcttctttggtgtgccctgcctgcagagtggtttaatttcctacaatctgttgatggtggccttcttctcttcccatggagatgatggtctctctagcaggtacttctcacaacgaggcaaggacgtccagatctacctgtagaccaatgtcagtttggcttcgattcaaggtatcgcttacatcaact

SEQ ID NO: 34396 - DNA, 637 bp, Oryza sativa
aaaaatgattttagtcatgatttttgagcaactaggattattgtggttttttcccaacccatgaaaaatggtttcaccagtagtgcgacctcacaaaggatggatctggcacctgatggtcagggatggaggtggcggtggacggagcatgggggtagaaggagacaacgctcggtggccggatctgcgtcccccaaccttgtggatggtggatccgacgcccagtggtcggaggtggtgacaggcacacatggttgaagccttgaaggagacagcgcccgacgaccggatctgtgtcgcccgacctagtggaggacgaatccagcgcccggcggtcgaaggcgacgacaggtggccggattcggcgcccgacagatggggatggaggtggcgatggcgctcggaggttgggcgtggaggaggcggtggacgacggtagggtgcgaaagagctggcggccgacagtagagggcgaaggaggaggcgcttgcattggggtggagttcgtgtgcagaggggaggaatgaagaaccaaagaagtggataagggcgagagtagaggagggtctcagtagatgaagcgatttactttttctcgaataacctttgacgggtagaaacatttaatacctatcat

SEQ ID NO: 34397 - DNA, 1549 bp, Oryza sativa
gccaccgccgtgctgccacgcctcctccgcgcaacgccgccgccgcgccgcgcgacatgctgccgctgcgccgcgcgccaggccgccgccgcgccacgccgatgccgcgccgccgccgacaccgcgccgccgcgcgccacgccgccgccgcgcccgcaacgccgccgccacgccgccgcttcgctgccgccacaccgccgtccgctgccgccatgttaacgaacgaattatcgtgaacgaacgaaatgtacgtgaacgtgaaagaacgaacgaacgtacgtgaacgtgaacgtgaacgtgaacgaacgaacgtacgttaacaaacaaaacgtacgtgaacgagtacgtgaacgaacgtttctcgtgaacgaacgaacgtacgtgaacgtgaacgaacgtgaacctaacgtgaacgtgagcgaacgtgaacttaacgtacgttaacgtgaacgaacgaacgtaggtgaacgaacgtgcgtgaacgaaaagtgaacttaacaagaacgcgaacatgaacttaacgtacgttaacgtgaacgcaagtgaacgaacgaacgtaggtgaacgaaacgtgaacttagcgagaacgcgaacatgaacgatcgtgaacgaaacgtgaacttaacgagaacgcgaacatgaaatacaatatatgttactttgcgtttatcctaatacatctttttgtatgttgcagaaaagacgttgtcgtcgtcgtccctcaagctggagtggtagctagccctcgaaggaattcacgcaggcaagtgatgtaaatatatgattgttagatttttaatgcaattaagactattagatttaatatacgacacttagacttagcatatatgattacctagggatctaatatacgacacttagacttagcatagttgactaccagagttgtaatacaagattatttgagttttaatataagattattagagttttaatataatattattagatttgtaattagacttagcatataagattgtgtagggttctaatatatgacagttagacttagcatatatgactatttgagttttaatataagattattagagctctaatacatgattattttagttttaatataagattattagatttgtaattagacttagtatataattattgtctagggtcctaatatacgacacttagacttagcatatttgactattagagttttagtacaatattatttgagttttaatataagattattagagttttaatacaagattattacagttttaatataagattattagagttttaatacaagcttattagagttttaatataagattattagatttgtaataagacttagcatataagattgtctagggttctaatatatgacagttagacttagcatatttgactatttgagttttaatataagattattagagttctaatacaagattatttgagttttaatataagattattagatttgtaattagacttagtatataattattgtctagggttctaatatatatacgacagttggacttagcatatatga

SEQ ID NO: 34398 - DNA, 1309 bp, Oryza sativa
ctctctctctctctctctctctctacttgcatgtggaagatagaggacgtcagttgggccccactgtcatataggatgaaaggtggattttattgctgaaagttcaagtgccattaatttggttttggtgattaatgacaaatccaattacatgagactaacattgttataagcatttctttgtctactagtctcatatggatatgaaagtggaatatgtgagaggtgatttccggactttatatgagtaaagagagaaacgttcattgatggtgttcctaaatcacaaggatgaaatgcatagagatcaaactatatatgtatcactctttctctccatgtacatattgatgtgttcatatataatatttttcatgtgaataacaatatacatgtgagactaatgttttgtttgagccatatcttgtttagtctctttacattgataacatggagatgatgaaggtatatttttattttaatgcctacttgataaattccttctattcttgtataggataagcatcaatcatttgaagaatatatggtaaaacggtatcggcattggcgtccctcaagacaatgaaagaaagatgaaaaaaatacattcctaatggtataattatcttcttatttacatttgagtttaggaatgccgtactattaagagggatgcaacgtcgaggtgtttgtgtatgtctcggtgctcaaagtgacctatcatagtgctaccttgagagaaacccaagctttaacctatcttttgagtagttttagaccttgtttttggttgagttgggtagtcctttgagtgagctttccatagagtccaagttcattaaaaatagactcccgagcgaaaagttatagttgttttactctgtgcttttcggaaactccaaaaaattttcggatttatccgaaaattttcggacattccggaagtggctgcgaatctgagatttgcttctgtaagttatcggacttgtccgaaaatgcttttcggaaactccgaaaattacagtcttggcctccaacggctagtttttgaggggctcgggtatataaacttctccacccctcctttgagtggctgctgctcttgggaagtattagacacatccaaagccaaatagccatccccatttcccatcctttgtggtgcctctttgtgagggggatttgagaagggaaaagagttgggttaagagagtgaggagttgagagctagtgagcttcactccatcctttgtggtgcctctttgtgagagggatttgagaaggggaaagagttgggttgagtgattga

SEQ ID NO: 34399 - DNA, 1930 bp, Oryza sativa
ctaattccttgactctggagtatgttaaatcctaagtctggccttagttgcttgtacctaaagtatttaaccctggatttatatcttggaggcattgtctagagtttatatcttgaaggcatcctaagacaacgatctctgtgaaggcaactaaggccaaagcaatatcctaagacaactaaggcctaagcaacatcccaagacaacgatgccttcaagatgtacatcctaaggcaactaaggccaaaggaacatcctaagacaacacatgaatgaacatcttgaaggcattgtctagagtttatagaattttaatgaaaatctatagtctaatcttagttgattcgagcatgatgtgtcattcactttttattaggcgttgttttagggggcgtttatggttatttcaagaatgttgcatttatggttgtatatcgcagcggcatgattttcgtatagttgggtcgttctttttttttcttatgtaataacgatatatttatgcatcttagctattaagagaccgtggatgattttagagtgattatctaatatcaataaagcttttttatctttaaaaaaatttttactaaaatcttgttctaaatattaatgttgtaccactggtaagtcgatcgaatcatttttctacgctcacgagaagtctcggtgctgacgcaggccacggtactcaatatgaaaggccactggtgcctggtggagtggaaaatgtggaattgcttatcctctctcacactaattaacaagatcatatcgaggattagttcgtgtcaaaagggagtctaaaaggatgatgctgacatagaatcactaacaaaaagctgctcctggttcgaatatatattgggggctttggttgggcccaaccacggcatgtccaacatatgcaaaagttcaccttttgatagcaacaggttatgtagccatgtaggtacacacagcaacagcagcagctagcaagttggcttcaaatttcggtctgcaaatgaatctagctacgtactaaccgatggtgatgcaacttaatttgattactttatgtactcattactgtcctaattagttgtacagatataaaattacatgcttgccttttattaaattacttggccctggatttttttttctagaaaggtatttaatttgtaaccatgtgatttcttcttgttcgaccattttacattgtacatcatctgtgttagaaaaaaaaccaacttcagcttatatctaaactcatagctagaagatggttttttctaagacgaagggtatattattttatctattccttaattacgtaccactaattaagttttatcacctgtttctaccgtataccattgcagaagttttttgttttcaaaatgttcaaaatcattcttggagacatggagggacagaactaattgatgaccccaatttatgttcctaaaaactatgaaaaaaaaatcttcctagccacctgctggcagagcatacaaactcatatgtaagtctcagaatttctgccaaattaaaaaaaaaagatcgtacaagaaatggttcctctttgatatgatgcacaattgatttttttttcttttttggatgttgtttgctcttgggaaagccattcctctttcgtaatgctcaagtgcagggggcctgggggattccatctcccactaggtagcaaaagcaatacatgcaatggttggctggtcgcattggtgcccaggtgggctagctaagcttgcatatatgcatgctggaccagcacaagagagatctagtgggagctcctttttaggtcagagccatacatatatatgcattttgcatccatccatctattcgttgtgcttgttacacatgcatatatatggtcctcttccatcctcctttttcacccaccaacgtagtcctacat

SEQ ID NO: 34400 - DNA, 1799 bp, Oryza sativa
aacaggtaagcccagtggatacccgtcggcatacccatgcccgacgggcatgggattttgcccgataggctttgcgggcatgagtcgggcacgggtacgtgggtctcgggccgggcatggttttgctctacccgtactcgacccgacccgttgccatccctaaatagaatgcatttagttaattgttcaaatcttaaatcgttaatagatgtaaaaatatcagaaaagttatactgtgaaattatatagtatagatttatcatgaattaaaactctttcatcaaatatatatagttatacggttagaaaagtaatgcggaaggagttttcatgataaatctactaataatatagttttacatatattaataaacggaccagtaactattttggcaggttgattaatatattgttaccatatgctatactgtcccgtttgtaaatcagtttaaacattggcccgatatagatgattatcatccgtgacggcaaggaacctgatacagataacttttcgtatcagtgacctttggttcatgatggtactctatccgacactgacgaggctttccgttcgttatagatgagttatcccagtggtagtgtttgtattgtccctgtttccccaaaaatcaataacgggattacgatgaatctcgattgagcaaaaagttgggaatggagggaacaatataaagttaaactaggtggagtagcgactagcgccggaacgcgcgcgtgctaaaaaaaaaatcaaatcatgcatgccctgcaggcgctccgatcgatccgcgcgcacaagcattggacatgatgacaagatgcccctactactgctgctaccacattctcttttccagccttcattctatcgatagtgagtggggaattcgagatctattccccttcaaatcaaatcaaatcaaatcatgtcaaatcggtcccttcaatacatattccacctttgttgcatacacctgcctgcttggctaccaatgatatgccaaaacagatgcatctaggcatctagcataagcccgtgcgtgcttaacgtatgaagtagaactagcttcgtaaccagaaatcaacttattggaatcgagcaaatccagtgaaggacagattatccgccctataaacagtctgatcgaacaatacgtggtctagaccatgttatgtagtcctccaatcataagatatagcaactagtaccgaatggaatgtatcatatagagtgcaaagataggatggtttcttaggttgtgttcttttcttagagcaagtttaatagtatagcccactactagctccaattcatttatagccaatttaatagccaattcatacaatagttgcttactatactattaatatatggtcccacctatcatacacacattgcatcttggagttcgcgctgcagctggctacagatctgtagcccgctgctcttctctctcatcttttatctcattaaaatatatttacagttggctaatatcctgctattgtacatgctcttaggattagggttaggaacccttaccccttgacacggataacaaagcaacgaattagctcatgattaattaagtacaccctccatcttagaataagttctttttcccctcccatttgtcccaaataagttattttttgcgtaatcatttattagagtttatgaaagcaggagataaatacattgggagtagattaagtgaagattaattgaatattgataaagtgagggtattctggtctttttgattttgtattggtatgcgtggaatgaataaaaa

SEQ ID NO: 34401 - DNA, 1010 bp, Oryza sativa
cagcaggatgggaggccggccagtggcggcccggcgcggggcggcggcctcaccctccccccatccagatccagctggaggggaggcggcgggatgggtggccagccaacggcaggatgggaggctggccggtggccgggtggcacacgacgatgtggattttgatttgtttgagtttttcttgattttttgatgatttgtggatgttgttgatttgtgaaagtatatgtgaatgtgtttgtgaatgtttctatgaataaatttgtgatgatgtgttgtgaatgaatttgtgattttgtgaatgaatttgtgatatctgtgctgtgaatcaatatgaaaggaggaaaaaaaagaagaaaaacgaaggaggaaaaaaataaaaaaaaccctaaagatggttgcgtctttagtcccgtaaagatgcatctttactcccaggtaccgggattaaaaatagcgatctttagttccgtattcttagtccctgtttgcaacccgggactaaaggggccgggttacaaaccggggttaaagagggtttctccagcagtgtcagaggacatggatccgattgttgggcgcggtctcctccatccccgtgcgccggtttccgcctatgaccgccaggcaccgcatcctccatcccctgagtgccagccaccggatctgtgattttttttgttgttgcaaccattgttgcattttttggggtgattttcgacacctatgacggactgacgggttcactgcttgatcctatttgagatgtatctcatgtctaatgagtggtatattcatttgtgacgagtactaattatcactagtcattggagtctcataccacttacaggtcttagcccgtcagagatgaggtggagtcatcactgaccactcatctctgacaagggcccctacccgtcagatatattggtttaggaccgtcagcggtaacatggactggcgtagtgtctgttgtaggagattctaggaggccaaaacaaccgtttttt

SEQ ID NO: 34402 - DNA, 609 bp, Oryza sativa
ccccagctgtttttatggaaaaactattttccacaaagacagcttgaatctgataacaaaccatgctgaatctgacaaatcctagcccccagccatgaagttggaaaagtaaatttccgattatacggcttggttaatatgcatccattgagcactcttacatgactaggttttacatggtcgttcggctcatagaatttgacaagaccttatctgctatgggcgtccccagctgaaattcccttaggtttctcggaggcttgtcagaacagcgtaaagggacgataggaccgacctcaagacgaaggcgatataagaaaaggagatcaacggaaaaatattgcacatataaacacttgcagaagttgacgtagatgatgagacaaccaccacactgagcaaagaccaggtgtatagttgtactcaacaaatcgcagaggtagtgggagaattgctacactgctagtcgaagaccagttgtagtcataactcgaccactagaaattgaggtgcgagaactgctacgctgctggtcgaggaccagccgtagtcgtatctcgaccattagaagtcgcggtgcgatgattgctacgttactggtagaagggc

SEQ ID NO: 34403 - DNA, 2280 bp, Oryza sativa
ccagtctgatgcgtactattcaaatgtactataagataccactacaaaacacttacgatcatataccattttacagtcagcaagaaaatcaaattctgcagatttatgtatggtgacaagcatgatcatcagtgcaaactttctgagcattcaggaaacttcacaagtaacagtttactgatgggacaagcatgatcatcagtgcagatttatgtacaatactatggtgacaagcatgataggacaagcaaaactacctagtcaatgccactgatgtgctcttgaccaaagggatttcctgcaaagaaacaggcaatgcaaaagatctaacacccaaggctctatatctagaaggcacatatagcataggcctatagttcctctccaatatgttatgaccccagcaattgtgtccctgcaaagaaatgaagagaatttctctaaggtttactataatagagcaaaaacaacattaaaataaatggagtcaaatactacctccgtccaaaatataaagatttttagagttggacacggatagtaagaaagtatgtagaattaaatgggagatgtttgtgattggttgagaaatggaggtaggtggaaaaatagaatggtgaatggttgtgattggttgggaaaaggatattggtgaagaagttgttatattttgggatggagggagtactatatactattggataacaaagaacaaatgacaaatacaaactgtagtgaatgatgcaaaagaaaaaaaaaaggaaacacagtacaactattaactgttatattattcgtgtaccaaatataggttcttctctatgactctatgtagtaataaaagaaatgctttgtgtccctatgcgcacaacactactcagcaatatctctatgtagtaataaaagaaatgctttgtgtccctatgcgcacaatactactcagcaatatgtgcataatacagattccccatttctcagtctatcgacagatggtaaacacttacaagttatgagatattcattatttcacttaattctcataccacaacatattgataaaagcatcttctcccactctcatgtgaatgcagcttgttagaccatttcaagaaaatgaattacactttattaactcaaacaaaaattaatgtatctacaaaatggtgagaacaagcacggcatttaattccttttatcacttcaattgcttagaattgacaggaaagactaacagtaacttgacaatcgttgtgtaaatattattagaatttcaaactaagtttcaaacagcaagatatctggatagtctaaagctgtcaaatacatctgtgaaagagaaatagatagcaaaataattctctgccatacatatgtacacactcctattctaaaataattatttgcttctgctacatgacaactactaacttttttctcaaaaaaaaatctactaacttgcacaatttcaagtaggaacaaatattaggtgcagaaaaaggtaaaacatatgtagacttacagtaaaacataacaaaagaaacatcactacacctctataaacagtgactgaaaaataatattatcttaacagtactgaaaggaagaaaccatacattagggaccgaagataatgaagttgatgtgagagaacttcggatatctgggttctaggaaaaataaacattcaggagtcaggacacagaaaataaaaacagattaataattaaagattaggagtgaacaatctgcaccctgaatttgttggtctggcagaaacggttggtagcagtcactccttggaatagctgggatgtcactccaacagccatctcaggcaggactcaaatgacacgtaaaataatcacatccactgaattaacttctatcagtgctgcctgagttataagtgcaacttcacttctctgacaaaaaaaacaatatgtaagaagtgtggtttgcaacgggcttaagattaatttgaaatattttttagaacatcaagtttcctgtttcttaattaagtatgaaggagtccatattactccccagtccccacccccacccccgagaaatgttctgccatcgtggtcattgatgtggctgctaacatttgcattcactcagaatttgttacataaaatattcttcctcatatgttcagggtactagtattgccaaaatattaagttttagcatgacaacatggtgcccgaatcaaataaatcaaggtaatgaagatacttttatgcatgaccagacactggaggctccacataccct

SEQ ID NO: 34404 - DNA, 699 bp, Oryza sativa
atgtgaaatataataggaagaagaaaaaatttggtttttgaggcatcgctgtgtaatcctataatttatgagtgaattattgaaaacaaaaggatccaggtccagtcctatctcctccattgtgaccccgtcccaaacatcaacacacaatccagctaaaaaaaagaggcaagacccttgccgaacccttcggccgctctcattccttcctcgctgaagctggtcgtcgaggcgaaggccgaggcagatgtggcagggaagaaactagaggtggtggtaaccagcgggacttagggtgcccggcggccagatggggcggtgatgttctctaggtggtgggaggaaacggcgccgtcgacgggaatctatgacggcttcattcgggagcccttctccctccaaatctgcctgcgtgaccttggcgaagcaagagctgatggtgggctcgactccgatggccccgctgaggatgagaagatgccgacggagctcgatggagactgaagatagccggaggtcggcggcatcctgaagacaatatggatggtggtcgtgcattagatccagcggtggagcaagggggcccgcacccatcgtctcctatactcaacaccaacggcgccgcccatgctctgcaacctggctcctctccagcaaaccagccaccgaaatccttcccccctctgatggctcttggct

SEQ ID NO: 34405 - DNA, 816 bp, Oryza sativa
acatatacgagattagcagtatttatgataaatgaaagcatccacaaccaaacttctaatcatgctagaattgaagaatgtaaggtggttgtgattctcgtacaaggatgtggtactaattggacaggactctaaggattctttatgtgagcaggattcctgaggaattttgagagtgaaactttcatgctcattagtggagttttcatccgccagagttgatgtctcaaacttgtccatggcttgcaggttctccttctcaagagatgcatcgtgcaagaacaaggttgtttcttgacaaatgtcaagaacaatatttttatggccagagggacaaggttcaggctcgataggaggttgtgatggtggttctttggagtgcaattcaagggtctcgccagaatctttttgaatgaaacgaagatcatcatgctctagaatagattcaggggactcatgaagtagaaccgccattacttcctctatcggcgtattctcagggaggatgcccgtcaaggtataatcgctatgaggatcatccctgaatttaggagcgcaacccggagcttgaatttcttttgaatccggcgatggctctagggaggactctttagtcagacccggagatagtgaaggctcgggaaaagaaggttcctaccttcctgacacaaatgcttctggatggggtttaacacactgcctgacaaaggaggtattttctgatatgcaatcgagaatttccttgccttcggcgggagtttttttgcatgaatgaccctccagcagttatgtcaaggtagaatgcagactccctat

SEQ ID NO: 34406 - DNA, 599 bp, Oryza sativa
ggaatctaggttaatctcaaggtcctcggtcgagaatatcaagtcgttcatttgcattgaagttggcggctactgtcagggttatggataccacatatctgatagtagttgactaagcacggcggagcccaccacataccatgtcttatacggaatcatacctagtatatagaaggagttacggataaggaaggatgattagagttctatatggaaatgacaatgactactctgattgtatccatattggtctccctagttctacttggacaagaaggcatctatgggtataaatacaagcccccctaggaggagaggggacacgccacaaagcaacaacaacaacagatcaacatagatcgatacaagccaacacacgccaagaaatgccactggatatcgacatcagagataagtctagacaaacctaatatggtgtctgcggaggctaaaaagagggatctagcgctatctctgatctcgctgagtgcggattcgaggaggaagactaccctgtcatcgactatgagttggttatctagccgctaagccgacgacagctagatgagttatcccaattattgtacttgtgtgattca

SEQ ID NO: 34407 - DNA, 1028 bp, Oryza sativa
agtcattaacgtgaacaatcttgaaggtaaatagatagttatttttatattgcaactctgcaaacatgcgtcttgtagcagatactcttcttttttaatctgagactgaatattaaatattcaatttttttgtctaaataattataatattattataatggtatttgatgatgacgattaggaacagtgtgtttattttcttctttctctatataaataattatatattatctaataacgatgacacggatataataaaaacgtctcaaaactcatttctacacatgagacgttccaaaacgtctcaatgttcttgtctaaacgatttaattttgtgctaacctgtaaaacgtcttaaactatgtcctcaactaataaagcgtctccaacatcgtccctatttcaattttacttataaaagagagatgacttttatagaatgacttaagtgaaacgtcttaaaacaatggttttgctgtagtgatacttacgtacaaagagccatggatcgagcggggcctaacaaatgtagctcacagtcatataacatctcaagacacatgcacgtacttagaagaaaaggatatggtatgactactatccgtccaaatccgatccgttttcacccctatccgtgggcacttggacttggatgaggggaacatgtgctagcacttctttttgtcaaaaaggtgcccaaatctacaaaatcaatattgagaggaaattaaacaattaatcacttgttgctacttattgattcatttgttattgtttatcaaattgaaaaatccataacgagtgcatgatatacctttatttctaaaccttttgccgatgatacttctaccactaggcatgccattcagactcaatggacttccgtgtccgcggctagcagcggcaacgtttgtaggctcgatcgttgaatgcaaaccggaaacacggccatgaccacacccatatccatcttgtccctgtcctggctgtccatctatatccatgtccttgttactccctgtgtttca

SEQ ID NO: 34408 - DNA, 706 bp, Oryza sativa
gtagaatttaaacatgatacatctggttccactggggcgccagggtcaatttttataaattttttcaccgatataatatttatgtaaatattaaaaatttaaaaaattccaacttctttggtcctttttccgtgccatgacttgaggctctgttgggttggcctttggtcgaaaggaagaccagggcatgtttcgtgcactctttcagtgtacgagatacagtaaaggtatcaacagtatcattctcccaatctccccttgttcggttctgtgatgtcatataatatgtttcctatatatcattagaacgagaaaaacaagatgatctacgcgtcaatgtttggagtcatttctgcctgtccgtaccgttgatgtagaacacgcaacaacaacaacaacaaaacaacagctggttaattttaatttacatcgtgtgacatcgacaaatgggccggttatctgaactctgatgaagcgaggaggtgtgaacggtgaaccggacagccacgatcgatatatgaaaaaaaatggtcggatcggattgtgacgtggttgtaacgaagcgagcccgcgtgccgtgtgctgcaaccggcgcgcgcccgcgcgtcgttttcgctggccacgcgatacccccggagctcacgctgtactacgtgcttccatgctggtgcaagccactgcctcagcaactacgagctcaaggcag

SEQ ID NO: 34409 - DNA, 752 bp, Oryza sativa
tcagctgtctgagggccagatcaaatctaatattgatcggctcgaggctcacaagattgagctcttggcacagcttgaagaatgcaacgccgagctggatatagaacacaaaaagctagccgacctcccaaagtctatcgaagagcagaaggcaagacttaaatcggctatcaagaatgttgctgatctgaccaagtctttgaaaatcatccctggaaccgatgctcaagacgcctaagccattgaagaagtagaacagattaggcaaagggctatatcggctatccagcactatttgtctcggtgactttttgtgcaatagatcttagaaatttttgtaatcggctaagatactctagtactttactgtcttgacaatcctttgtgccgactaatataacttctaaatttgctcaaaaatttgcaattttccgctcaaaaatttgcaattttcctgtatgtgcccccctaattttacaatgtcaaaacattgataaaattataaaaacaactaagggcgatataaccatatcggccattgtgcatcggcaaaccacaaccgattacaatatggaaacaactaagggtgatacaaccatatcggccattgtacatcggcaaaccacaaccgattacaatatagaaacaactaagggcgatataaccatatcagccatctcaaggcgatgtaaacacatcggctatcatgtatcagcaacatcagccgatcatgcattaacccaacacttggg

SEQ ID NO: 34410 - DNA, 574 bp, Oryza sativa
tctttactatgttttttatatctctcctattataaaaattaaaaatgtttttgtcagtacgtcatccgcgtatgagtcggttcttaaatccgtttgattttagaaatacaaatccgtatttgagtcagtttttaaattcgttcgcttttaaaaatacagaagaaatcgtacaagaaatctctttaaaaactcacatactactaacttgagacgttcggacacctaattgcagctcatgattttctaacaaaatatatatccaagcgaatttaacacagtgaatttcatcttaactcgatataataataagattaaaataatcttcacccattgcaacacacgtgtattttttctagtaaaattaaaaattttaaaaattctcatctggagcgttgctgggctcgcgcggcccacatacggcgcagatcgatcggggctgtggggcctgcgcgggagagagcgcatctagcgcgcgaggctataaaacacgccggattctgatctcaccgcccggcaagcacgaacacgatgacatcggatcgggtcggtttctctcttgctgtcttctcgatcg

SEQ ID NO: 34411 - DNA, 626 bp, Oryza sativa
tttagaataagtttttagagaaagggtttatttgtaaaataagttttaagaaagggtcgaaacataaaaaattcagcagcgtaaacagagaaagcgctggatgcatatgcccacacgcgcgcgccgatgcgtgcagtcgatagggcagcagcgctatccgtacgtacgttcaggttcagggaccctgcttactgcgcgcatgcatgatacagccgtccggaccaacacagcacgagccatggtcctgaaaggctgaaactgtgcaatgcagctgccatatagatgtgtcatgtatatatatgcggctgttaagctagctgtgcacgacgcgggcgcatatatacgtgactccacacggcatgtgacactgttcactggaagtatgtggtacgtttactgtgatgtggtcatggggctatagcttatgtaagctagctactatactatagctctctaccccgacggccgtgcatgcgtgttgccattagactcgcagatctggccatgctttgcgcgctacgatcgactactaggaacgtacgcgtacgcagtaatgcatgcacgacggggcacgcagtacaccaatccatatatccatccatgatgcgtgtgcatgcttatattga

SEQ ID NO: 34412 - DNA, 778 bp, Oryza sativa
cgcagtagtcgcagacagccacacctgtgaacacgcaggcagtagtagcgagcagagaaatcgatggatagtcaggagtaaggaagggatgaagcgcgccaccgaggaaggaaggaagcaaactgaccttgatttggttccagtatatggcgtcccagctgccggagccgtccatctccgccgacgacgtcggcggcgacggtggcgcccacggcttcgcggcgtcgcgggcgacagagagggagggagcgctccgtctcgtccggctcgtgtttggtttcggttgggtttgcttgtcgtgagagggaggcgacgcgaacaacacacgcgatcgcttttgttgtatgtagcatgtgcagcgcatgatggtactacaagttagcgtgaccgaatgaaatgatctcttgctacaagttttcctcctcctcgtgatgtgctatgcttccgtgtctttgacttgggttatatgtatgatcgaagaaccgttaatcacgcacatggctattattcatatatctgtcatttaagatagcgatacaaaatgtattagattcagcttatactatctactataagtttgggatattgtactaatacgagtagaggaggaaactcttcgagcgcactattgtacgctagtatgatctctttatatcttgttggctcaattgcctgagacattactgagattaccatacttttaaaagattgatcagtcccagtcgttaaatattgaccctgcttacagtttcttagtcacatactcatttgcagataa

SEQ ID NO: 34413 - DNA, 661 bp, Oryza sativa
ctggaaagaatttagattcccagttcccacgtcttcgcagtcttgacaaatggcaaatagacatgttcattattaggctgaatacattcaagttttactatcgtctacgttgttagactcaaagggttggtcccaaaaaaaatggatttctcttgtacactatatagaacaaggtttacatgcatagttcaaatggatgcatccttggagtgggatgatgctaggattagttatgtttttgctgttctggctggttgtatctctggaattatatcctagcttgcttatattttctgttgttgaactgtattggtagctggtaaccgataatggtttgtcagatttctatagaagctgggccaagtggccttctatctttaaaaatggattcatcctgtacataaagaacaaactacccaaacaagtataccactataacggtttattatgaatgaatactggatactatactttaatactcttttgagggaatgcgaatactaccacagaactactccatgtaagacaggcgctcattaacttctctctgcaacaacataccttatcattttctcacaatagatagaaatgcagcaatcacagtagtggacattattccacaagcgaaagcaggacttcaaccacagtatccatgcttggt

SEQ ID NO: 34414 - DNA, 562 bp, Oryza sativa
tccatgacaactaccgggtctggtgtacaagtgtcgtagcacacgtgcactcttcgacacgtgcactctacgacaaacatcgtgtcgggttgatttgggctatgcacaagtgtggtctatgacatatatcaggtccgacgtacaagtgtctactgaaccttctagtctactgtcttgatttgctctgaaggagattatcaactgcaaccttactatagtctactgtctgctatatgtgagcatgtctgctgtccgtcagttgtgtagtgtctgctatatgtgagcacacgtgctattcgtgaattgcatgtatgagtgctgcttgttgcaagttgccttttgtgctaaatgaagtatttggaccacaactatgaatgaaattatatttcgcatgctatctcttggcccttggcccttgttaaactttggtactcgatcatgatatctcaaaatgtatatatgccatctcctcccgcacatatgattttcaccactgaaaagcacacacgttcccagattgagcatgtatagcacactttgaataatggattaactatagcag

SEQ ID NO: 34415 - DNA, 791 bp, Oryza sativa
tatagctttataacttattgcttgagttctattatagttttcaacctcgccaattcatggatgagaattaggaaatcttgtcgtccgaaaaacaaaaaaattatcacatatatattaatcatgcacatgttcttattgataatcagaaccaaatattttagtatacatgcaacatcataacatccatatcataacaaatctgctgtaagcccaagtattagtgttctggtactgcagtttggaaaacatatatgtatatgacaagaagttaacaaaatgacttttgttcttaggaattctgtaaacttctggttgttccttcagaaggctagtttcataataaaaactactacctctgtgccataatacaactacttttgccatttcttgaggggattaaggttgaagagagaaatggttgtgattggttgagatgagggagtaggtgaagaaattaaaattgggatggttgtgattggttgaggtggggaagtaggcgactaggcggagaagtagtagtattttgggacaaatgtcaaatgccaaaggtagttgtaacattggatgaagggagtaccaagttcaaatcatagaaagtatcaatatacagccaattcataacagctcaaaagcctcttaaattttggccagtagacacggtatggatcaaaggattcatccactgaattaatgccaaggattatgtagcatttcaatatattagcacaactcatacatatatgagcacacaagtatgcagatgcacgtggttatgacagaatgatggagat

SEQ ID NO: 34416 - DNA, 587 bp, Oryza sativa
ttttgaattttaaaatttagtaaatgaatttaaaaatttgcttacgcaattatcacttcttccatagtataaacaaaatttcgacttcaccgttcctatacacttttttgtggtgcgtagatttcatagactgcagtgcattagtgccagacaccgtttagcacggaccattccatggcccatcctctgtgatgggccatgttattattactctatcctgccaaaattcccaaaatttgatgttgggataactgacgtcacatttgatgatggagtatatcttttgagatgaatagaatttgatctttggcaaataaaggccgaagtagtaccaatgtaccgtgcagttgagtgccgcgctgggtttttcttaccgtcggttactgcggtaaccgggtttatcgtcgtggacttgtggtcgtgtaatgaaaacaatctgatatactaccttcatcccaaaaatgtaataacttttaactataaatctggacaaaatgtttatatttgagacgaagggaatatctgctaagttaaaagcaattaaataaaaaaaactttcggtaaaatttctctggtttttcttggtt

SEQ ID NO: 34417 - DNA, 621 bp, Oryza sativa
gggcacgatgttcattagaaaatttccacgtttacaaagtaccttctcccaaaagtcattttatgtggtacctcaaagttacgatgaactctaacaaaatttgcctagaatataattatgtgagattgtattataaatattttattgcaatgaatgtaacggtgtgaattagatggtaaattagataagtattttaaagaaaaaatataagaaggaaaaacctacatacatgacctaacaaaaacactcaatcaaacattatcccatagcgcacatggctaccaatcaagcctcgtcttacaagactaaatattgtgtgtgtactactatttagattttgtgttaattgtagcatatgtatcaacttgcctgcagcccatttgtcgaatggttggttggcacgacacaacttttagacgggttacaccgcgacaaacgagggtgatgcgattgctcgcgtttgatcagttacgaagtgggatgcaaatgcaagcgataacgaaaagggagcatcgcttacgaaaatcgatcccaaccaatctgctgcgcgcgcgcgcgccgccaaggccactcgcaagtcgcaaaatcatataccttcatcggcgtacgtgagtgagctcg

SEQ ID NO: 34418 - DNA, 1819 bp, Oryza sativa
cttcctttgggattaaataaatacgatacctttataatactttcgggcgaaatgctacaatggtatatccgtgcgcttgtggatcctttctgtaaaccatatatataccaggaccatttctagcgtcattgctagacattcatatttctagtaatattgttaagaaataccaacaggtgttaacagcgaaatttggcaagatagactcggatttcgagttggaattgaaggggaatcaaagaagattggatctttccaaatatggattacgcatcggttgggcattgcatcggttggaaatagagttggagtctgatttagccgatttgacaagtagccgactagcctgacttgggctcggtttgggcctcgattgagatgaccgtcattgtcgtttagagatagagctcatttaaggcaattgtatctattaattaggatatttatatcggtttgagttagagatatggtaagagtccatggtatggacttgtttgtattttatctttaggaaagcttgagtcgtgtccataatggacaagttttgtactcggggtaaaaatataaaccccagaccattgtaataggggagacaatccaatcaatacaactttcagcgtatcgccacccttttcttttacttttcgacgagttcttatttcaagttggggcatcggctacgatctctcgacaacaaaatagttataacacaacaaatttaataaagcgaatgtaataatttaagtcaaaatacatttcgcaaattatgtttcaatatgctcaaggagagcgtgactgaccttagtcaacgaacagttttctgctgccacaaacgatggacctaaattgcgagatgggaacctctaaaatgatagcaactacaccaataacaaaacaagactaaaactctaagaaagaaatgatcacattacataaaaataacatttttgggccctttaagttataaaaaattaagcaatttaaacgggtcaatttggacctcgtatggccaagatacgaccatccaaaatttagctataatttaaatggagacttccaaattatttaatcattattgtactattaaattatgtgtaatacatcagcgctcgaggagagaaaggaccgagcaactgattgtcgagacccatgggtaaaacaggtagttcaccaaggactgggttccccgagatggtccatggtaaaagcagagataagaacattcttcgagtcggtgagggcgacgcaacttcatcgaacgacgtgctcaaaggaggggatggtgttcctgaggtcttgataaaccctgagctgcactcaatacactcacggctatgattggcctgatctttcggggagttgatgataactgtaatttgggagaacttactacaaccgtacgagacgctattgtgttgtgccttagcgatcgatacaccactccgtgggttgttgatcttgctggtgcaaatcaaccttatgactgcaagcaaatcaaataaacaagtaagaacaagataaaaaaaaaggtaatctgaattgctcataggaattgaatacacacaataacttgatatggaggcatgctcaaggaagagatcgacgaggcgtaattgacggcgacgacgatgcagcgggacaatgcttcggtgagtcgggaaaggttgccggaggaggaaggcgatggcatcaccactggtcactggcgagaacggttttctagcttgttttgggctcgacgaaggggagcctggggaacaggaggtggctgcaacaccaagggtggcagcgccggggtgctgcgtttcctccggtcgaa

SEQ ID NO: 34419 - DNA, 567 bp, Oryza sativa
ggcttaatgcatcgattagtataataataaacaaaaaagatacgtatagaggcggatgaggtcctagtatgggaagaagatttacatacttccaagagttccctcgggatgtgatccaaattacattggttaaaacaaaagaaagaaacggcaagacaacaatcttcctctttggtctccagctccgacacctactcccccgctcgaaggaggcaactttaacggttgcctccacaacagctacgcgcacaatggcttcactcggggacctcatcctgcacaacttccaagaaaaaggttcatgtcgcgggcgtgctacgatgccaggatatactcgaccaccttgaggacgccacctcatgtacatgagcaggcagcccgacaagccgttcttatggcggtcagctccatgatgcggtggctgattgagccaatgtccatggtagaacaacgcatgtgccctaggtaggcttagtgaagtgccaaagcatgacgcgtcgttttgcatcaagtactgaatcgacatgttcttcacaaaccacccaataatcaaagaccacgtctaat

SEQ ID NO: 34420 - DNA, 1413 bp, Oryza sativa
aggaattaagttgaatatatatagctatataattatatatatatttatcttgcgatcttgagtcttctgacattttccatccaagttgtaggtctgatgcatggcttatttcaagatgtagtttctggtttgcttactaataacatctcttcaggtattcattaattaggaactactatactttacctactggaaggaggatttgtttaaatctataaatttgtgctggttgcatcctcaacaataagttacactgatctctctgaaccaagtacttcctctagcagataatatatgaagttagattttttttttcaaggtccaatgcatggcttaaatcataattttatattagataaatattataagatctaataagtttatgagattacaacagtacttattggtgacggtcaaaatttgaaaaaaatcttattacaaatgttaaattaatatttgtgaccggtgggagcatgtatctatcttaattatgtgttttgggatgcttttattatatttttctgcataataaaatattttttgagctcttttcattctaatccccccctccccccccccaacctgtgtgtgctcctaaaaagattgttccctcttatgataagtaatactccattatttcaaaattaaactaacgtatgccatgtaaaggaaaatagagggattatatatacggttatgcttctaacttcacacaagtttataactatactagttaggcacttcgtagtagctcacacataattagacgggaagatcttggatgaattgtattgttatggctgtagatttgcatttaacatcgttttgcatattaaaaacccaactgttctgaatgttgggtaatttagagctcatctattataagctatgggcttaattatgacaagttggcatatattaagtatgaactattaaaacataaaaaaaaatctgtaagtgatagtctatactgaagtagaacaaaataattacaattttcaattttataaaattattaaaacaagaaaaatgatgtaattgggaccccaaaaccgcgtacaactacgtattattaacaatttttttattaaataatgccaactctataattgagtctccaaacacgaaacaattcaatttttattaatttcaaattttagactcctcgaagcccttgagagcaaaagagctgcacgttaactcctcacactacttaaaaaaccatttttccaaacggtcggttcctatttttgcgtgtggttgagccgctcatctgccctaaaatgtctgcaaaaatcgctattttttcatgcaggtggcgcaaccgcatgcggtaatttgattttcgcgtgtgggtgcttatgtcgtcctcacgcaaaaacaaaaaaccaaaaaaaaacaaaaatctcaaaa

SEQ ID NO: 34421 - DNA, 671 bp, Oryza sativa
ttaagggtttcacccattgttcccaagatatactgggcgcacggaaaacagaacggtccattagcgcatgattaattaattatttactaattttgttataaaaatggatcattatgatttttttaaagcaactttcgtatagaaacttttttaaaaaatacaccgtttagcagtttgaaaagcgtactcgtgaaaaagcgagaagtggtagttgggaacacaaggtttcgaacgcagcctcagatgcataaatactataaatatatccatcctcatttgaaaaaaagaagtagaaaatgaaatatgctcaagacttttggattgagcgagtactaatttgtctagcaacctctagaaataaactctctagagcaggtacaatagcaggctataagctagctataaccacataacaagaagaaaagagaagagagagaaaaaagagggctactaatttatagccagctgtaacacggaccccaagacgttatgtgtgtatgagaggtgggatcggatattaatggtgtagtatatttttatagttaactcttgtatgaataggctacttcctccgttttataatgtaagactttctagcatcactactaaaaaaagtatttttccaagcggccaaaagtgatttttgcaggtggggggttggaccgcctgta

SEQ ID NO: 34422 - DNA, 984 bp, Oryza sativa
ctgccatgccctgttttcagtaaatgaattaatcattatgagctaataaaaaaattctggagaaaataagaaattctgtagactgcctaaaaagattctgaaaattctgaataccacatagaaagttctaaaatttgcttgatttttgtaagctatttcatttttgagagctatgcattttactcacctcacattcaaaagaggaaacagacttgagtgaggactgacatgccctgttcggaatttatactagggcataaatcaattgctctctatatgttagcgtagaaaggtgcggtctacatttagatagtcctttgtactcatattgttgatttgttgtgctaatgatatgcacttctgcagtactgacttcaacttcttgtgatatttagtcctagatcatacatgtgcacaatgaggtacgacatacatctaataacttcagaaagttactgattaatctttaaccattagctccggtaatttcagtctggacatgtgcgtgatagtggatttgcatgccaaaattggttctgtaactcttgcagccttattttccttgcttgaaggctaactattcatagcgtggattagtgcccaatgcagagcactgccaataatgcatttctccctctcgcaggtaatggagctactaatagccttgcagtaatgtgcttttgttcttgcacttatggagaatttggatttttggaactcttagtttctgtttgtatgcaatgtaattagtcttcagtgtacttatcctagttgatcgtgctgatggatatgatgttaaaaatgagtaaatcaggtgttgcgaatgggtgaatgattggtctccattgacattttgattgacattttgttagcagctcaccttggaattataattatttttaggaaaatacacccacatttacgacaacttgtaagatgggtgtagtttagtcactcattttataaattgctcaaattaatcat

SEQ ID NO: 34423 - DNA, 506 bp, Oryza sativa
gatggtgatggcgaagagggatttcgccaggtggctcgccgcctgggcctcgccgaggtctgcaccagcgacgcctgcaccttggagtagtactcgatctgcttgtccaagctgatgcactgatcctgcattaatgtttaacacaagtaattaaaaccaattttcaactctaaaacaagttgaaaacaaattgactatatcactgtcgacagaaatatgtaaaccatttgtattatttttttaaaaaaaatgaactttatatatagtgcgttgacgactaacatgcatacatataatcctacgtcctggtaatgtatgagaaaagtttgttattgcaattacgtgtacgagttgaaactaattagaactaccttgtttgtagagttgaaaactccggggccacgtgaagcagagttgacgccattcacgtagttagcactgctgctttaccatatggcgaggttcggtggagatgtcgccaacccaaggttttcagctgcaatgca

SEQ ID NO: 34424 - DNA, 581 bp, Oryza sativa
cagcaccggtagcttggcctggggaactactagacgtgtgaatcggacggtgggccgtggggcggtgtgcttggacgaacaagcacgctggcccatatggcccaacgacgcagatctggaaggcccaacataagctggaatcctggaattttgatgggccacgaaccacgtttggaaaaagttcactgccggtctctcatctaaggttgagtttcgatcgagtctctcaaccgcgaaacaatgtactaacgcaatccttatctttaccgaacagaggaaatgtagtcccaacgaagacggtttcaacgtgccatattgatttgttctttatctaatgtggcgtctatgtgaaacttatacgataaaacaacaacaacaaaaaaaagtgggtcaacgtacatgtaatccatagagaagaaatatagtgtgcatatggcgggactatatatttaaagtggttttagaagatgaggggcactatccaaactcaaccgttatatgcggaagagtaaattgcactagcggtccttaaacttgtaacgaggtttcacttaggtcaacgaacttgcaaagcgcatatc

SEQ ID NO: 34425 - DNA, 685 bp, Oryza sativa
ttggatgtgttcctcttcctttgtaacttctcttaatgagatggcgtgcaattcttttgtgtattcaaggaaaaaataaattcattctgaattgaagatgcacaggaaaggaaagcaattaagttaatgtgaatcaaggaacacagtgcatttgaataaatttaagtattaagagtatatgtattggaacctcttaataattaccaaatgtttattgggttctgctcagcagtgttttctttgacaaaaagtttgtttttatacccacaatatataaattatgaagcttctgcaaaactctttagtattgagtaagctgttgcgaacagatagagcctcagccattattaaatgccctgtgcttatttgatcccgtgcatatatcaacataaggtgtttgtgttggtggtgtgttatatgtgatatttttacgagtaaatatgatcttcactagctgaaattcagttcaatctactgattaaagggtccatctttgggatcaaatttatgatttcttccggtttgaacattgtttttataaactcttgtagatggtactgtttggtcctcccacacttttagtgatttatgtcacagtgtgacctaactggccaaccaattacatcagaactggagggcattagtcgcgttcctccaccacccccatcaacaaccttcactgttg

SEQ ID NO: 34426 - DNA, 950 bp, Oryza sativa
gctaataaaccgaacgcccacccctactggttgccatgcttcttcccatcgctcgccacctttatccaccggcaaatgcacgcgccaccatctcgtgtagggccatcgtgagggagagagattgtagagagaaggggtgagggagggaaagaagagttggccactgacatctggggcccatgtgggtcctgtgctaattaagatgggttgaccgtagtcaactcgtcatgtcagctaaaaccaataactctattgcctaaggatctcgtgtacacctatattgcaagttgagagatgcgttatactttgtattatggtttcaaggacgcaatttaaactcgtcgttaagatgatggacctaaagtgaacttatttctttatgtgaagtgttgggtgtaattgggttgtaagttttgcgtctagtgtttttggcccaattaaagccaaacacggccaagactactttcgatatcgaagccgactgatacctattctgtcttgacaatactagcgtcgaccttcaggaggccgagaagaatggggattagagaggatagataagagaagatgggagaatcaccgacaggtgagcctcactttagtttttaatttctctaattattgggctatccattggactccatgtggccaaaaccattctaaaaccactgagagagtatagttttgcatatttaatagttggaggagtaaatatacccagttttatagttgaggaataacaatcggatctgatctttaaggagggagtataaatagcctttttcgaatcttgattacttgaatctgaatggaccaattaatcattaccagcgggctgacccacgcccatcccagattcccaggcccatataagtgtgacttttagcccaacaggagaaatgaatttcgggcttctgcgcctaaaaacgagagaaaaagaaaaacatatg

SEQ ID NO: 34427 - DNA, 615 bp, Oryza sativa
tagtctgtgtgactcgtgaaccccagaaaagatgaagcatatatatatatatatatatatatatatatatatatatatatatatatataggacactcatatggggcaccatggtgcccgggcaccatggtatctaatgcacaaaatcactcaaattttttaaaattttcaaattgtgagtatatacctagttataataatttgattcatacctatacttatcaacaaaacaagtcaaatttaactttatttcacaatacatgattacatacctaactaattatatgtatggatgctatatacctagaatcaaaatctaacaaaaacaagttcaaattcagttcaaacttgctttaaactagttagtaaagtagttaatgttaatacctaggtaattgaaaaagtttcatactcatttgaattgggtatatactcaatttcaacaatggtgcccgggcaccatggagcaccaaacaaatttactatatatatatatatatatatatatatatatataacacctttaatttgggaactgatccgacgaactcgacgaggtaggaagatcggagaggggacatatgcttgagcatgacacagtacatgaagtaaggaa

SEQ ID NO: 34428 - DNA, 540 bp, Oryza sativa
tacatataaattttcctattatcgtaacaactcattatcactattttaaaagctcgctaactaccaatacatgaaattgcgcataataaaataagcctaatatattattaatacactacttagctaagtgtttatgtctcacttatttccaaatccacatataaatattctaaaaatatcactaacgggtgaagccggtcatagccgtagagactttctttctctattaccttgaaaattgggtagttgtgtcccctcaagatcagcccgaagcacaattttaatgtctaatttactataaccctttcatagagtcctatgacacactgggcccactcaactcggccatttgtatgccacgttagagggtaaataacgggtccaccaatttaaatgaaaatcgatggtgagattatacagtaccatgtgatggcctaggagcacttatagcagcgtcatatggcgacttaggaatattaatagaaagtttaatgaacgtttagtatataatagtttttcttgctgcgaatagtagtaccg

SEQ ID NO: 34429 - DNA, 705 bp, Oryza sativa
ctatgaatttaatataaatttcttggagtaagtgcatagctaatttctgcatgagatttcaagtttaatagtatagccaactactagctccaaatcatctatagccaatttaatagcccattaatacaatagtttcctcacaaatatatactacaccaataatatatagtcctgtctcatacacacacaacgtttagaatccctgttacagttggctataaatctgttgcccgctttccttccttctcttctcttctctcctctatatgtgcttacagccgacttgtagcttgctattgtactcgctttgagagccaacactattcacttttctttatctttcccttccacataagtttatactagttggcttacggtaagtactataaaatatctttgtcggaggcgtagttggatatggctagaaaagagaatcgaggtggtccaaagttaaaaaaaagagagagtaaatttaactagtccaaagcgataatattgagaaagaagatgaaagaagatgaaagaaaaaggggattggagaaacaaataaaataaaatcatttggattagtatactagagatagtgtagatgtggtgtatcgtttatatcacctcttatcttacattacatatagaaaattagggattttttaagagtacctttgggtggatgttggctgtctatgagatgagatcgtacggagg

SEQ ID NO: 34430 - DNA, 692 bp, Oryza sativa
ctcaaatgtccacgaccttaaattacaaaatcggatatctcgacccccaaactcctaaaaccggtgcatttgactccctggaccgttttgggaggcggttttgctgatgtggcgccgtgcggtgcctacgtggcaatattgaccgagttttcggtccacgtagcgttgacgtagcacctacgtggcggtagaattaaaaaatatgcatgggacccattagtcattcacacaaaaagaaacatgggcccactaacatatgggacctatatcctcaagaactcatgtcgacgatactgtggggacgagggctactagttcctaccgcacgatcggaactgtggcatgctaaataggcgcggctcttacccccagatgggccaagtttgacaagtactccctccttcaaaaaaaaaaaaagacaaaccctgggtttgcgtgtccaactttgactgtccgtcttatatgaaatttttttataattcgtatttttattgttgttagatgataaaacatgattaacactttgtgcgtgacttgtctttttaatttttttcataatttttttaaataagacggacgtcaaatattgggcacgaaaattagggtttgtctttttttgggacggatggagtagtactgctgactttgttagtttgtgctttaatattagcaaaaaagtgtggtctgtggtg

SEQ ID NO: 34431 - DNA, 542 bp, Oryza sativa
ctctttgggccgaatctgacccaaagctcttactctttcagcccgtgcaaaagcgtccacttcttatacccctccactcttctcctgaaaaaaaatgcatactaggtcccttatttttacatcggattacaaagtcatccctcaacttagggtgtgtttagttcacgctaaaattggaagtttggttgaaattggagcgatgtaacagaaaagttggaagtttttatgtgcgtagaaaagttttgatgtgatggaaaagttggaatttttttttaaaaaaattacaactaaacacggtgttacaaaaccaagtcactctagatagttttgaccggttttatccgatatggcagctgagtcagcgtgagaccgatatggccagctaagtcagcgtgagacatgtaaaccccacgtgtgagagtaccctctctctcccttcctccttccccatctctctctctctcccacttttctcgtttcaagaaaatttcatctgggcaggccagccgaccgggcgatcgaggcgggagaggaggaggtcc

SEQ ID NO: 34432 - DNA, 638 bp, Oryza sativa
taaattttagccttagctttagcttattagggcaatgtttcaaaaaaaaagtatagtagagtgagtatatgcgtgtagacaatgcaaccgttatgtcaacatcacatatacattgagctatgatcactgaacatctctcatgcatgctaactaccagctcctaactgtctccaaactgccactggggattaatgtactactgtcttctactaaccacccggaagcctgccatgtgttttcagttgtttttttttttaattcagctatggaatatctatacaagacaaaaaaaaaattaaaatattctagtattgtttaaccttcagcttataagcaaccaaaatttagattttaaaacctaattttaaggtttattttgttatagtttattttccaactttggttttgaattaataaaaatacatataaaagttttcttcacacattattgtttagttttatcaataaaacgttacggcttataatcagtataaacaaaacgcgacgtactcttttaagtttcgtgtagaactcaaggctgaacagaacctagtttgtttggagacagagactgaagctcgcttatatacaagtcaaattaatgtagaaattaaacgtggcaaatagtagtaagtgat

SEQ ID NO: 34433 - DNA, 682 bp, Oryza sativa
aaaaaaacttaataattttaagagtataaatctatcagaattttatcttttttttcttcacatgtagatgaatttgaatattagactttacacatcctctctccgtcacataaaaaataaatctagtacgagatgtgacacaaattagtactataaatttgaccactgaaaaattattcgtgtgtttcaaaatatattggggctaaagaaaataaagttaagcatagcggacctgttggagggacctgctcacaccagataaagattgctcctttaaattcttttagcctctggatcgactggtgaagatgaggagctgagagatgcatacagtgtagacatttcatgtggcagaccaataatcaattatagttagttacttatagttagctagctagagaaacgacgaataaagctgcgcgcggccatgcatgatatgccatccggcgacttcgaattcgtactccacagcatcgcgaaaagagtcagcatcatatcagcagcaagaatgagctggatagatcgagctagttgacatatatgcatgtaagcatgcaggattaacctagccatgatcgatggtccatccaaattaaccgcgctgctactgtacatgcatatgatgcattgacatatgaatacggtgatctgttccatcctactgtaccaagatatatatagg

SEQ ID NO: 34434 - DNA, 654 bp, Oryza sativa
aaactgccgacagaagatataaaaagggtcactgtgtatgcacagcacaacaccaccatcggcatcgatgcaaagcttcgagtatacttatatcacgggcaggggcaggcaggttcctctctatccaccgtcggatccatgctaagcctcatccaccggcccaggtgctcccctcgctgggggcttggccgtccgatggcatccaacggcgcagatgtcgtcgtcggctgccgcccaaacgcagcagccacacccacatccactaaggctcggttggtctattccttctctccaatctggttgcaaaatgcagcaacttctttaaggcatttcctttaattttattcttacaaacgagttcacttacataccataccaacaaggaacgacaacacctccaagactatcagaacggaaaagaaataacgaaactctggctcgccagaaaacaaaatggatgaatggccagacctcgttcattataagaattagtttacaatagttttttctttgtgatacttccccagccatcttgctgcaacattcttgccaaaatttttacttaacatttactgctacacggcgcgtacaaaaaaaaagggtgatcaatcaagttatttttgatgttgcaaagaatagtctagctgcaaaact

SEQ ID NO: 34435 - DNA, 843 bp, Oryza sativa
tagttgctttaactttcagttcattatgcaacaaatggcatgcgtatgatttatttagttatatacttgacagtagcagctggttttagtagtacttgttaagtttcgccgcaattagcatggcttttcagacagtacaagctactataataatcggcccaggttgatgcttgccaggtaatgcataaactttatgtcaaaggagattaattagcatatgcttttaatttaacagaatatggaatcacaatcatagtcctaagttcttcatttcttgcaacaagagtcactaagatgcttagatccaaagttgggttgatatttttcagtcacatgtcgcaaaacttttgtttatgtaaatcctaaccttgtaaaagcggcatggaaactctagaacaatggtggcggtgaagtgaaaaggaggaacaggaagttgcctgcaaaattttgtaaagctagcatgacaatgacaaagtaggagcagaaaaggcaagaaccaaattcctattctctgcagttccaggcttccattctattccagtctttttagctgagttgctgtacttttatgattctaagctagcacactactgcacaaagaataggacatattcagttctgttttttttcggagagaccaaacaagactctacttcggctctgcatcacccaagcatgtaactttagagcgtggaagctgctggtaggtttcatcaaagttatagtagaataattttcatcttgtttccaacaaatgccatgttcctgaacgttcctttcacttcaacgatcgaagtagtaatataagcaatcaaattgggatcaatcaagagcaaagtcttc

SEQ ID NO: 34436 - DNA, 697 bp, Oryza sativa
ccctctgaagaccacatcatgctgatggttccaaagacgccagaagcaccgctggtagaaagctttgtactctacaactggaatgatcgccggaggttgtagctgccccataagtagtgtcgaagtgacagagggcttgaacctgattgcagtcttagatttaacaccgatacttatattcatagctaattatttttaaatgataggcatgtgatgtacctgttgactatcgacatcaaaacacctgcagtgacgaaacaatgaattcatcatagggtgtgcgtgtgtatattcatataatcatataaaaaatagcttcgttaatctcaaaacatgttgggtccaatctcaacaagatactcatgtggtaatgatgtgcatgtgtgcattcgtagaaaaaaaatgactatcaatcttaaaatatgttggtccaaactctcaaaaatactattctttcaaaaaaaaaactaatgggataaggtgtatatgtgtgagttcataagaaagaaatgacatcactaatatcaagatataatggaccagactcttagaggtgttcataagtatatgtgtgtgtgtgtttatatagaaaaaaaaaaggtcatctgtaccgtgttttgggggaaaaaaaaggaagaggtgatgagaagatcggaaacgcagcagcgagcaagaatgagaaagcaactcaatgata

SEQ ID NO: 34437 - DNA, 640 bp, Oryza sativa
taagaggatttgaatagtcaactctgtccaattccagcaatactactgctgggctggggtcctggggacttacagcaaggataatagtagagctcactacccactattaactcatcttaaagccaacatatataataaattagctataaggttggctacaatctttttctcctctctctatctctcaagccattttcaacccaatgactaggatggtgtccatagcattaaataagctgccacctaggatgaaaaatgatgtggcaagtgaataaatgaggaaagaggaggaaaccatgtcttgcatgagacatggtttctacacaacatccaaaacatcatatgtgataagtagcattaaatttaagtatgtaatagtggtatttgtattggaagagtattgtctagtactagtttcttgatgatgtagagtttatagaaactatgcctagtgtcttgggttgggaatggcctcacttatacatttaatatatttgtcttagagcttgtatgaagctagctcttatatgagagccaacactcttgattttttttgttatctctctcctccacataagtctatagtatgcttatagctcactataatacttgctcttaggctgtgttcggtataggaatt

SEQ ID NO: 34438 - DNA, 769 bp, Oryza sativa
cgtgactctaacatagttatttatatacttatcgctcacatgatttcaaacaaactcctaccatttgtttctcatgtacttcctccgttccataatataaggcacaactacttttttttatgttccataatataaggcatgcatgcatgcatacaattaattaggacctcttctccattaaattattgcttttttaagtcctccaccctcaagatctctaattctattggatgcatgcattatatttattagggtgatccaaactatgagatgataataattatttcttgatctttgggttaagggtggttgtgccttatattttggaacggatggagtataaagcattacttgagtctgttcaggtttgggttataaggcataagtattctatgaaacctcacacattttaggctgaaaatgcacgtgtggccatggattatgaactagaatgctattatttttcatgttttacattgttgagcatcttaatttagtatcatatatattcaccagttgattattttagcatactttttggaacagttgtttttgttttttcccatgtgatcatgccagtcatatgttaatctatggaaacctggccattgtgcatccatatgtgctcatatcactcagttgattcattgtgcaattcaagttggttgacatatttcctgcccattgacttatttatatcagctggcaagacatgacaatgatgctcgatcaaaagcgctggaagaagattcttgagaagaagcaacag

SEQ ID NO: 34439 - DNA, 708 bp, Oryza sativa
caattaaaagaaatatataagtctttatgcatacaaatacaaataagcctcagacgcttatacataattaacaaaaattgtcagatagaagatataactgcaactatgtaatgaaagatataaattaaagaatttgtcaaagtatagctagaatctgaattctttggtgatcactaaaaataaacactaggcactgctcttgttcacatatgtttgctcactcaacttaatttaagaacagaaatcacaaaatagttttagttttcagtaattcagtttgagggaaactgggaccgagaggaaattgcaaatatgaataagtggatgatatatagcaattgtgcgctttgtgcttgttgagcaaggccctgttctattcttcaactccaaactctaacttactcatttttcatatatagcacgtttttcaaactgttaaatggtgtgtttttaaaaaaaaatctatataaaagttattataaaagcaaataaatttatttcttaaatttataatagttaatacttaattaattaattaatcagctctcccgcttgtgaatacatcatccttctggccatcatcggcgctaccccaaaacccgtgtcggcactcaacagttcagcacgcgcgctcacacatgtactcctacttgttgctactccaggcttccgttccaaaatataaaagattttgggtagatatgataa

SEQ ID NO: 34440 - DNA, 860 bp, Oryza sativa
actctgagatacacaaccggatactagtattcatattcatgttcgcatatctgaaaaacgaaaacgtgaaccatttcaattctcactgccatgtttggctcgaatctctcgacttgatctgcacgttcatgctcattcaggatgcaggaggaggaagcaaagcatcctgtgcaacacggcaacgccggatccgtgcaaaaccaaacaaaaagcatccatccatccatccatccatggcagatttggcaggcctgcacagagcagagcagtaaaaaagaaaggagagtgcagtcaaaagctctcctctcctttcctgaacgggaaggcacagaaggcgtaggacagtcggaaggccaccacatctgcatgccattctcgtcattctcattctccctccaccgtggggcccacccatcacccctaacctaaccgccgtcgattcagggaggtggacggccaggatggaggcggcgcctcccacgacgcgcgtggtgcaggttcagagcagcagcagcagcaggtgtggcctccacattattaattcctcctctcctctcctctccttcctataagagagaggaggtggaagaaagcaaagcttagagagggagagagagacgacgtgctcatcgatctggttttggttggaaggaggcgcttcaggtcgttgctctccatctctctctgtgtgtgtatcctcttgttgttgttgttgttggtttcttggatcttgccagagaatcttgcttcgtttttgctttcacgcggatggtggtggattatctcctccctcgtcgtcgccgtttttttctttctgggtgaatttgtttctgcgttgcacgcgtatgatatagctatag

SEQ ID NO: 34441 - DNA, 748 bp, Oryza sativa
tgagatcattcatcaaacacagtttcctcacttgaatctgatcgctgtgccaaatgttgcgataaaactacatgtccgtgcacaggttattaataatggtacgtctttatgtttgatgttaggaaagacttctatagtagaaagatacttaacctacacctgtaacaggatcacagaaagcatgcttggtaattcttcaggctcccagtgacctaactagcaacacaaattcacaatagacaaaaaaataataatctccaagccactccagatatgaaattttggtattataataatctccaagccactccagatatgaaattttggtattataacaaactataatgtgacaacatatccctgatataaaaaagtgtaacctttaggtcagttaacaggtcatcacttcgttttaaaaatgtgacacatcatacgacaccatatgaccataatagtccatcaagcagtaatacagtccaaagtgcatgcaggaaaagattttgatacattgggcaatacttcttaacaaacagttaatacagctgcttccaagtaaattttaataaaaaggtaataagttgcaacagaacgataaagaaaacgaaataacaggtaacaaaaagaataaccgatcatcttaaactacatgacatcttccatgtcccaacttaagccttaccttccacttgtgtaagggcatacaagcatgcatacaacacatcccctagactacaaaaagaaatgcact

SEQ ID NO: 34442 - DNA, 672 bp, Oryza sativa
agcccatatgtccacataggagaaaaccccggaaaaaggagtcgaagcacctctcttcacagtgcgggcacgcgtagtgtagctttaggtggaccccatcaattattttcctgaggccgaccccaccacgacgtttctcttcatcttcccggatcaatctctcctgcaccaaaccaacctccgctccttcccctctctctcttcctctccctccctgaactggcacatgacatcaactcccctccccctactctcctcgtcagggtggaatttgtggacgtgggtgcctccctccccttaccgtgacggacacttggtgacgacgaacttggcgctcccggtggctcaaatcgagagctggcgtgggcggcgaggtcccggtggctcggatcaaggggcggcgcggccaacgagctccaggcggctcagatcaagaggcgcggccaacgagctttccggccccacgccgcttttcctccgccgcaccatttctccctcctccccatccgacggcgcatcgatgcagacagagctggacgggagcaatgattctagcgcgggaacaaagatgcagagcgagggagcagaggattgaagctacgacctccacagcgcaacgcgaggtgattccctgtgtcacgcgtcctcctttcgacgagaaaactcattgcc

SEQ ID NO: 34443 - DNA, 549 bp, Oryza sativa
aaaacagtagatcaaaattaagaagaaaaagtgctttcttgatcaaaatcaataaaacaggagttctgggctagctagttgctaccaaccatgatcagccccactgtcttcttcattgtcaaatcttcgtgctgaagccaagggtggagctcggaggacgtaggagatatgctaccggcgtgaaggctgacatcagtatacaaaggtcaaagggggcaagcgctctggatttttcacaatttggtcctttcaaaaaatcatttcgcaaatagatacctgaaaatacttatcccaaaaatggtcctttttgagcgccagagtcgctggcgccgtcctcctaccaccgtggcaggtcggcgctgaggtggcagggggagcgtgccaatgtggctgccccccccggcccccgcattttttttatttttcttttattattttgatattttttcatggttaggaatataccagaaccaaccatagaaaaaatgaactcaaatggacgaaatacgtgacttgtagaatttttcctctctagtgtagatgagagag

SEQ ID NO: 34444 - DNA, 522 bp, Oryza sativa
tgaacatctatatagatatttgagatttataattttcattcaacgaatgcctaagattcttaagccagtaggagcatgcttgggagttgggtaacccaactataccagtgaaataatagccccccattactgaacatccacggctagatcagtggagtaaggtgcattactgatccaaaaaatgggtattgtcgtattgagcattgcatcagacattgaatttcagattgaaacatcaatttggaactacaaaaattgataaatcgattataaattcgtagcattgatcatcaaaatctcggaatagaatatcaaattgaggtggaagtagcagcctctttacaagaattcaagagcacataaggcaactatgtcaacaagagctcgataatttgtgcagacaatctgatgaacaaagcttgaaatccctagattttaataaaacgtaacacgtcggcttagctgtccatgaatcacacttgagcacacaagaaaaacaaatcgcaagatgcttcaacctac

SEQ ID NO: 34445 - DNA, 1440 bp, Oryza sativa
ccccctcggggggactaagaggagggcgaacgcatcaccctcgggcccgacgtccctcgggggtaccaggccacgtgtgcgattgtgtctgcctcaaacctctagtcatgatactcctgatcccatgtcaccgacaatattaatttctctcatcagctgattgatcgatggttctgaatttcctttttgatcgatcaatattgttaatattttctctcaaagtttttcataactattcgagtgacatacaaacaatgagagaggacatttcttcgaaagtttaaaatattttccctatttcttcagacaaccaaacaggtcgatcgtcctacataaactctcgatcgctagtcgctatgcatttcttcagagtatattcgatcgagcagggaggagccgtacgataaggggcaaggagagatcgataggagggtaggaagcatgcatgtaccggacttgcttgcacgtggggagaagaaggccacgtacgtaccacacgcgcgtacgcacgtacgcacgaatataattaatgtagtaatgtataatcacacatacaattaattaagcaggggcccgtacgtacgtgtgctcctccttaatctgcatctcctatatatgcatgtctccttcttcttcgatcgaattagctacgtactgctggtagcttaattagctaactgcttaattgtcctgatcaatcgaattgcagtcgttatgcagcttctctctttctccaagctagcttacaccattggccggctccaaccttacttacttcctttgacccaatgcaagtcgatttctgcatgcacgggcgcgtgtgtacagatgctgcgtactacagcttcaatattcagtggccgaaaagaagaaatatgtacatggagagtgaaagttagctactagtagttggtaggtactgtatgcgtattcatgcgtggtcacttattccttccaaactcaacgacccaattaaggacgacgcatggccgattcagaaaatcgatttgttggtgttaaagtgtgtctatcgttgttataatatgttaattatacttagattatgatgttataatatatagataaacaattttgctatagattttatcaggggcggaggcaggcctagtgcagctagggcttgagccctaggcctgcctccaaaaacttgcttaaattttgttgattcaccatgtaatttttttagaaaactaatactccattaatcgagccctaacttagctctagtcttacactggtggagaaaccatctttggtcggttggccaaattccacaatagtcccagttctaataaaaaccgggactaaaaagcatctttagtcccggttgaaaagttgaggtgtacttttttatctttaatcccggttggtgtgttaccaaccgggactaaagatcatttttagtcccggttcaaaaag

SEQ ID NO: 34446 - DNA, 619 bp, Oryza sativa
ggaatgccctggtccgtcgcgacttctccgtggcttaccgttggggtgggcaaggaagaccgcggcccggcggttggagacggcgagcgggcgcgagggaggcgactggaggtcgaagagcgggagcggcgaggaggtggtagggaggagggggatggggtccccggcgaggcggaagacgaagtcggtggtgccgtcctcctcgccctcgacctcgtcggagaggtccagctcccgcggcggcgccatggccccccaccggtggtcggaggagcctagggttttgggcgggaagcgggacggagacggcgcggcggcgagggagcaatagcaaatggggtttcgtgaagcgagagcgctagtagcggaggccttggcgtggagtgtaagcagagcccagcagcgtggccggcgggcgggcgcacgcggcggaggggagagggagaggcggaggcggccgcttcgcttgccggcggtgatggtggtggcgctgaatacatgggctcttgtcgttgccccgtgggcttaattgggccttctactgggccgtcacatatattaatttggacttctttttattgggcttgaccttgacggtgagtaagaacagaaggcgcat

SEQ ID NO: 34447 - DNA, 672 bp, Oryza sativa
tgattcgattgggatgcatggtttgttgatttcgttgagttgagttcttttcttgatgtacttgcaatggggtagaaggctagatttgcctggccagcgtcagttgtcgagattggtttggcttaggacattgtcggagatatgggcccgagggtatgcaaagtgaggggaagttaccttcacatccagccgcgtggctctacagcctggccctacccccgcacctcgcgagtcacagaggcggccggggggcctcggggtgccacgtcatgcccctcaggccctcgcgctgcccctccccgaggccctcgcccaactaccatgtggtggggggagcaagcggggaggagacccaggctgaacggccatcaatgcgcggcgccccaactgtccctcaccgcgtttaatgcggtaagggcggacgtgcggtgccgcctgactgacccacgtcaatcgggtgtgaccagtctgtgaccggcctgttgtcggccacgtccgattggacgggtggccgtgcccccacgtcgcctctgtatccggcggagtggaggtaggtatgtcccgtcccattggggcgtcatccggggttccctccacgcgaggaggactgccacaagtcttcactcatttaagagggaatgatagggctgtcccccgtggcaagcggggggc

SEQ ID NO: 34448 - DNA, 742 bp, Oryza sativa
gatctcttaaacccaaaaaaaaaaaaacatcttcactctagatcataaagccaaaatgaattcatgtaataaattctatgcaaaggttattttatgatgtgctggagttaagaccacaatcttgatagttgcagttgtgaacatacacgcaggtatgcctagagttgggagcatgtggaacaatgaccacattaacatagaaacagtctgttagctaagtcacaacacacatgaaatctttcttagagaactaaaaggacataaatatcttatctgagtacatccagttctatggtcaataaaacacaaaatttagaattttcaggcaacggtgtcattacaacttttcttaattaccataactgccaacattaaaaaaatagtcatatccaaatttctatcttacaatttgcatttccccccagggtcagggcgaccttgtttaactcatttcaccctttttgtaccataagagcttgtgacttggaggcaaattcgaatgtcgaatatgggttgtctccactttgaaatatcatattgttatagtggctttcaagattttttatagttttgtttcaattcttcacatatttaggcactcagtagagaataagagggataaattatatgtcttaacagtttaacacttgcgctaatggtagaagaaaaatcataaggttccgtaagcaactattgcaatacatgcaactgaaaaggaaagactatataggccacaatgtca

SEQ ID NO: 34449 - DNA, 533 bp, Oryza sativa
taaaaatcaactaaattaaaaatacattgtttaaatcattttagaaattattttaaaagcctacaagctaaaccctaattatctaggaaaattttcaacataaaattgagctagataaaattttattaaatacttgcttgttcctctattttctagaattttctgggaattgtttgagcaagggaagtatttttaataaatgaaacaacatttcacaaattatttttaagtaaaaagttccaaaactcctccctgaagccgttgggccattttggcccaacatccctcccacatcccgtggccgagccggcccatccggcccaacccgccaccaccgcccctccctcgcgtggaggccgacaggtggggcccacctgtcggtggtgtctcctacctccggccggctgcaagccgagcccgagccggccgagccgccgacttctgcctccgtttccgccccgatctctccacccctagtccggatttttgaggggtttttatccccacatcttcctctatctttcccctcaaga

SEQ ID NO: 34450 - DNA, 662 bp, Oryza sativa
ttgtcatgctgttttactgtattatcctgaagaaaaatctattttgttattttttaccttcaactagtcctctggtttggttgtgaaaatatgaaatgtgcttttgtcttactaagaatcaacttatgactttatacgtgtgctacaagggacatgtttaacactaatgaaatcagacttcatatgacctaaaccgtaaatattagtgacaatctgagagaaaaaggtcatctgttagtattggagcttaggtcagtaacggaagctcttcaatttgcctcttgataggttcttcaactgaggtgtttcagattattgtagaagaagttccaaagttttaagactctgaattagcgtatgaaattatgcgagtttttagtggcttctggtcaacaagaatatcagtatcagctcacggatcataaaataaatgcttagacaaactgactataaatggtaaatgagattacaatgtgatattctttgttatactaagtgaagcatgaaaattcaccagggtccttaaatcagtttatgtatagagacagtctataatctgacatttagcatgttatttgaccagtaccaggagcctctagtggtgtaacttgcaaggcgtgtgaaaattctctatgtcggattatatgcttatgatcgtcctt

SEQ ID NO: 34451 - DNA, 592 bp, Oryza sativa
  unsure (1)..(592): unsure at all n locations
ccacattgcctgcagccccacttcggatgtccgacgcgtggataatataccaatccaacagcttgccttgtttggcactatccaacaaggctgcacatggcatgccttggcccggctcccaaaaggggattgtgcagatgtggaacgggacgactcgccttcaggcatgaccaaatcgctagcgactacntgggtggtgactacaaccaccatgaaaagagaaacctttgtggacaacgcagcagaagaagcacccggcgtcacaaggaagatggacatagcagaaaacgaggatctgtggtagaaaaaaacaaagatccatctgcgacgccagtggcaccaccatcgtaggagtgcgaccaccttggtcatgggagaacatgctgaagtggccactgcccatgtcccaaacggcgtacttcttggtgcgcgctgtggtgtcagcacccgtattgtgattgccaccactagcagcgcgtcccctttgagcccttctttcctgcttgtactagttatacaccatcatgttctcaatgtcactaagtactgatgatccatggatcaagatcatttccatcgcatgatatgatca

SEQ ID NO: 34452 - DNA, 623 bp, Oryza sativa
gtccctcccccccataaccctccccttgccctaccgtatgatgttctgtgcctgctacttgtgtggtgttgatgcgtgatttgcttagatctgaagccatgctgctaatccgcgcgaaaatttttgcccccggcgattctggtaggaatattttattgcttcgtgggaatcgcgtgctcccagttctataggagttgttaggttgttgtgctgggtgtatttgtttggaagagaacattagagaaatggccagtatattgaccttggagtgtatgctatctagattggaccatgcagtgttgttaccgattgatcaaggttgtcgttaggggttctaatccaaggcgctgttctgggaatgtgactaactgtcctctatagtgattaatatacaaagagacaaggggatgcctggcgcatttagatatgcatgtgcatttgtgcttcttcgttgagttattcgttacctaaatcagttaggatgctggcaattcatgcccaaatgatgattaccattaaaggatcagttttttgtcagttttgcaattgcaattccaacttctaaagctcattggttcattttgattctgcatcaccatttgtacaactgtggtatgatcctg

SEQ ID NO: 34453 - DNA, 780 bp, Oryza sativa
ttgttcagagatcttccaggatgatgctaggctgatattagatacaaattcaagaaactagctgctttcaaatatttgcatgtcaaaatggatccgatatttactcttgagtattccgaaccaaacaccaccctagcttgagatcgttggatcgagattgaactgttgaagttccactgctctcatcgtgatcattccacaaggattcaagtgccaattattgcttatctcatgactgctgcgaaaattagtctcgcggtgcagctatttacttgttggttaactgcctatatatctggtatgtgcataactgtcccatgggcaatttatttctttacttgttatattccaaaaactttgttagcaaatattttttttgcagctgctgttgacattgttcaacaaatatttgctctactttctgattagcatttaattttctcttgtccaggaagttgacttcagatggccctgctttccattttcttttaaaattcactttgcagaagcaaatggagggtaaatttgcaggtgagctaacttatatttcatgaaaagtgtatgattggaaaccatagaaactattccacttgttaccaattgcataagtggaacacatatttttgggtttcgtgctctcctttaaactcacagtggcatcttttatttcttttaatgtagaagtaacattataaattggattccttgcatctttgtttgagcatgagaacatatttacatgcatgtgtgcttattaaatttggagtcaatgcccttttt

SEQ ID NO: 34454 - DNA, 588 bp, Oryza sativa
agtcatcctcctcagacattcatgtataaggtccatgtcaggggtgcaatccctcttggcgatcaaaaccttccctttctgcgacatttttttaaaaagaaaaggtaaaggggaatagattctcatggccatgatgaacttccaagcctcctgttcatttcctggaacgaacctgtccagcgatgcattatgattactggcaatatattgcccggacactgatcatgcgcagttactactgttattgcatctttcccaggggaggttaagcagcaagcatgtgttcaaagatctcatcattttatgtcgaaaaagtcctgatcatttggaaaaaggaaaatcattgaaagaaactggccgccatacctggtctggtaaatgacgacggtacccgtttcttggtctctttgtaaagttgataataaccatatttttttttctaggggtaatctcttgtacagtatggttggtccacgcccgcctgctattctggtaaacctgtaggcacgctcacccgaccacagctctcgtgggtgagcaatgtgccggtgacataccataaaagaatagaagagagaccttcgcttg

SEQ ID NO: 34455 - DNA, 752 bp, Oryza sativa
tacctcaccgcctttccccaacatgtcgctcgtcgttgagagattgctcgattggcccagacggttcgccagcacccgcgtggaggcggccgctctgatcgacaccaagaacctcaccgcgcatctcatgtagatctcggcaataaccatcatgtcctgcgagggaagtaaggcagaggtccatgatagctccaccgccgatgcctattgtcggaagaagaccaggagaagggagaagaagatgagaagggagaagaagatgagggcaaaacaaacattttacatagtttttctctcatcaattgggtggatattgtatttttatgcgctcggtgtcctatggcaaattaccacgctttcgaagtgtcattaggaaaaaatcacattcttacgacgtctaccagcaaagataataagtttttaagtgtcatgtagcaaattttgcattttgattcaacaatatgtagtttacatgtttccactatatatatggtttgcaatatatattttgccagattatgaacttatgtgagacgtgtgtggtaccagtagtgtaattattgatgttctacttgttttcaaggatgagatatgtacctctagaatatatatttatggagttatgcgctttttgaggaccggagtctagttaattatatacatagtcaatgtttcatttagaatcttcaggctttctagttttacctttaggacctcgcaagagtaacattataggggaaaacactattatg

SEQ ID NO: 34456 - DNA, 661 bp, Oryza sativa
tccggaacaccagtgcactgctgcaataagaaattgatgggcatctggtggaaaatgttgtctaaaaatgacagttatttgctaaactaattgatgaaaacagcatttattccctcagaacctaaagtttagttctcagattatggcagtaaaacttttaaaacatctacttcctctgatccaagatataagatgtccttacgcagttgttccactagaagcagtggagtttgtcaagaggggagacaattgtagcggtcactaggtattaggtaataaggacagtttagaaagtaaatgcttaggaacggcaaagcaatagctatttgcagattgaaacttgggaagtaaagtcacaaagtttagtttggaccagaggtgggttttttcccccgcatgtttttttctaaaatttttaatagaggcttctttcattataaaatatccagcattatactccctccgtaccaaaaagagtgtcattttagcttttggatttgtcccacaaagagtgtctttttagctgtgttgtccactagacctcttaataccacttctttttcttctcgttttagccatccaaccattagtactcccttctcctcgttttctccccctcgtcgttctctctgcattaatggaggggcatggtagtcttttg

SEQ ID NO: 34457 - DNA, 581 bp, Oryza sativa
atgggatgggcatttggtctgaccgaaattttcggtctcggtcttcggtctttcaggcatttcggtctttgaaaagtgaagatcgaatttcaacgcagaaatgtcaggaccgacaaattcggtcttggtctcgatcctgactgaaattcagcaacattttcatatgtgcaaagaaataatggaaatttccaacacaaaaatcacaaaaaaaatcataagcacgtatgagtaaaaactcttattaggttgcatgcctagaagaagtagggatgtgaaaattagagtttgatcctattgaacttagtggattgtagattgcatttagacatttttttgttaatttagtctatttggttaaccgaggagactaaccgaattgaccgaacaaaattcggtctttcactacttaggaacgaaatgatgaccaaatttctcggtctcggtctcggtctttttctgcacacccctatccaggtatctgattatgggcgctcctccccaatcagtatagtacctagccattacaagttcatggccaccctgtcatcatctccttacgtgtctatgctacattgtagtcg

SEQ ID NO: 34458 - DNA, 3574 bp, Oryza sativa
aaagaaacaaaggggaaaacttgctgtaaggattaaaagcccaattaatgattagccgggccatgtcttgtagcaatctttcccaacaatatgactatgactaagataattgtgatagttaaccggtgtagcaagagttatatattttttgcctcacctagacacatagtgttaaccaacctgtagttacctgaattctttcgtatttaattagacactccttgccaaaacataatttaatgcagcttctaaaaattctaccacctgagttctttcgtattttatatcatgaaataatctcctagaataattcaatgatgttgtattgatgtagtctatctatatacttttccacgtattatttggttgaggtatagaagaactgagaaagcatatttagtgtgcattggaatatgcatgagtgtacaaatactcgtaaggttgacatttttttctttttaagctaaacatttaagaaacttttaatggtcaaaagtttcaaaaacctaaaaatcaaatactttttgaccggagggagtaaccaagtcagcgcatgccacgtctacctacctgaaagttcataattacaccctatgggttctagattaaatatacaagaacagaaaaaatgcaagatttgcgtccattttagcatataggtttgtgtttcctacctttggttattctcaataaatgcaaggttttcttcatattttgccacattttcttgtttaaatttcctacaccattcatcttagttttttcatcctacatagccaatcaacacctggggctcaacaccttggggcttcatgcatgtaaaagtaactttgatagtttacagcccctactactgcatcattttttccttttgctgaatgatatagtgtttattacctcttctttgtttgttccttagggtgaaacgtcgaacggtgaacaattggggaaaaaaatatagtaattgcttctttcaccaagacaacagtaatagcagccctcaatctgataatggcttgttcgtataattcgtctctgcttgaaaagctcctgctagatgctcctgagaaaatggagaaaagaaaagaaatgaagctataaatcctttggtacacatagttttcaaactggcagaatgtggaacaagaaaagagatacttacttacctggcaaagttgatttggcaatgtaatttacacttcgagaagagtacaaacaacgaacagtttgaaagatatcaaaacagaattggaaaccaattttttaaaacttttttttgtttttttcatcaataacaacagatagaaactaatatggatggaatggaactagtagacgagttgtttttcttttttttttggagtggttgctatagacaacggtctaaatgacaaacaacgaacagtttgaaagaacagtttgaaagatatcaaaacaggaccgagaaaccaattttttaaaaaactttttttgtttttttcatcaataacaacagatagaaactaatgtggatggaatggaactagtagacgagttccttttttttttttggagtggttgctatagacgagggtctaaatgacaaataacgaacagtttgaaagatatcaaaacaaaaccagaaaaccaattttttaaaactttttttggggttttttcatcaataactacagaaagaaactaatgtggatgtaatggaactaaactaatgtggatggaatggaactaatagatgagtttttttttcttttttttgtggagtggttgctatagacaagggtctaaatgaaggcttaagagaagaacgatgggttgcttgcagtgaaaatgaatggctagctaggaaggaatggaattgcaaagggagcctaccattgtagtagtctctcatatttgtagatgagcagggcatcaacagaacaggacattgtctaggtgacacaagcaaggaatgatattctaaagctaaaaagccagataatatgtcggaagcaacgaacctatggcctataatgctaaaagagataaagaaaaagaaaaggagaaaagaaacagaaggggtaacttgtcatgtgtatctaaagcccgtttaatgtgattaggcagggccatgtctctatagactacatcaatctttgtaagtgatcataagcagaataacagcaacggttaatcgggaggcaagagtttttttttccagctacctgagttttgtcatacaccttccgtttcttaatatttaaccagttttaatttttccatttaaactatgacactattagttacctttatatcgttaaaccaaagtgaacaaaagtttttatttatattagtacataccttactttaataacataacatcatttttagtacttgtgtgtgtgtaatatcaaagttcgaaaataaataatgcactgtgcacagggtgatcaattcttacgaaacagagataagagtagtatttaatttgacactccttaccaaaatgcgcttaagtgtaaaaagtacaatctcaagtgcaaggcttcggctataactgaaattatatatcatgaaagaattttcaaaactgttaataatgttatattgagtatctacataaatttttacctgtaaatttgtcgtgttttttcagaaaacattagttgtgttattatagatgaagcgttacatatttcagttttgccattgctaaattaccctcggtatatttcaatagtagaattagttttgacatttcggtagtgatgataatataaactaggtgattcttcgcgttttgttgctgaaattactaaataatttttaatattttttaataatcgagctaagagtaaaaagaaaaaattaatgaaaaaagaaaaaataatgaaataacaatcgagtagcagtaaaaagaaaaaaataatgaaataacaatcgagctaggagtaaaaaaataatgaaatctaggatttatcagtacttttcatgaaacatagtgaatgatgatgtgatatccttctttcttacgccagccaagtagcaatcagaaaaccaatcaattttccttacactacgacaattcacttgaactaccaacatcacgagtgactcatgccagtcgtatatgcgtcatttcttctcatccttgtctctaattgttaattactcgctacccgtagtaggccttgagtaggatttaagcatgagttccgaaccatctacttctccttatccttagggtgagtacaatagagcgatagcagcaggctatacaaatgccacgtcagttttgatgctgagctggcgaagtgaaagttggagagagagcgtacgcgagcgactaattagtcgccggcatctcgcgcgttccaggacacatccacattaatattagggtgtgtttggatcccagccattgaataccatagctacagtattttcgtcacgctacagtgttttctgaggcggacgaaacgtcgccatactcctgtggcgagccacgccgtggcgtggcattccaagccgccaaccaagcaaccccttagtcttttgcactctatacggctcacgccgacgtcctgatgctgct

SEQ ID NO: 34459 - DNA, 1223 bp, Oryza sativa
tttgaactttatcaagaggtttcgagaaatcccatagtaggattttacctgcagaaagaagtgtaatgcattagaacaatcataaaaataaattatatagtggtattttttttaaaaaaaaaccacaacacaataatttgaaaaatgcttcatgataataaatttgctgccatttataacataagttacatctttttttatttttagtatcacatacaaacaagaaatccaactacattaaacgtgatggattagttagctctttctctctctgtttttcttttctcctcccaagtctgaagcagcatggtaatgcatattactcactttgtcccagtaacattaaggatatctccttttaacttgttttatgtttgggcatacatcatacaagagtcagaacagggaataatattccaacctactcatccacaaatgcacaaacaaaaggtgctaacatttctttgattgctggacagttctctagttatttagcttatcctgcatacatctttgcgcactgaatgaattgcatattttcatgattgtccaaacctaaagagagccacatgctgcgagggttgattaagatgggcgaaataatgctgtaagatcagcagtgtgaattatagagtggacacagcaaatggtctttgcaagcatttcactatcatactaatctgtcaggtcaattttagattatggtaacaccagtaagagctttgatatattcaacacgtcttcctttttgttaaaacaaactcatatatagatcaaaatataataactctgccatcgtaattccttgtttccttaaagtttgttgtagacttcaaactgaacatttcatacatatgtacatactacccaaattattggttatttctatactcatcaatcacgccaaaaatgacatttgtagacttggattgaaccgagaaaattcaactcaaaatgctaactgatgttaggctgagttcggtacaccattttcccaacccacctctctcgttttccgcgcgcacgcttttcaaactactaaacggtgcatttttttcaaaaattttatatacaaaagttgttttaaaaattcatattgatgcattttgaaaaaaaaataactaatacttaattaatcacatgttaaaaggccgctccgttttacgtgcaggatgggtttccatcctgcacacctgaacacacccttagtatagaactgatgg

SEQ ID NO: 34460 - DNA, 607 bp, Oryza sativa
agagattcgtcgctacgctactcgtcgcgcgcgatcgaagagagcaacgggcaccatcttagcggtggtggtgggagctagcagccgatcgagtgccggcacgccgcgctatcgggtagtcagggtcaaacgaacacacaagggctataggataggataggagagggacacatcacgcactcgtcgcgcgtgcatggggccggtatagcgcgcgccgtgcctccgccgcagcgtggccgccgcgctccccgtagcaacagtggactagtagctcgctggtggagtggtggtgactggcgagtgacagccactggtgtgccgtgccggccagccgtgcagattgctcgccgagggaggcatgcactggcacgcgccacgtacgggcccaggcccagcgaccgcatatgctggtgtgtcaccacgggcttaaccaaccagagcagtataagcatgggtatgatacgtacagatccgtttatgatggttgcatttccccgggaggtaaaaaccgcggggttcatcggcgttgcctgcccagcgctacctttctcgcatagtcgtatgacgctgtgctgctcgcgtcagggctaaagataacgctggcagg

SEQ ID NO: 34461 - DNA, 1282 bp, Oryza sativa
attcctgcagcccagatacgacgaccagaaaaacaagtcatcctatagagccgtcatcctatagagccgagggtggtcgaccgacctagaacaagggccagcaatcaggctggtcaccaccttagccggagggcctttggaccccttggaagggtcagccaccaagttaaactaggccagccgaccacgtccaatgccttggccattaacctaatttcaccaagacaagcctagccggagggcctttggaccccttggaagggtcagccaccaagttaaactaggccggccgaccacgtccaatgccttggccattaacccaatttcaccaagacaagcccaagtgaggtggtggaccaaccgccctatgagtgggttggctggccaagcctaatccaaggagtgacttcggccgctcaatcgggactattggtgacacctgctgacctaagaaagaggtccaacgggtgccacgtatcccgatcggcatactcaggggtgggcatttgttgctgaccgagattttggtctacgtaattcgggtaaaaaaaaacttcggtcttctaaaaatgatgcctgaacttggcactgtagattttgcgatcgacaattcaggcacccaaaatttcggtccggtcttcggtcataaccgaagtaaccgcatgttgttgagaaagggcccggagcatggtctagtggaggatgggaggcaaagacgggagatagcatctgtggatgacgacttgtcgaagatgaagggcgctggtctagacttgctgaggattagagaaggtggaggcaagctcctcgtagtgtgaaagaagctctaggggacttagggctgagtgttccgtttcatcggtttaataaaagttcggttttctagctatgacaaccgaagtgtttatagaaaaaatagaaagccgaaccgagtaaactgagtaactttggttctgttgttcggttttaccgaacaaatcgtgggaacacgttggcaagaattccaaagcacaagatactcaaagaaatcacttgatgacacatacaatggcagatcaagagacaaggagtttttctgacctcacatagcaggagtcttggaacttggagaggtttgggcaactagtagaccatgaccgagctatgtggtaattgtatgcgcagttgcacagggtagtcgtccaaaggagctgggggcggcgagcggcacggacccgtgaaacggttgcggcggtagggtagaaatccggccacggcttcgcacgattacgaaacaacgatg

SEQ ID NO: 34462 - DNA, 717 bp, Oryza sativa
gcgctttctctctctccatggagtatgtctgcttgaccatttgctccagatgagatgagattattgtcatctggtctgccttttttccggccctcccggctacaattatcgcggtcgtctcagaagactcggcacgcactcccatgctcaaactccggcttgatccgcgccgcgcggggtggagagtttttttttcctttccttttaacgccttggacttggacctgatcagagagtgctgggcttatcagctcagaagtgagagggaagaagaaactgagttcggctttactccagcttcttagtgaaggcccaaataatgccatcacaagttgatagtttttgataaggaaaaagtatatttggactccctcaactaccgcctggagtatgattcatatcctccaaccataaaaccagatatatcggctcctccaactatcaaaaccagtacaaacaatgtccctcgatggttttcgaggtggttttggctgacgtgacgcctacgtggtgatcttaactcttaaccgagtctttgtcatacgtgacgcttacgtagcattagaataaaaacaaaaataaaaaaatgtgggatccacatgtcattcacataaaaaagtattgtgggaccactgacatgtgggacacacatgtcatcctccctctccttcccttcttcctccccgtctctctcccttatctctttctccggagcgg

SEQ ID NO: 34463 - DNA, 732 bp, Oryza sativa
attcctgcagcccttttgaacataataaagaatattttttaatttatgttggatgggaatgatgtctgaatttatcttgaaaaaaattctatagtgttctaattttgttaggtttgtaaattattttctgacagaaattacagtgcaataaaatgatatgcactttgaaaatcatatcaatctgcacgcaaaaaaaagagagaagaaaattgtatcaattttcaggacaaatatgttttcatgacaaggaagcatgatttcatttgtgacagaaagtttttaatggaatgaacatggtttctgccagccttttcaagagactgagggagggagagagagagaaaaaggagaataacaagttgctcctcaattatagggttgcaatgatatatattacctttaaactaaaggtctcttagccattgccacatatgtaatgtaatttaaattcaaatggatattaaaggccattccaagtcacattccgcgttctcgtggtcataccgcgtgaacctagtgatggagaagagatcgaacccggtcatacttgggcgctagcttgatgtaagtcattgtcacaactaggcgagtcgtgttctataacaatgtagaatcgaagtaaatcaattcttgaattgtctcgcaaaaaaaaggggtgatcttgagttgaattttatcaattttaggcaaaattgggtgaacaaggaaaatagaagagatcgataaaaaaga

SEQ ID NO: 34464 - DNA, 556 bp, Oryza sativa
ttgtgaagaatatagttctgtcaatagctcaactagctttcgaggaaatttcagtagtgcaccagtttgttcacgaaggaatggtcattactaacagttaaatgatttgtgacattgatttatgtgtcccttactttatgttatatgccacctttattccagaattagtatgatttgatagaataaatatatatggtttattaattaaacaaaagaaatagaaggcctgcattacttatactactcgtagactactgtaaaatttgcatacacatatcttcgctagtaggcttgaagtaggagtcgttgcattttacatgaaaaaattatatatagttgagctcatcaggtcacatattgtatttaaaaatgaaacaaaacgaaaggttgcgttaaagctccattgaagtatatgctacatgtttagattacatttacatactatacaagtaagcaccggcatgggatatctcatcttaattggccggcaagcgtcatctgtgtaggggagcggtcccgtcacggaccaaaggtcattgatatgagaagtcatctg

SEQ ID NO: 34465 - DNA, 814 bp, Oryza sativa
atcaagaatgatcagatacatttggctccattcactgatctggccccatttcatcacatcattttcataacagttactgtatatcaatatggtaaatcaaatggtgacagtagccttcttcatccttgaaaagcagaacatctaaacatcatttttcagcatctatatggaatatggagtacaattttatttacagatggaaacggtcatctttggtagaacacaccattagcaagccatgagaatggtaatcgcatacattcttacttactaagggaaaatataatcctcgtataattgtattttagcatttccattctagtactgatcaactcggcatatcattcgttcatggtcgactagatcgccattgacacccaagagatgcatattcttcattctttttcaccctttcccaacaaatgtttgacgcaaaatgtagtggaccatgaaggtgtaatgataacgactttgtgaatttgatcggaattggtagtttgacatcattcctgtcgatgtccctaacacacatgttgttgatgtcgcgatacataaggaattggaacaggagcaagggcaaattgacatgggaaatggggagcttaagtgaaaaataaaatgcaacagaattcttttgtagcaaaatctatgtgacaatgcgaaagtttctgagcctcccaagagatgcatgccattacccctagatagttttgtagcaggatcgaacacaaaaagtcaaccacaagagaaaatggcgagggcattcgaccggccaaagtgtaccactgcgcgactctgtgtggccgatccattg

SEQ ID NO: 34466 - DNA, 714 bp, Oryza sativa
ctgccatagttacacaactttattgctgagcgccttcatattcattgttggctgatctgactgctgccgactggtttcttcgcctccacggctgtgcaacttcatcacttttgattggtatcactatcttcactaccaccaatatttttgccacctctgctgggcaatattatctctgtattggtcgtcttgtctctatgccaattgcgtcagctaccatcaatgaacaattgtgactacgtgctcaggggcttactagttcaaacacaagtatcataccttcaatttggacttgctctggatacatgcaatatggattcatgatcatgggtctattttctatgtttaaagactggactatttattattccccataagggttacaaccgaatacttgcgccagtcgggattcaattattatatttattttggagtatcccataagggataatcattcagatcagaagctattcatatgagctacacttggtctatattacccggaagatttattactcgggagcatgttacatgcgtcatcctttaaagggtgtcgaaggcatattttttggcctaggcctaatatgtctgcagcccatattttcaggtgtggcctgttacgttcttttagggacttaggcactttttgcttaggccaaagtgcgcgtgatcaagtgcccaataccttaaaatccttttataccgcagttactc

SEQ ID NO: 34467 - DNA, 678 bp, Oryza sativa
aatcttgagaaatcaaaacaccattgttttgttttgctttattcacacatgaagcattgaccaaagaacttgcacaaaaagcaactttgtatttttttcaaaacgttctttgtcaaaatcaactcatcaacaacacgagcatgtaaagcaaatccaatcgcaaaagaagattccaacgttttagatttttcaatctaaaattccaattttttgcaattaacagaattggcatctcgcaaagcattaatttcagaaaataaaacttcacaagattaacaattatcatcatcagaaatcgaagattttaatctatcaatttcagcatttagaatctcaatagtgtgatccttctcatcaagcacaatagaacatgtttaaagtttcttagcaaatttgtaagcagcatattccaattcattataactaagcttttcttcactatcagattcatcaacatcagaatttgcattacgagcaataaaagctagatcaacaacttgcttacctttgctctcatcttcaccttccgattcatgaaaagctgctatgatttcatggattgaccacatgaagcattgaccaaagaacttgcacaaaaagcaactttgtattttttcaaaacgttctttgtcaaaattaactcatcaacaacacgagcatgtaaagcaaatccaatcg

SEQ ID NO: 34468 - DNA, 583 bp, Oryza sativa
agcccgcccatggttttgcactacatgcgcttttgcttgcaaatttttacttgcatatgatcattggccgtcgtctcgatcagcgctagtagctggggatcgaaaaacaggtggcgcgcgcactagcagtataggcaggggcaacatggcaatgtgcagggttttcagcgtagtgtttctcacttgtcagtgtgagtgtattaacgatatcaatgatccatttgcatgggactagctatagctcgacctacttgctgcaaggacaaataatgttggtgctgctgcgtgtttgcatccagattgatgttactactagctagtatttgcgcatctgatgtcttgctacatgatgtactgaccctcgacctagaatcctggagtgatggctttttcttaaaacattattatcattgttattgttattatggttgttgccttgcaacttgtcaacagagaacagactagtgctcgtgctcgatcgattatatatatatatcaatggctggatcaataaatacgtgatagatcgatcaatatgtattattctctccatcccaaaatataataacttttagctctcaaa

SEQ ID NO: 34469 - DNA, 903 bp, Oryza sativa
gggggcaaatccgcccgtttgaacgcgagagagagagggaactatgggggaaaagggagaggggatcacggggagtgatttccccctctttattgcacgcggagacggcgggaggcggcgggattcacggcggcggcggcgctagggcgcgggcgaggcggcgggagcggcgggaggaaggggatgacgggtgggccccacccgtcagcgagggtggcgggcggacccgcccgtcagcggcgcgagcgcggggagaggccggatgggccgcggggagaggagagggagggggagggagatgggccgagccggcccaagagggagagggagggaaaggggactttttagagcttttctttttataaaatcattttaactttgtttatttcttaataattattatttgtgctctgaaaattccactaaatttatttacgcattttaggcttttaggaaatatacaaaaatcctccaagccttatttgacttttaactttgcacattttaattgttggagctttcacacggattttaattattctaggcataatttggaggatgtattttagagtcgttttgggacgtgacataatgccactgctcatgagaaaatgaaataataatatcacacacacacacacacacacacatatatatatatatatatatatatatatatatatatatatatcaattgtttagtcactagaatcactatcattgtctgagtcattatctgattctattggcccttcatcttcactactgcaatcactgtccatggcaacataactctctatgttctcatggctatttggtctatttaaaaaatccatatcttctggatcaacttgctcaacaatatttgattcatgaagcaagctttcatcaccaagcttctgt

SEQ ID NO: 34470 - DNA, 723 bp, Oryza sativa
aggacttgacggtgtgaaaactcatgttaaatacattggtaaaattcatgaaaagtttgtgcttgcgctttttttaactagatttgtgaaaatgcatgtcaaaaggcttgatgtcaaaagggggaaattaaattacaaagtcctcataaaaattgtggtaaatttgcaagaccatacatcgatgtttttaacattgttaagtactccttcagatggaatatgggcaaacacaagatttagatttaaaaataagaggaaacataaagtaagaaaactagggatgaagttatcgtttgagttcaacatgaggcatgaacatatataatttctccaagtttaaaaaataggtaattttgctacaggacatccaaaacttgtgaaatttgctaatagacatcaaaaacacgtgtcatagctgaaagacatcctaaaaaggtggtaatttgctggaggatactttcagctcaatcggagaaacaaattcttaagaaagacaagaatgtccctatgaacacatgctttaaacatggtgttagagtaaacatttaaaaattatgcaactctaaatttgtcatcaccagaagtaaatcactagcaaatatcatatgccatcttcacttcaaactcggcttaaaagcttttgacccgaggggcattctcgtctttttgaagaatttctctatcaaattgaactgaaagtgtcccgtaacaaaattattgttt

SEQ ID NO: 34471 - DNA, 1024 bp, Oryza sativa
atcaatctggggttcgccttctactctgtgctgcgccgtcgctcgtagattactccatcccgctcgccggcgtgcaccggcgatcgggagagcaggtctccggaacctctgccttcgacgtcctgcaccgggagaaggcggcaataaggtttttgggagacgagggagagagagagaggtggcgttgtgcctgtttgccctctctcagatcggcgccaccgccaaccactcactcgctatcgccaagatcgaaactgatcggctgcacactcgctctcccttgcaaagatcgatgccgccgcacctcatcttggcgatcaccctattttctcgctcaatatgcgccaatcacctctcggacaaatccaccacaacccctccctcccagccttagctactccaagatagccgccaccgctccttcccacaaccaatttgataaagaaatcaatgcaattgtctttttttttttggtttaatctaccacaggtaatgctccacttccaaaattacctgacaactacaacttactgtttttgaagatagctgctgcgttgaaagagtctggtcttggatcttcttggttttgacttgaccaaaagcaatggatagtcaggtctatattactgtttcatgttgcacgcactagttgtttcttttaagactttctatcaattgtacttgagtatccgttttaaaattctatcaattttaaacaaacatttttttctgctgaatttctgcaggcacatattcctttagaagaaaaatcttcgcatgctttgctttgttgagttgataaactgggtcaaaacgggagacctaatgtgcaagccttgactcttcttgacagatgacagattttgtaactatctgaatttgtcgtatgaaaactacagatttcattctcacaggcataattgcagactatcaatactttgaaagggtagctttgtccagaggttcgtagtaggtataacatttttttctcgagtacggtaggtcgatagcatttatctactca

SEQ ID NO: 34472 - DNA, 612 bp, Oryza sativa
ccatgttaagcttttatacattaatgaaataattcctatgcgttatgaaatcattgtcaaaagggggagaaataatgtgaaaatttttagatcttttggagttgtcaaaagggggagaaataatgtgaaaatttttggatcttttggagaagagttaagttttagaagagaagagtttttaagaagagcatgtttttggttcaattgggaatttctttcttttaaaaaggggagaaggtttcttgtttttggttcaattgggaatttctttcttttaaaaagggggagtagttttcttttggatttttgagcacgatgtgtacgtttgtacgaagtgtgctttttaccgcttttgtttttaatgttccaaactccaaaacatttttaatgggtttgccaatgtgttcatcaagggggaaattgtaagatcaacgtgtgttttgatttttattctgtgatgaacaattggcatctgtgattattggttttgatactggagtttattcacgaagtggttttggagatgattggagttcacaggtgaatctacaggaaatcgctgttatttcatgtgaccggctcagaccgggaaggtgttgccggtcagaccgg

SEQ ID NO: 34473 - DNA, 587 bp, Oryza sativa
gcccattcccgcaaccatgcatatggaaacccggattacacatcccaatgcaatgcgtgggacggatttgtttcaatttttgggtacaaattaaggctaattaaaccccaaggcaaaattctatagtttcgcctcgatcgatctggcaatgatcgatatatttacatataacacacactcttaaatttctctaatctctagctcacatgtagctagcacactctgatcctaattctccgttggtttcttcagagattaatttgaattttgaagaagttcatctcatcatcaaattataggtacatatatcgatgtagctaggaatgatgaacctgatgtgaagcgaaggatcaacgatgatatggatcatccatcgatcgatcattgtagctagggcagcaacagaagatgaatgagaagatcgaagaggaagaaaacgaagaacaagtgaagaagaagaagaagaagaagaagaagaagaagaagaagaagaagaagaagaagaagaagaagaagaagaaggcgccggggtgatatatatgatcgatacgatgcagctagctgcgcttgcgtgttacctcgtcttg

SEQ ID NO: 34474 - DNA, 697 bp, Oryza sativa
cagggcgagtccaccggttttgaacaaggcgggtgccccccgatcgccgcgacgcgcgctaaaactatttggccggcacatgaatcggctctgcccccggcatgcagctccactcgcgcgcacggcgcctttgcgtccgataaggagatggttgagctttgccaccgcgaattcaaatccggcttccaaggggatgattactccgagcaaactgatgattcgttgtacgacataaactaactattggatttttcgcgcaattttgcacaaaattagatttaagaataattgaatttgacatacagttcttagctcatgtgtttcatagatgtaattgcatttcatataaaatagattctaaagtataattgaatttgatatgtaaatactattttatgttctttacttgcattttgtgttttgtccccaaatacacgacagtgtacaatggacttcaaaaagcatgatgggaaaaacatatacaacttttttacttatgttttttatacagttatattttttaactatctatttttttatcaacatggtaatttctactatttgttctaaaatatagcactttaaccatttaattttgtcctaaaatatatggatatcctcccacttttcaattaatgataataacaataatttaatttctccacatgctttctcatctcaacgaattgggctgcag

SEQ ID NO: 34475 - DNA, 602 bp, Oryza sativa
ttaacaattaatttactatcattcatatcctaattatatatcactattccaatttttaaaagttttaaatcatgcatgtaccatttacatatgttaattaaagtttttaacaattaatttactatcattcatatgctaattatatatgactattcgaattttcaaaatttttacatcatgcatgtggcatttacatatgttaattagagtttttaacaattaatttaatatcattcatatgctaagtatatatgattattacaatttttattaattttaaatcatgccgtatgtatatacatatgttaattagagtttttaccaatttaatatcattcatatgctaagtatatatgattattagaatttttattaattttaaatcatatatttgcttattacgttttatccacttaattcattacagacaacaataatttttcgaagtaattgtcattaataattttaaagcattattttctattttaggagcacatatgtaatggaaaataatattcagtgcgcttatcagtagtcccggttcttaatcctaaccgggtttaaaaagaatttggaaatagcgggaaaatatctttagtccc

SEQ ID NO: 34476 - DNA, 518 bp, Oryza sativa
ccaatcgtactaattaaattatattaattgcttgatcgccatgtttaaagcagcgtgcctgtacgtgcatgatcgacctacatataatatttcctatgttttaatttagtgctttagtttaattacactcttttggggatcttaattaatttcgagaaaaacaaagcacactttggcagaaattaaaaatatatatacctggactggatgaaattaagaggactcgaatgtgaaaataaaacaagtttgcgtggcctgtccttagaacagaatacatgatcagaaaacatgcacaaccacgcgggaaggaacaggaggcccagatggatgcgtacaggaaaaagtacatactagtaagtgtgcatctttcttttgcctgaaagcgacaattaaattgtttcaccaaaaaaaaccaattaaaattatcagtaaaaatactaaaatagctaagaatatatgtatgctcatggaccatttctgtggaaaaagcatgctggcttgcacgaatcaaatttaat

SEQ ID NO: 34477 - DNA, 631 bp, Oryza sativa
atttgaagttgaattttttaaaatcataaaatctcttaagagagggagacccctataagaaatgatactttcttaaccacttgagatatgtgtggtggagaaaacaagagaaacacgcatgtgctcgctcgttccgccaggccaagcgacgcgtatgcgacatgcgcgtgaatattctgccaaaattggttccccacccttgcgcagatgtggcttctttttgcagttttattttgttgcaaaattcggctttgtttttggaaacacaccgaataatctgtgcgtggagtctggataagttccgtgcgacttatctggttcggttacgcagtgtggagatcgtgcgtggagcggcgtggagtccggataagttatgcatgacttatccggttcggttacgcgacatgaagatcgtgcaggcatcctgatcacatgtactaatatctctatataaatcgagcagcctccttctcgcaatacacacgaaatcaatttagggtttgcctctttctatgtactgcgtcgtcgctaatagtctatttcgtcccgctcgccagcgtgcataaacgtggcggtggcgctagggttcagccttgtgacgaaaaaacaggtggataaaaaaactgaattc

SEQ ID NO: 34478 - DNA, 609 bp, Oryza sativa
ctgtgcgcgagccgcgcgcacgggaagctcgctcaagcccaaccacgccttaacgtggggctcgcttgcccgcgatgccggccggagcagggctcttcgagacatgggttttgcattttgtagtttataggatggactatttcacgcttatcctacagctctttgagacatgggtttgcattttgtaatttataggatggactattccacgcttatcctacagaattttctcaatacacaagcatgcgggtcctaaccccaaaagcaaagaaaaccagagctaatcatggtctagaattctaatcgatagcaattaggtgtgctttacaagtcagccggccctttgttacaagaacgtgcgatagtccgatttccatagcacagttgtatccgaaaaggtaccggctaccagaagttaaagccgcgagtgtcaacttgacggcccgacggctacgaggctaaaaaatggcgggtcccgacggtttgtccaaagccacgcgccacgcgactttagagctgagacccggtgctaccactggttggcccgtgccgctgaccgagtcgtcacgcggccggcctccctggaccagacaccgacccggagcaaga

SEQ ID NO: 34479 - DNA, 738 bp, Oryza sativa
acgcgaaaagctgcgaacgagggggaatggatctgaataaaatgcggaatagcgtcaaatttgtcgaattggaggagaaaagagaaggctttggagggccagtcttctcaagttatagcggaagcctgaagacataagagctactaggaggttctgtttgctgacctggtgatgactgtgtaaaatatatgcgccttttgggttgctagtttcagacaaaataagttaaggtcaagtttgatattgttctgtaagtgctactgtttagataccgcctgtgattcagattggatttacggtaatttgttttctatttcttctttatgaaagccttctgaatgtgcctggagttggggaacaggtctttcaggttaggtgtgtagcaatgcaatcagtttcggtggtgcagtatatatttcgtgtccttatgtgattctgacaggtgtttttttcatatgaaatattcccagttggctgctaatgcgcaatgcattaggagagataaaaatcttcatgtaacgcaaaaaaaaaaaaacaaagttttcatgtccattttatactggctacactgaccaccgcaccatgtttgacagcttgaaaatgtctaatgactaatgtgctctgatcgttaaattgttctctttcttggaaaactccttcccaacgtaaataatcgcgtgctctgccggtagatcagataagtattcagcccttttggagtagattagatcagatata

SEQ ID NO: 34480 - DNA, 567 bp, Oryza sativa
ggccctatgagccatttgaaaaaggttaagatatggtgctcgtcatcaactgcaggagatcatgatagtatctcggctcgtaagctttcagaggccatccaggagtacatcaatcctcccttgtatattggcgataaccctaaactatcaatctgcctgcaaacattctccggcagcctcctcaattctctcgatactccctgtgagctcacttcgctgaaactacatggcgagcttcgttcgttgccccgttttgtcaaatggcatacaggtctcgttgagctgtgcctttcatcaattaccgtgacacgggatgttctctctgatctgtataacctaaagtgtctgttatacctcaaactgatcagcgattgccttgacgaatttgtgataccacaaggggcgttccgtagtctgcgacgcctgtgcttcaaggtgcaagtctctgtcttcccgaggattgaagcaggagcactgcgggacctggtgtcactccagctgctctgcagacacctagtaggtttggctggtattgaaatcgaagatcttcgagaacttaaagaagta

SEQ ID NO: 34481 - DNA, 1313 bp, Oryza sativa
tggccgcctcccctccggatccagcgtcgcccggctgccgcggcgcgagcccgcctcccccccgccgcgcgagggccggccgcctggctggccgccgcggcgcgaggccgtcttcacctccgcccgaccgccaccttatgagggtcccgccgatgcacccggccgctgccgccgcttggccactgatagaagagaggggaggaacagaatggggagaggaggaggaagaggaagagatgggaggaggaaaagataaggttagggaagtgataaggaatagaatttattaactcctcgatctcgcgcacctcgtcctctccgccacgcatgcgcgcatgctgatattttgttccggtttaggctactaaccgggactagagataaatctttagtcccggttggtaataccaaccggaactaaagataatagggatttttttcccggtgttaccaactgggactaaaaatagatctttagtcccggttaagaacacaaaccgggattaaagataaaaaactagctctaacgttttgaacctagactaaaggtaatctttagtcctagtttttattgcaaccgggattattgtagattttggctgaccgaccaaaaatggtttctccatcagtgagataaggtgctttatttctttccttttatatttttcgccaattgggcatttttttcactaattgggccgttagagatttttttttctcttgctctgtattaatgtactcctatagttttatatcagtatagtcaagttacctttttttctgcttaatttgcgcgatgattgaaaatattccttcgacagctgtgaggaaacatatcttatagctatatactactgtagcggttgagtactccaattatatgtttgaatcctaatatatccttatttacatagatatggacgtgttttcaatttcagaatgatatatagtttagtgatatcacagatttacgaatttattggtgcaacagtctcttgaatatatgttaaaggagtgcactcataaatatatgtgtgcatgtattctatttatgccataagtaacaaaattcttctgtagtgtgtgtgggaagtatttttaacacctagtacaattgcacctagaatatgcatgtgatataaattggtaaataaaaatataaaaacaatattgacaagatatattgtgataatataagttaattagtacttacaaaaatatgcaactacaaaaatacactttgcatgtttgcatataccgtaaattaagtatgtaaccaccttgtccaatactatgatatgttcaccaaatga

SEQ ID NO: 34482 - DNA, 665 bp, Oryza sativa
  unsure (1)..(665): unsure at all n locations
agttctgtaattagttttgtcactagtatccgaacaccccatgccacatcccatgaaacatccgttgtaacacgcaaaaactttacacccctgatctaaacaccccctcatttgcttagaacaggtttgaggcttttcttttgtcaagtacagcacattgctattcagttagtagaacattgtcaggtaactatctgcacaaatgcagtacagggacgtcaggtactaacattcataatttcaaactagctgcgccaatgcattacagggagaaaagggagaacctaaaacacattctgaagatgatggaatcaagtacatgaacatgagcaatttgtttacttaaaagccgtgggaatggctgaggattagggcgccacgtcatcatttttttttcagaaaaacccttgctctttccgctaatagcgtgtacatccccgttaacgtggcccgtcggatcacaagctaaggccgatttgaccgtccacgtgtcccagcatgactacccttccaccatcgtcagatcgttggattggaaacggatggtctggattcttcagccagtacaaaccctaggccgccgtncttttcttcccacgcacggccgcttgcccaccttctccaatcgcgccgaagcctcaccgttcttcttccctcgcgtgcgt

SEQ ID NO: 34483 - DNA, 646 bp, Oryza sativa
gttcggggagaattggaggttattttgagggggagttagtgctttttatgactttcttttggcatgatttaagggggagtttatacctcatggttttatcaagcaaaaatatgacaatgaaaaaattgataaaagagagctttgtttatacatatggtattttcttgtgcatgccagcaatactttgaaggtttatttgtctctagcatagcttgtatgtattctagtcttttcatgagatttaaattttgcttttaagagagatgatgcatgacacttaaattctatacttgaattaagcaaatatgcaatgttgatgtaaaagcatatggtttgatttctaaatgctatatatatatatgttttattgaattgttattcctcaaatagctttaattgctcattgcgaaaaagagaataaaatatgaaaaaatgaataccgaatccttggaaacagtcttgacgacaaagacgtattcgatgtgagtaaaataatgggtgccgaatccctggaaacagtcttgacgacagggacgtactcagaataaaaaaaagagaaaaatatgagaaaaaggctccagaaaagaaaaagttaaaaattctctttgtatgttgtgctcaaggttatttaagaaagagtgataaa

SEQ ID NO: 34484 - DNA, 1431 bp, Oryza sativa
ccaaagtttataaatcaaaagtttatatacccgattcaaatttgaatttgaaatatatccgattcaaatttgagtttgaattcaaatattttctatatatagtatttatttatatatgtaaagtttatacacctaaagtttataaacccaaagtttataagtcaaaagtttacatacccgattcaaatttgaatttgaattcaaatattagtttatagattcaaagtttataggtcaaaagtttacatacccgttccaattctaaatttaaatttaaatatttatggcgtagtacgaagagaaaaaagagaggagggagcgacggaggtaggggaggcggatctgatcgcttgggtgatcgcccattatgccccactataagggtcaccggcaacaaggaggcacgacgatacacagcaaggacaccaggaggagagggcaacgagctcgctagcagggtcaccatggtatggcgacgtcgttgaatacggccagcgcggggggagggactgagggagggggttgtcgggtcgatgatggcaatgggcgatggcatgtcaatggtctttgggtaagggcgtgcttggttcttggtgttgtaatgtcggaggtgacaacatagtcgggctgtgtacatccattaatagatgtagagaccggattttaatccattttctaaaaaaaaaacatagtcgggcggcggtacgacgaagcgagggtagcggagtgacgagacacgaggtttccaatggccttggggcttaggaaagaggatgttgaggcgctgaggttaggggccagaggggaggatggtggaggggtcagccaggctaggcaagcctcgggccgccgaggaatggcggctgaagtgcggcatcgacggcggtgcttaagcaaaacgcgacataacagtgaggatgagcggcgttggagcaccagtgctgcggtgcaaaggggaggaagagaagaagtgggccgtcatttatagatcaaggaggatgtatgaaaaaaaaacaagaaaagcaagcaagctagcagcccagcagcagcggcaggccttgggccttggttggcccatgcgagcaagtagcagcagcgctagctaagcaatccaaggcaggccatggttagcttagattagatggacaacggtttatgaggtgacacggccgttactagcaacaccgagtgcaaattcttttttgcctcaagcgagatgatgaaaacgcaatgtgttgcagtgtaggtgtgattcaactaaatgggttttagtccaatactgtttttgtgccttgggtgttatagaccttgcctttcacatcaaggcggtgaagataaaaattatggggaaaatgaagaggatataatagagaataaattgataatggacatagggaaacgaagatgagagaatggagaataaaaccccca

SEQ ID NO: 34485 - DNA, 824 bp, Oryza sativa
cggtgacgacggcgtgagcatggagctgcttgaggtgcgcgagggtggcgcatcggtggagggcggcgacgaagtcgccgtgggaggagaacggtggcgccgggggcatcgtgcggcggcgccgtgcggaggtttggacgtttggtttgcctctctgggctcgtcgcacactcgcaccgcgtccgtgggcttaagctttggatgggtttttgtttttttgttatgttgttgttctaagaaagcgtcattttttttcttgtgacatgtgctctattacaaatctcaagcaaacacaaagaaaaattgtaccgcgatttgtgataaaaccggagaatgcccagcatcggtctaccggggaggtgggaaaatcgatcgctcgccctcccccacgtgagcacctgtttggcccacccacttatccatcatctttattccacaaaagatgtttcacctagtgtacttacaatgttttactatgacatagatctaatgttgcagtgaacgaaaccttccattgcaaaaaaacccccacatattttggaaactccttattaagggaatttggtttattttttttgttccactgaaaaatgtttcacctagtgtaccacaatgtttcactatgtatagatctaatgttgcaatgaactgaaacattctttcgctatttgctgaaacattgtttttatataaggtgaaacaacatctaatttaaacgagtgaaacattttcgatctacttagtgaaacaattccaatatacctaatggaatatcgtgcaacctttaaaaataattcaataataagctaattgggctgcaggaa

SEQ ID NO: 34486 - DNA, 561 bp, Oryza sativa
agacggcggccacgcagtcgtgctgatgcggcccggcgaagcagtggcgccccggcgaggccatgcgacggcgggggtgcggctcgcgcccatgtggcagctatgctttgctagacggcggaggagctcgtcctggcggcggcgtggctcagccgggcggcggcggcgcgcccgtgcggtggtgaggtggccacgtaatggcgcggtggagcgcggcgcggcgaggccgacggccggcgggggtggacggccatgcagtggctgcacgctcccccctttttttttgttctttttttaatggttttctgttgggttagtcccacattgttaattgatgatgggggagcacgaattaaaaggttgttacagttctcatccatcagactgtcttttggattgtgtaggcccaggacctaaacttgtgcctccggttgggtctgtggaccagacgcctacggttggtggaacaggctgcgcactctaacattttcttcctcttctgttgactatcccgggatggtgtgaagccttcctatcatttttcttctttttttcttcttc

SEQ ID NO: 34487 - DNA, 622 bp, Oryza sativa
ccaaccgggactaaagttacgatctttagtcccggttgggaactaaagattccggggggcctgacatgccctgacagcattcgaaccggggctaaagatcaaatatgcccgttaccctttgaaccgggactaaagatcatctttagccccggtttttattgcatccgtgactactgtggaaatcggccgaccgacgaaagatggtttctccactagtgacagcacctgatttttgcacgcctggatcgggtgcggcacctgatcggtagtctcgtcctataataaaagcaacttttcagcacaaatctagacatacaatttccatactaattgtttttttaaaaaaataatatttgcatttcaaagctcccaaatatatacacgtttctttgctcagaaggaatagcaaggaagtatccttacgaccttacctacatctaagccaacaaacggacggcaaacgtcaatgttaatcgtttgattgttttctgaaactatatcctcaatatgtgaagtgaaagcagccgtatgataaaattgaacggtcatgataataaatttagaagagatcatctgcaaattaacaaaaattactgtatagttaacaacttttaggcggcta

SEQ ID NO: 34488 - DNA, 781 bp, Oryza sativa
  unsure (1)..(781): unsure at all n locations
ttactatagggcgaattcgagctcggtacccatgtcattcgtgtatgagtcgatttgtaagttcgttcgcttttgaaaatacatatccgtatttgtgtaagttttaaattcgtttgtttttagaaataaaaaaatgaatcatctaataaaactatcttaaaaaaagtcacatgctaacttaagacaatcggactcctaactaccagctcatgattttctaaatatgtatatatccaagtgaattcccatagtgaatttcatcttaactaaaccatttaaaataataagattaaaatagtcttcacccgttgcaacgcacgggtattttgttagtatatgaataaattaaaaagagagttgacagggtggtaaaaaaattattgccaataaaagtttatcgagatttattgaaaaaagagatacaatgaacacccaattaaaaatagaaaacaccttactctaatttcagtttattttgttagaactattttctaaacctagttccatctaaactctggatccgaataggactctgaatcaaacggaatacgattccatcttgtgaatacgaccacgggtcgcgttcgtcgcctccgccgtcggcggcggtggcggaggcttccagcgggcaaattttgagaaaacctcttggggcatcgaaatttctgaaatacattgactgattctgcannaaatcgagggagaatgtagcatgccgaccagcctcgatgaactattaaaaagctaattctactgaagcttgcagactacgatgagctat

SEQ ID NO: 34489 - DNA, 555 bp, Oryza sativa
taagttaagtgcacgttaacgatagcgggcatgggacccactttcgagacaggccccgacgcccccgcctcatgaaggaagcccgagagctcaagttgacttgggacagggggctcccatcttaagattacaagtaggaagggaccaggagcccaacttggcctaggatcctgagtccccatctatccttagggcttatgttcttcgcagagaagagtgtacaagcctataaggtttatatcttaaaaggtgtaggttatgaagggcccggcccctcattacccttgtaagtaacatattcctccttgagaagtgttgacgtaaaacacgaggcctgggatatctgcttaactccagtgcaggtccaaaactcaccttcgggtatgcaagcgtgccagttgatttgatcctataatcaacaagaaacaaagacaaagaaaccgcggttaaacctagaaacgatagccgatcagctgagtgccgatgacatatcatttatctttgagccgatgtcatatatgtatcaatcggcggtcatgaataaataagaaggaa

SEQ ID NO: 34490 - DNA, 566 bp, Oryza sativa
accaatgtatgactagatgaatcacctttatctctgctagacgttcaatacctatctttgttataagaatttcctagttgtagtcttgttatcttgtagaaggtttttaagttgcaatgattgacaattaaatcttttactatatgactaacagaacacttagcacaacttaggagctagtcccctccagtaaaaaagaatgcctatgtatgctgttttgaattctgaatttcacacttgatgtacctataatcagtgagaaatcagcatagccatatgtataccactaaaaggatcatgatattacagttttgctgatgtgtggcaattaaatgaacagccaaatatgcattttttgagacataaaattgtcaaaataagtattgcaatcaacctactgtgcaaattcttttttccccattacattcttacgcatttttttcccctgataaggtgtttttaactctttgtacactgcaaacagatgggaacacttgattcttttcagaacattgtatgatagtgtggtaaactcgtaatgaaaaccattggcaacaaatggcatt

SEQ ID NO: 34491 - DNA, 536 bp, Oryza sativa
  unsure (1)..(536): unsure at all n locations
aaattattgacaaaatccatttcataattctggacttatttgcgagactaatttattgagcctaattaatccatgattagcctatgtgatgctaaacatgtgctaattatggattaattaggcttaaaaattaaaatttatcacgtgaattagcatttatttatataattaatttttgtaagtagtttatgtttaatactcaaaattaatgtccaaaacatctgatgtgatagggattaaagttagagttatagttagatatataattgccaattcgatctcaaaattgtctcgagttttaagctaggttgctggattggtgcagagctctatgcctctatctcgtttgtccattttggctgttacatcttccgctcaaatgatttntatttacccttcgggcccctaaatttttaaaaatttggcccttttttttggcctaaattttggcggggaaagattttttaaattcctgtagtcgacacgataaatggacatgggatggaggaatgcatggtcttcagtcggactatcat

SEQ ID NO: 34492 - DNA, 613 bp, Oryza sativa
tatatatatatatatatatatatatatatatagccatgccttttctgtcagtctttgctactgatataattgcagtgatgaaaagtgacattgctgtggagagagggttgaaggtagcattgagcaaaccctaccctaagtaattattgctttgacgagaagaaatttcagctagttgctgtaaccgcgatatttgcataaaacatgaaaaataaaaagaagctaaaaaaatggaaaatcacttaaatatgtgtagaaattggggaagaatatataggacacttgcaaacctagcttgtggatgtaaaatacaaaaatgaagctcaatacattttttctatttcccaaacaattatcgggtttgccctcaaatataattcttttccttactctttttaaaaaaatttcttcaccatctaccattaaaaaacaagaactacatccatagttttttttattttttccataaattgaatttgctcaaaatttctcaaacccgtaacacgccggtaaccgatccccttccccgcggaaagcacgataaccgtgattaccgcgcgaatacgcgaaagcctggacaccgggcgtatacctaaatgggatatagaacatg

SEQ ID NO: 34493 - DNA, 580 bp, Oryza sativa
tattatttacatgtgtatctaataaatttagttcatagtagtataatttaatttcaccaattggacatgcggtatatatagaaactgttgttgaaaatatttttttaaacatggtatttagatataaattgatataaaatattcatttatctatttttaggctactacttctcatgtttgacgtcaactttgaattgcatgtagacatatgattgctaaattatctctctattgcttgatttctagattaataggtgggttcatctcatttctctattgtttaccattaattttaaacttttcatatgtattattgactgtacttagaaaccaagcttcttagtagagttgatgatgacacaccatcgatcaaaaatcctggatccccccctgttctccgcctcacataatctagcttgtgtgacatcactactagagaaatcattattaacgacagaaaatatggtcgttgaaagtccaaatgtggtcgttaaaggtcattaacgaccatattttttgtgatcgtcagtggtcgttaaaggctccgtcgttaataatattaacgagcacgctaactttt

SEQ ID NO: 34494 - DNA, 558 bp, Oryza sativa
  unsure (1)..(558): unsure at all n locations
tagaggaaagctacactacaagcccagccgttgcccacgctggtttgtggtaagtacaatagttcttagagggggcccaaatttcccccccccgggcccgggaaaaacccaanggttccctttaattttggncccccattgngggtgtgactaagcaaaaccatgcacccacagcccaccatttagtcgcattttagttggataattatgaccatgaagcatggccagatgtctcgagcacgcagctcattctaatactaaaaaggtctaatactgtaattatcccatcaactgagctagtggtaattaagcatagctaagcatatagttctagctaggtcacataagtaacatgagctagtcgatttattacccaatgttgacaaaggacagacatcaagtaaacatggcacaggagcagataggtgaaaccctgatcccatgtaattagcaaaacatgcatatttatttgcaaacagtaaaacatttgtaaagtaggctcaatatgctcaaggggaatatgtgacttgccttgcttcttcacaacaaccttctgaa

SEQ ID NO: 34495 - DNA, 578 bp, Oryza sativa
ttgcggtgaagcaatgggcgggacacgtgcggtgactgacagttgggcctatggacagttaaattgaagacttgcatcccctgttccacatgtcagctggtacatgagcccgtcacatctggtcgttttgtttggagggacagcgataagaccaccttgtgggatgggccccccacttctgcatgcacgcactatgaacaaaatcgtttacatatgttagcgacatggaccttgatgggttgagctcgctttccatttatgcccctcgcgaagcacggtaggaattgatatgttcatgtttgaaagacccatagattcataggctcgatgtgtttacgtgcgcgagtcacacgcacgcgcaaacctttcacgactctacgcacgtctcgcaaaccacaacaatgtctgtacgcgtaaacctttggtgcgtaggcttggtgtgataggatgtcaaaatcgcttcctcttaatgagtataaatttaattttgaatgaaaagaagtgaaaaaaactctcccttaatgtatgcatatgggaaatatgattgaatctcatatgcatatattgaaggtctgttt

SEQ ID NO: 34496 - DNA, 716 bp, Oryza sativa
caaggatgtacagtacgtgcgctgctagattgcgccttcgtctcgtttcataccggccggtgacgcggcagcgcgagcggccatggcgctctgcatgcgcaaggggaggacggtacagttgtatgggccaaaccagagtaccagacacgcgccggctgtcgcgtggcgtgtttccgcggaaatcgtagtagtaggtgtgcgtgttcggctgttcggttttggcggcttgccgtcgacagtgatgtgcccatgcactgcgcgacgcgcctggtgttttcagatgtattttctgtcctccgtttttttggcctctcgtggcgtcgtctatcacgtaaactaggctcgcgcgttacgtcgtgagttgttacttgttagcttcgcgtttgtagagttcaacgagaggacaacacgaacttgcaagcagttaaggcagaccaaaaagaaggataggcatgcgggcagtcgggcacgcacaccagtcgggagtatttatcaagtatcatggcaaatgaaaaggaggtatatgcttcgtcagagccaggtgagcccggtcaggtagaaaggagattagcactttaactactgtgataggattggacgaatgtaaaagaataattaaagggataccctctccgttgtaggttaccacaccctttgactttgattaaaatcaaactactttaaattcgactaaatttataaataagtagtttcat

SEQ ID NO: 34497 - DNA, 651 bp, Oryza sativa
ccggggcaactgacgaaattaaagtgaaacatgcattttaaattttaatagcaacttggcgcaaaacagataattcaaagtttctaccggattgatcgatggcgcaatcgatcgagttatccatatctttgatcatctaatccatgcatgtgaaatgaattaagaaaaacctataaatggattcacggaccaacccacttgtggaaggagaagaagatattattgggttcaacgattgactaggctagtgaagtctgaagactactagcaaatgaaacggattgcgatcaatcgagctgcctagtaggctaaaactagtatgtactgtaatatctacgcaactagcaccttgttggattcggtttaatttcttgttgattagcgagcggattcgcggaaaatgcacacgcggtggaaggggaaaatgggaatcaaatcaggactatacatcggagacttgttgccccttcctctggaccatatggcagcatgcagcagctacagcatccttaatcgataagaaatcctataatataatttcacactagtaatttggatttgttctatgaaataattgaccgaagatgagccatcatacaagattttctttttattacactagttacatgtttgtacgttaatcatgatggg

SEQ ID NO: 34498 - DNA, 607 bp, Oryza sativa
ggatagttccaacttgcaagtgtaaaaagtatatgaaattgtaatcatcatgacacatcacagtctttgaaaagtgctcatataagtagggatgtaaatgtgtacattaagtcagtgtgcgcgtggtgatcgtgtacgtttgtatttccttccttctgaaatataaggattttggatggcacatagaaatatttatcttgtttagattcgtagtaatacgacgtgtcttattaatctaaattctctaagacgaatgaagtataatgtttcttttctttttgaaaagagaaaattatatacgggctctaaggccaaataaccatgtatcaatgacaacgatgttggtatctcatcatttttcgacgtcctaaatatttatcatcgaaaacaagtttacaatattatacccttcaataaaaacatatttattttcgatattattctcttcaataatttttttgacgtttatagatttggtaaagcataaaaaaattccaatatcaattttatatcaaaataagcttaagatctaataaattttatgatgattataggttttttaagacaaatatatgctgaacaattcttttggtttcaaactaagcat

SEQ ID NO: 34499 - DNA, 672 bp, Oryza sativa
tcctatatgtatatatgtagtatcatctacaagtgattcaaacttgctgtatgataaccgaatgatgttatgcaaagttcatagcaatgttctcgatcaaaatagacatggagaagactgcagtatttacttgtatttttttgtaggatcatttacatcattttgttttagagtactgtctaagaattttgtgttattcggttattcatgaccagttgctactggatagcatgatatgttcatgtgagttttttctttgttgggctgtgtgcatctgatatatgcagatgatggggtgtaatttaatttcttaatgcttttcattatgtacaaaaaatatgcctgtgttcttcatgcacctgcatccatgaattaaaaaaatagtgcataaaaggttctagatatatgacaccaagtggtgttctatgcttctgttattgaattgattagcacacttaaacttgtaattgtttctaaatgacgattgagcagttatctctctttttttttctgttttttgtccactttcttagctagacagtttcagtaacctgattattgataattctaagtggtccagttttgttcagactggcttcaaaatatagtactctagtgtgcagtatcgttcgtattgtttgatcaccatatattgcgagttttgcattatgt

SEQ ID NO: 34500 - DNA, 653 bp, Oryza sativa
agttatgcacacaattaagcaatttcactctacccatgtatgatggcttgtttcacaattagcatttggatatgatttaaaataccatctcaggagaaagcattgcaagaagatgtgttgtgcggttgctatctaggactaggagtttccctgttctctcgtgtcgatcgagcaatgcatgcagagggtagggtgagagcgcccaacatgggaatcaaatcattatggccaccacggccaagattgaacagatactgtaaacaatgaaaaactggcagctttttcgtctatggtgcgtcgagtcaatgagggagatcaagcgtaggagtagctataccattgtgcagcaacactcacctgcaatatccaatccactaccgtgtcgggaatttaagctgcaattattatcctccgctgcccagagagaaagatgtgcatcgtgcaagcttgtagagcttgtaggagtactccgtatgcttggaaagggaagaagcactgcagcagtaatcctactgctgctggagaaatgcttgcccaacagcacaagggtcaattcatatcatgccaagagatcctttcgatgatggccgggagattttatgcccaaacaaggcaaccgggcggagcgtgagaggtggagagcgtatagtggc

SEQ ID NO: 34501 - DNA, 542 bp, Oryza sativa
tgcctcgccttgtctccctaatactgccactcgtttcgagctagcagcttagagctaacacatctctggaaaagtattagttcaaaaaaaaactctagaaaagtgattatgatcccatcaattaaccaagagttggttataaatcaaaacgggtggacggtgatggcaacacacccagggacatctaggaaaggagtccacactactaccctaatgttcctacttcctagtgacatgggagatctagaaaaaaaaacaaagggtatttcagctcaacgaactctcaatgctatccctctctgtgaagataaaagaagaggctagcccagatcatcccttagagcatctccagcagggacactaaatatagcccctaaacagattttggatgttgaggctaagagcatctccagcaatatctactattttacagtccctaacaatttaatgggggcttcccccattaattagatacctacacaatatgttgcactccagcaacaaatccttatctcgcccctgatgtgattccatcttctatt

SEQ ID NO: 34502 - DNA, 682 bp, Oryza sativa
taaaatggagaacaaacccaaccctaatagagtttttacccacgggtaaacgggcaaacgggcagaattgccatccctagtaacaggcctataaaggagtagtgtggtggcggttgatacaacatataaaaactgttaataaaacaccaaatagaatcctaatgacgattaaaatgaggaacgacaggcaggctgtaaagctgacgggcaagacggttgcttgaacttctagaaagtaaaaaaattaaaagagagttcaagtaggaatacaattttgaaacaacttaaattcaaaaataaaaaataaattctgaaattagaaaaataaaaaagatttcgattaggaatacatttataaataactaaaattggtgataaaaaatagactattgaaaaaaaagaccatctaaaacacatgatgagataaaataaataacagacctataaaggagtagtgtggtggcggttgatacaacatataaaaactattaataaaacaccaaatagaatcctaatgacgattaaaatgaggaacgacaggcaggccgtaaagctgacgggcaagacggttgctggaacttctagaaagtaaaaaaattaaaagagagttcaagtaggaatacaattttgaaacaacttaaattcaaaaataaaaaataaattctgaaattagaaaaataaa

SEQ ID NO: 34503 - DNA, 617 bp, Oryza sativa
  unsure (1)..(617): unsure at all n locations
acagaaagaaactcaaagtgcacctgcgcagaatctgtcaagcttgcaccctctccaatggtttgcttattagcaaattcgtttgtaccagctaggggtgatggctgcaaaggccgtggaggcggaggtggcggcaataatgtttgacctggcacaatttctctgggaggtgggccaggaggaggtggaggtgggggtggcagaggtaagccaggtgctcctgctatgttagcaggcttaggtggaggcgggggtgggggttngggatgaggnnngggttaatanaatgnnncagcnagnatgngnngtcaacnnaggttctttgaanngaggcaangngncnatatggtgggggcggtggagggggtggcagggttgaaggacctgcttcttcagttcctggcatagaagatgaagcaccagcgcttgatgaaggcagtgggatccttggccctgaatatcaaccaagaaaaaaactgagaattgctagaacatcctacaggtagatttttttaaagggaaaaatgatgatttaagaaactactagcacagaaaccagggatattaacctatggaagatttgtacatggaggtttgccaggtggtggtgctccaga

SEQ ID NO: 34504 - DNA, 5090 bp, Oryza sativa
agtaaatacaaatggcatgataactgtgggcaaaaacagtctgggctatcacaaaaaaaaagaagggttcaatacatatcagaaagaaaaaatacctttcttttcttgacaataagattatatgtatcctcaagctgccttttcttatgtttcctagccttatcgagagcaccatcagcctctgtttcaaccaaaaagtaattttactattcaggaaaaccaaattagctaaaagttaacaaaaaaatgctacacatccactgttgcacagagttcctccaagcaagcaaataaataaaaaacaggcaaaaatgctgcagtaacacatatagtgcgactaagaggcaacattagttgtattccagtgcattgcaaggggaatttgatcccccccccccccaagtatgtactaggcaaagaatcggatctgtaaaggtagggcccacatgatggtgctgacggctgactcgctgaatgataaggatcaggcctcctaaaaacaaaatccactaaaactagattgtgagtgaaatgccatccagtaaatagaacagatgaaaactggaagatagatatcacataatcaagaaaaattccacccacatatatattgggtaaaacaccgcttatatttatatatattgtgagtgatgcattaagatgccttagacattgaacaggtttgacagagcatcctagaaacaccagtggagctaataataagaatagataccacatttaccttgataaaagcacagatgaaagttaaagaaaaagcatacagaccatgaattacaatcatgtctaaattaatattgcctaaacaggtatgattaatataactacagagtaaatgaaacacaccaatgtgcaaccaaaacagaaacaatatgattatttgagctttgaaaagaagtctgtaaaacaagaaagaataacttttttttctagaaagactagtttcaataattttgtctagatacagatatgcactaatacaagttattgcgcaatatacttactcatcttttccagtttctcaatctgctccagtatagcctctggatcctttttcaaaatcccaacctctcgtactttcttcctttcttttttattctggcaagtaaaaaaggtgatgggaatttagaatgtgaggacagaacaaactaattggtatctaccgtatttatatcagcaaccataaaagaaatagaacttaacaagagtacaagattaaagaaaatctgtaaaaggctagattggtttgctacacttaccgaaatttggtaataccgaaattttggcaaggtagcaaaaaccaaacactccaacaaaaccttcttccacaaaaatgttggcaatgcccatatatgtgcctcataatagcccaattttagcaccaaatcaaacctcttagccattctacactaccgaaatgtggcaataccaagattttggcaaggtacagaaccaaaccaaccctaatatacaagcagtcatacagatagtgggtacacgtgcaacaatcatggttgtcaagtcgtaaagtcaagtcgaggtacccctggaccgacttgtcgactagttgacaacttgtccagttgtccatgacttggtcatgcaaaaacaggggatgcaatatatagtataaactatggactatggagtagcaaagcaagacaataagtcaacaagaaataaaacaaaagtactaaacacaataagccaattagcatggtgaattagtgatttgctacgactaatttacaaccaactttacgactaatctatgactaaccgacttcacgactaatgctattttgtcgagttgtggctctctagtcgactagcttgaccgattttacgactaatcgcgactagtcgggtgacttgataacagtgacaacagttgccacatttctagataaaatggcatgttataacattatatcaatgtgcatatgaagatactcctggtctcctgctcagcagcatagagcaattgcagtaaagtagctgatcaatatagtcactaggttgctcaagtacaggggaaaaaatatcatgggcactccacaaaattttccagctaaccaggagaatcagcaaaattatgacgcaatataattggtatttgcagttgtaaatgcaagaggaaaaagttccattggtaatttggttccattggtaatttggtactatttgcagttgtaaatgcaagagggaaaagttccataaaccaaaaatctgttttcatcccaattacacctgaacacctaatattattcaaacccgctacatatagggctaggtgaaaagaaaatcacgaatccaacaatctacaatgcaggctgccaagcgaatcaatttacttgcagtacgcaccatttacaccaccatggatattcaagtaattgcttagattatcagttgcattgaaactcttaaaccgcaatatcttagtgatgcccatggaaatatgcttaattgcttattgcatgaaaaaaaaatcccacattggaactgaatcaaaaccaccatatttcgcgtagaaccgatcgcacgaattaatttacgatgttttcctacctcagatatagcccaaatcgacgaaagaacagtaaacctgacgaatcaaatcaccaggcgcatagcagtcaacgaagcatgaggaacatcacaacgcgcctctgcccaaggccaaattccactaccccccccccccacacggacccggacccgcgcgcgcggggtgatagcatgatacgaaccctagggtttgagaggaggaactcacccgcttgagctccttcttccgctgctccttgcggaaggcgtcggtggggttcatgaccttccctcccttggtcgtcttcatcctgccccacctaccctcctccccttctcccccaccggcgacgtacggcggcgagcggcgagcggcggcggcggcggatttagccgcggggggagagagaggagatggggttcgggtcggagtcggaccggagtggtgtggtctggtccccttggcgagtcgcgagtggaagcgggtgggtcacagagacgagtgggtcggtttggttaccgccgtgcagccggcccaggcacgatactgcccgtttacgcgagcaaggcccagtcggtccacctaattcttcccaatttttctaggaaaaagtacaccgaaggtccctcaacttgtcatcaaattacaaaatcgttctccatccacaaaaccagatatagggcatccatcaacttacagaactgttcattttaggtcctttggtggttttgaccccgttttgtccgacgtggcggctgagtcagcatgaaatccatgtggggcccacctgtcagactgtccacgtcatcacctctttctttccactgttttctcacctccacctctctctcacactcttcatctcattcgggcagggcggcggcaggtggggaggaggcggggcgaggcaggagaggaggtgctgcatccggcggcggagacgcgggataaggggagggcggcggcgacgggagaatgggaaggcccagctgcccgtctgccttgacgccgcggtggcacgccgtcgtggttgcgggagaggcgtcgacgacgaggaacggcgcggcgtgacacagggccggaagcgagcatggtggtgggaggaggagggcggcggccgtcgagctaccaggatgacagccatcgcgccacagtgggatccggtggggacgagggggacaccgacgccgacgccgacgaggaggagaggatcccgtcaggaggagcagacttgggcgaatggtatacggtgcaaaagcggtggaggtggcggtggagtaggggaaggtgcgggcaagcgtggcggcatttaccctacggggcgggagaggttgagcttggactcgtctctactgcgcttcttgcagcggcggtttctggcgtcaacggcatcatcgtctgagtctgaatcgtaaacagtgttctagagaaatagatgttatctagattctgtcatcaaatactccagctttatgtgatttggtatggatatctaagatcaattaagtttagatggagagtttgctcgttctgtgatagggcaatttcatgacatttcaatatcgtccatggcagcttcgcccattgatgtgggcaggagaggttccctgccctctcagccactctagagcgttgtaaatgctctgacttgaagaagcttttcagaagaaaagggggttgatctgaagaggactgaacgagtcgaagtggtagagctgctttcttctgaacaattttgttcttgttctctttttgggtgaagccaacccaagctaagctagctgccgcctacacaagccaacgctaccatgggcaaccggatagcctgatgaacagataatagagacaaagggcatgtttagatcccacaaatttttttaccatatcacatcgaatgtttggatacatgcatagaatattaattatagacaaaaaaaaaagaaagaaaaactaattacacaaattacatgtaaattgcgagacgaatcttttaatcctaattgctccatgatctgataatgtggcgctacagtaaatatttgctaatggtggattaattatgcttaataaattcatctcgcagtttacagacggaattattagtctatctatgtttaatacttcaaatgtgtgtccgtatatccaatgtgagatatgttagaacttttcatccctagatctaaccacagccaaacatgctgcaaagttcagttcgatcgactggctgagctgtgatggatgcacacaagagcagagattccttgcagcatttcacagacttgatgatctgaaatttcaggcataaatattgtcctttatttactggatgccattaacttttcaacgaatccttgaagatgctaatggcaatgtggcatagcaaggcttaggtaaaatcattgtcacaactcacgactcaagcaaatttaagagaattttaacatactttttttttgaataattgaggtatgtgatttaattcgttggaagggaattatgctacaactgcatctgcaaacaa

SEQ ID NO: 34505 - DNA, 666 bp, Oryza sativa
tcaatatgcaacaacacatacaatgctttgtgaaaaatcatcaataccatacctccggcttaggatttttagctctatcatcctcctctgctgccggccgcctctttggtggtccaagatggctggaggcacaagaaatacatgttgaattacaagaatagttacgtaaacttaataaagtgaatgcataaaaaaaggataaagctcacctgaacataattggttgctcacccttttctttcattttctcttcatattcctggcacagataacttgaaattaatgggctaccatgtgtggaggaaagaaaaataagctaatgatagtacaatccatgagattctttggccattataagttcaaatcaaatgccacccaaatagacttgaaggtgcagaagcaatgggtacacattgaaaccaacaattaaacaaaaccattttgcacaataacatctcagaaatgtgcatgattcataggaaccttaagttggattgtaatagagttgatacaaataattgaacaagtcgtatctctgccaatgctggggtatcctattctttgtgaaccaagacaattgtcatagtacaaaaatgtcacggaaggcgtcgacaaatcattatccaatggcacatacagtaagagaccagtatcaaaatatcccca

SEQ ID NO: 34506 - DNA, 1620 bp, Oryza sativa
ctgctggtgtgttttggcaaaggcaaatgtgctgttgctagggcattgccaccctgtctcttagagcattttgtggcgtcctgctaagctgaaaaggaaggggatatataaaaaacagacaaactcatcatgggctggctaaatgccattgctgggttaataacttaacagtactacatgataaaaaaaagaattaaaatgtttgtgaattagattggtgatgtgtcagaggcactttcttttttgttttcatctgattttcatacgatggtttaattttaagcagattttctttataggtatcgaagagattgcaggagcttcttcttgttttcttctcagagatgtttcgctcagagaattggattacaatttagctcaggggcaccaccacaccatgtgatgtgcagcagtgcagtttgaatttaacgcggcaggccacaaagaccttgttcagattgttgcgtaaataatcatatcaatgttcgataatatcaaatgatatagttttgtgctattaaattttggtagagttagggttttgttgccaaaatcaaccttaccatttgttggtaaagctaaattttggacaagttgaaaatgtaaaggtaatgtttaccttatcaaatattggcattattttatgaggagaagtttctagaatcttgctaaattctatgggcattaccaatatttggtagcaaaccaaatgaagccaaattttggcaacttgcgaaataatggttcaaaatgacaacaatctgaacggcccttagatgtattgggtttgaagcctcaccaagttttgataccgttttagtgaaagtttctagaattaattatcaaatcttgttaaattagtatattttttatttgttatccattaaattttggtattgttaacatttagttaagtgaaagtgacaataaactgaaagtgccctaaattagattaaaaggggggggggggtcaattttaaggtgggagaatattaaaagagacaaatcaagggtagctggtaaacaaactggagaagcaccaggaaattacgtgtttcttactacaagcgaagcgaggtcagcactcaactatttgatcagacatgtggcgttcatgcatggatggatcatggatggaaggtgctagtgttgaccgttgagtcaatgcgctacctttctagaaggagaacggacatggacgcctgcatgtgtggaatgtcctcgctaaaacagcttattttaacaaaataaaaactaacttataagtaaaacttatatatattacgtagtgacttaaaagctactccctctgtctcataaaaactttatttttagatttatatgtccaacgtttgaccgtcaattttattttaaaaaaattatgaaaaaaatattaacgcataaagtactttttatgtttctagaaataaaaaatattaatcatagaaaactcttaaataaaacgaatagtcaaatgtcatatccaaaaattgaaaaataaagtctttgtgtgatggaggaagtaatgctgaaaaaaaaactacgataaaaatatctaaaaccaacatctaaattgagttcaaaatttaaaattttgactttacctttgtcttattaggg

SEQ ID NO: 34507 - DNA, 1202 bp, Oryza sativa
taaccgattatgagacccgtgcctgggttaaagaatatagcattcagactgaatcgttcatccctgttcttgagtacgatgtaaagccattgctggtattagatgatgggaggatactcatatggttaggatcgacaggactactgctcatatatgatccaagaaccagcagttttgcggaagtcaagatgagacatcttgctgaagttggcatgtacacaggaagcctactgagtttacaaaatggtgacatggtgtagcattgtaatattatgttacacacttcagtttgcagttaatcacttatgcaggaaaccatttctattgcttttggttttggaagtcatttttggacacaaccataaaatgctggggttgatctcatgttgcattggagccagcaaagctgttgcaaattcttgaagatggtaggtgtctttatttatttattttgtacattcttatgtaaacataacgtagagtgtacctgtcagcatacattctggtatctgacataatttaggggaactgcaaccttacttttcagctgcttgttgggtggctagtgtgacttatgtgcaatttgatattttgattcaagaaaaataccaggatgatctgtgttatatgtgaaatttgcatttcgaatcttctgtactatattctcgtttacttctggaaatgactctttttgcagccggttgccagtcacttgtattcaattcaaacagaatattgtgtaattcagaagacatcaaacacaactgtactctgctcatcttctgtgcctaaactggatgctaatgaaaatgagttttgggaaattcaagtgttcgcaattacttgacatgtacagtccatgaacaaggatcaactaactcaagcctgaacttttctaaacttcagacctgagagtctgaactcaatccaactcgtgcagggttcatttttggaattaaaaaagaatcaagtaagaattttactgcctttattgcagataatcagataataattagtgctacttaagcacattcaattcaacctatcaacaactaatgatcttagcctgctaataaatacagtgaccgttagaggactaagctcctatacatctctatttctacatctacagaagaatctatttctacaaaaggacaatgtcactgctaatccatctctagctccatagatcgaacagctca

SEQ ID NO: 34508 - DNA, 967 bp, Oryza sativa
ctggcggcgacacggggaggggaggcctcctcctcctcctcccgctcgacctctgcggcggcggcggcggcggcagggtcctgcggggcggtctcccgctcctggagcactcgccggagcagcctggcggacatggcggcggcggcggagcacgccggcgaggacgagatggcgcgagggttagggtttgggcgggttgcggtgcggtgcggtgcgacgcgatgcgatgggatgggatgcgggctgcgaggcgtgaccgagtgagacgattttgagatggagagttggagtcggagacgaggacgatgacgatgactcgatgaggaggagaatttttttgcctttcccggattcgggactcgggaggggttgaaatgtgattttacgtaaaaggagaggatgcgttcggaaatttcgcgaagatgttttacagcatcatcggaattcagagccacccaaaaattggatcccctaattttcttcttgggagtatgtaaacagtaaagtaattaggatgtagtagtacaagtacctttcttgtatcctaccccctccatttcataatgtaggattttctagcattacttatatttttatatactccatccgtttcgaaatgtttgacaccgttgacttttttaaacatgtttgaccgttcgtcttattcaaaaaatttaagtaattattaattattttcctatcatttgattcattattaaatatatttttatgtaggcagtatctttcttgtatcttaccccctccatttcataatgtaggattttctagcattacttatatttttatatactccctccgtttcgaaatgtttgacaccgttgattttttagcgcatgtttgaccgttcgtcttattcaaaaacttttgtgaaatatgtaaaattatatgcctacataaaaatatatttaataataaatcaaatgataggaaaataattaataattac

SEQ ID NO: 34509 - DNA, 1063 bp, Oryza sativa
  unsure (1)..(1063): unsure at all n locations
atgattatgttgggaaaactttaaaaaccttatgtggtgatcaaactgggatatatagagtactgagaaatttatttggaatattgtctagattcgtatagataggatgtgttgattttatttacttttttcaaccatgtatatatttttatactgtactccctccatccacaaaagttacgcatattatttttgtcaccaagacctaggagaaattaaattattttggatgttacaaaatcaaggagtgaatgcaagcatgcaaccaatgaatatttagatgactctttgggttctcgtcaaacatttaatttatctcttcatttaagtcttaaatgcataaagactacgaatagcaataatttatttagaaaaacttaaatgtaaaatatgtctaacttttatggatggatggagtatgatagtttgatagagctatacatgtataagagaaagtataatatacgcttgtactgcctcttgtataagaggagtacgagcgagtatatattttagtttgtttgaatcttcaacattttagttgcacgtaaaataagataagtcattgacataaataattgagtatttgtcattacaaaatttagaaatgagtttattcaatttttgaaagaaacttttatataaaaagctttttagaaaaacatactctctctccgtccgaaaataagtacgtacactgtccaaaaataagcaccaaaactttggggcgaagagagagtatcatcatttaatactttaaaaaacataacgaggaaaatatttttttcagttgaaaaaagaacgcagacttattagctatggcattctgtttctgtctgttagggaaaaaaaaaaagaagaagaaatgaaaacagggcaactggcaaaaattcagggactaaagagcaaatccgacgctctacaacttgtacaggggcctaacagcaaaaatcgcacanaaacgaaaaaacaaaggaagccgtttgaaagaatcaacgacccgcgcacacggcggcgcggcgcataatccccacaccaaaagaatactaccttcacccatcgc

SEQ ID NO: 34510 - DNA, 542 bp, Oryza sativa
cctgcagccctccttgttgtccttagcaccgccaccttgatgaaaatctgcagtgcatacattaaaaaattagggaaattataaataataataggataaataagctggcttggataaggttacatcaacctgacttttttgacacttctgcacttctccattccaactcagtattctttattacaagtgcctgatacaataattacttcttcaacttgagaagggtaaatgaaacacatacaaacttacatactataatcatcaaactaaaaaaaaaaatcaacaatacagtatgtctttgttcagaaggtgcatgtgatccttctgctttccagaattctgatatgtcaacatcgtcaagaatttatcttaccttctccatagccatatcatgagaaatatttaagtctagagagtgattctctcttcttttgttgctgttcattttaacacctaaagtcaattgattctatcaaaacatggaggagaaacaatgacgggtcaacagaaatcaaattatggtagattgatagaactcacct

SEQ ID NO: 34511 - DNA, 1560 bp, Oryza sativa
atatgtattcagcccgtcaatctgtataaaagagctttatggctgaacgcctctttagttgacatgtgctacctaaattatttacaaattttggatagggctgttgaaaagaatttctccaagaaagctatttgtttcttccgtttcttcttgagattgtacctccaatctaacaaattgatgttaaccaagtcccgcagcaatgcgcggggcatcctctagttgtaaagagggctgaggccaaaatttatgctagaacaatactccctcattcccaaattgatcatataagagaattcaacattcaccccgttcctattttaacactttaatagcacccaaagttcaccttgttcccatttttaacacttccgtcaattctcggttatttttcgtccgccttaatcgctattgacccagccacgtacactatatgatgtttctacccctcacaagtacaagtaggatgcatgataatgaggggtagaaacgtcatattatgtgcgtggctgggtaaatagcgatcaaggtgtacggaaaagatcgagaattaacggaagtgttaaaaatgggaatgtggtgaattttgggtaatattaaagtgaaccggtatctttcggtgctataaaacaaaaaaaatgtgaacttttgatactatataaccaattttgcctaaatattagtggtaggggtggtgcggcatattggataccaccaccactaagactgagttctttccccaactttcgcaactcacctcttttgttttctgtgaacacgcttttcaaactgctaaatggtgtgtttttttaaaaaagtttctatatgttagttgctttagaaaaatcatattaatctattttttaaaaaataataagtacttaattaatcataagaaaatgcattgctccattttacttgcacaggagatgagttctcaacatcacctcccgaacacagcctaacattttaaatatgtagtgaagtctttaaaaatatctaggttaaaaaatggtcatatgatatttatctccgtcatcagagtaaaacttttatactcatatagttgaatatgaatttgggagtaaaaagttattcacggtgactttataggcgtttaataaatattgtctgcaatatatttgttctagaataagtttatttttaaagtaatcattgcattagagtttgtgaaagtagaagaaattgtgttggacaaagataaagtgagaaataattatattgtgattcgataaggtatgagtgttttttttattgggacgtgtgggatgtgtgaaaaacgaaaattttttgggacagatgtaatactactagtgggttgttcaattcgttgaaatgacgaaacttgaatgctttacactagctcgtcgatgaaacggctgtacgctaaaatcacggcaaataagatttggaaacgagtttggatgggaagagagacatatggcatggctttcttccccaatccaaaaaaagttccaaactcaacaaaccgggaaacaaaacgaaacaaaaggggtacagtacaccctgctgcccacg

SEQ ID NO: 34512 - DNA, 1290 bp, Oryza sativa
gtaattcaatcattcaagcaaacataacatacatgttgaagttatggttgtgttctttccaatgtgcaatatgtaaagattcgtttctgctcaaacatgatggtcctaactagaattatcaagaatattacacacgatgtggaagaaaatacattatgcattttcgagctctaagtgggtcgatgagcaaaccatgccaacttgttccatgttagttgtccgcaagatgaatataccatgaacgaattggaccagaaggcccacaactgtaataagtgtaagcaatggtggttttgcatccacgccactatgatgagttgatagcaaatttgacaagataattgttgagcatattgtataacgctccatgatttacctatactacggtgtaacgaattgagagaaccatcttcaagtttcaagtatcagtgtgcatactagaaaaattgatatagcctttcaactagaacatgaatgcgggctactagaaaaatgatgcggccaaatgtgttatgtatggaccttcgatgatttatctcaactacaggacacaagatttcaaaggtgtgtttgctttggatacagtatcatttgtgccatataaggaaaatagaacatataaacaaagaaacgagtccatgccaaaacaagaaaggatcaaagaggccatgcattaagaggtcattagttatggttttcttaactttttctttgcgggcctatagcctagcggttaccgtgctcaagtagcacctataggtcctaggttcgactccccacaagagtgaatttcaagcctggttaaaaaacatcactcgttggcacctcatagaaacacgtgttaagaatcaacctatgaaggacgggccctcgtgtaggaagcaaaggcctcaaagcatgggttaaggagcgatccatagggggcgagtccacgtgtggggggccaggattcgtggcctttctcggccagtttggttgaggcttcttcttaatgaaaagccgtggggcggtcttttcccagtcagttgagttctttttttttcttttgaaccaacatttgttgtaccatattcttcaagagaggtccttgagccgtgaggttgcttagcaagtccaggtctgcaaggctccaaattaaaagccgccatttaattccaaccaaattaagccggtaccatcaaacagcttataactgctatgggactgagttcgaactataaatacatactaagtacaaccatgaatgtcaagtacaaccaaattcgcagctcaaatgttaacattcaacat

SEQ ID NO: 34513 - DNA, 1071 bp, Oryza sativa
gtttataaacagggcagtgaactctagattctttaccatctgttagatgtaaacaattcaacaacataacattttgtacatgaaaactcggccatggcacctttctcgatcatttgtggcgtcaatctcctaaatactaaagtttcaccaccaagctcatcatgttaattcctttataagataacatgttttctttttgcatccaacagtgatcttgtgccaatttggtggttcaaagtgatggcaattttctaagcagcgttcacaacatctgagacactccccacttccactcacctaggaatggcaccttcagtgcctctgtttgaggaataaagcaacatggaggatcacacttatgtaacctctttctaaatggcaacataacattaagagtgttagacatcattgtacaatctcatacattacgatccatacatacagggctttatagggccaccaaagtcgcgcaacgcgcgacaaagtggctagttaagttctaaaagctacttcccgttttcttaaaaaaaaaaagctacttcccgtttcaaaataactggatgagacattagtaaacgaacatggagcagccttctttgtgcaatgtcttctattatttgcgtagctgttttgaattatatgctcgaaatttgttagaagattattttggttctctcgagctacggtttggaaagtttctcattttccggacatgttttcgaaaatggaaagtgtcagtcggacattttttttcgaaaattttcgaaaacggaaatgaattcggaactttttttcttggaaataaaaacaaatacagtaaggctactattcgtaggaaaccggcatcgtaaactttccggaaacaattttggaaactttctggaaacgaaaacttttcatatacagttgattagctttagccttctctactctatgttcagatttttcatagtattgaggtggttagttgaatgaagattttgattttagtacggtactttagatgttttttcttttgcctagttactgtttcattatttggccatgccatactaattacaggtatagatg

SEQ ID NO: 34514 - DNA, 652 bp, Oryza sativa
cttattaaaaaaatttgtgcaaatataaaaaacgaaaaattgtgcttaaaatactttggataataaagtaagtaaaaaaataaataataattccaaaattttttgaataaaacgtgtggtcaaacagtgcaaataaaaactcaaaatcctttgtattatgggacggagggagtaccatagatccgaaataagccaaataacacgatggacagaagtttggatgaagtaaaaagaaaagaaaaagatttattggcagcatgccttacatagatatgttggaggggactacggatcggtcgcccgatccaaatgtgcaaaaatcggcgccacgcatgtgtgcaaaactactttaaaatagattttctcttaaattatttatccaaatcatgatccgattgcacaattaaatttgttgtaattaaatcttcaaaacaagaccacacatgtttatattttgacggaatttttttaccctattattgaattatttttaaatattgcacgatgttccaccaagtatattagaattgtttcactaagtagatcgaaaatgtttcaatcgtttaaatcggatgttatttcaccttatgtaaaaacaatgtttcagtaaatagcggaagcatgtttcagttcactgcaacattagatctat

SEQ ID NO: 34515 - DNA, 949 bp, Oryza sativa
attaccgccagataaccaagatagggttaagagctagcataggttcactgcataatgtaaaagtatacgtgtatcatggctgattttactattgttttgtaaacacggagtaataatagtatttgtcaaggtttcttgcctggatgacatgatgttggaatgcaaatggttcagagagatttctatggaggctctgatgtacagagtatttcaggcagtcagtttcaacattgtgccagccagagtatagaatgggcatggctagtgaagagagtcgaggtgatccaaaatataacaaatataaagttagctagtgcaaggtaaaaaaaagattggactaggccctaggggtgatccaaagtaaaactacagcaatagaagatgacccaaagtgctcaagttattttatttaatgaaccggtacttactgtgtcaatttcattgaatagagtaggagaaaaaccgtatagtataaacgggttatttacaaagaaggaaaaacacaaaccctaagtaacaagactagagagggcccttgctcttgccaaggtctatggttttgcttccttttgatcttggcaactaggtatgttgccggtgtctgaacacccgctagtttgctctttccatatttctcaagaaatctggaggataaggctgcgcaagccttttttggcactcccggggtggaagccaggtccaagtccaaccaacactcgttcgtgaaccgtcgcatggttactctaatttactagatcgatttgattgtggagatccaagttgatatcaaaccccaaatccttctcgtacatctgcatctgcactccgtcatgagatgcaggaccgtttccaaggcactcaaaattaaatttgaagttggtgtctatctaacaagcccgctttaaacccaagaattttactccgccatggtggaaattaattgctctca

SEQ ID NO: 34516 - DNA, 682 bp, Oryza sativa
tagactaataacaaaacaaattatataatccgcctgtaaaccgcgagatgaatttattaagcctaattaatctgtcattagcaaatatttactgtagcaccacattgtcagatcatggcgcaattaggtttaaaagattcgtctcgcaatttacacgcaaactgtgtaattagttttttttttatcaatatttaatactctgtacatgtattcaaacgttcgatgtgacgagacaaaaaaaattgccggtggatctaaacacccccttattttccgttgacttggcgtctatcccttttatatccgagacttagggactgttcagattgatgtcattttcaaccatatcattttttggtaaaattgctaaaaaaaatgtctacgtttagtttgttgccaaatttggtaaatacatagccaaaattttgatgaggtttattttggctacaatctgaacatgccattaattcgttgtgcaagaatatgttattgcttctaattagtaaaactgtttttactaatactccctccatttcaaaatataaggctcaaccaccctcaatttaaaaactaagaaataattattatcatcttatagtttgaatcaccctaattataaatataatgtatgcatctaatagaatttaagatattgaggatggatgactaaaataataataat

SEQ ID NO: 34517 - DNA, 639 bp, Oryza sativa
catcgcgcgccggtagctgacctcactccgccccgtggagatccaaaaggttttttggtggtggttgttcgtctcggattatcttctggccgcaccgcacatcgggggcagctctgctctgtgagtcccctccgatcctttttgcttcgcgtcgcattattattattatttttttgcgtaattttggttgttgtgctttatcgcgtgagttggtaggtagtatcatgagccaaacgatctgttgtttctgattagtactagtgtgtgactgattacgatggatggcaattggcatcggtgtgcattttggggacgagaaaaccgggtgattgatggaatcgaacgcgttcaaaaggatttctctgcgattagcccagatttttttttctgaaattctggcattcccgtgacagaacattggtttttggtgttttttttttaaaaaaaaatggaagaaggtagcagaatcttgtagataagtgatgggggagtgctctggtaattatttgaagtttgacagaccgaatgctccctgatgactgatgtttacatgaccagtaaccacacatgataggagcaactgataatattgttcttggtatttgtgataaacttcttatagagtactaggtgaaatga

SEQ ID NO: 34518 - DNA, 623 bp, Oryza sativa
atgatattggttgtactgggctgttttggtttgatgacaaaatttgccctacaaagcactttaaatagtacattgtagatatttggattgatgccaaaatttaccaaaggtaatacaactcctataaactaactctattaaaatattagtagtgctaaattttagcaataatttaacactaccagtaatttgctaggacaccaaaccaaatgatcccactctttctaatgtttactagtagtaccacttgtttaatgttttttttaacggggacgatatggattgatcttgtgagtagagaagcagcagcagcagcagatctttggtgaagcaggatttgccgtgacacaatgaccgatcgatcctccgttatacacacggtacacacaagcagtccagattccagtctccagtccatatacacacggcacactggctggagtagacaactgcgactcgtgtatccatggagtatgcatgacaaacaacaaatttcagcgaccccgattagacgtaacccctctccgctatactagcctgtgcagcggcagtagtccagcctacagaggtaatatgatgtgtcctgtactctgctgtgtgcagctagttacagctacagccag

SEQ ID NO: 34519 - DNA, 2180 bp, Oryza sativa
acgtacatatgttttttcctttatcatgatttattataagtatatatgtgcttatggtttatttttcttgtggcgaacagtagtaagtaataattactttatttctttcttcaatcatacgtacgtaagaagtatttttttgcccaggtccacaataatatatttgtcctcatgtatatggatatatgaggaaggtgttacttttttttaataatagatctaatctaatggtataaaatattggaaccacccatttaagtgaaaatgtatgaattgatatactgtgacggaccggaagcatattggattctacccttcaaattttattagctatagaataggattatataagtaggagggagggatgattagacgaaggaagaaacatatacgtactatgtatatatgtacttgcaatgtgggctagtgggtgggagagagtatatgcacgtaacgtacgtacaggtgtgaccatatgtacttctaatttctaatgtctaggttgttgtaagattaatttaatctaagagtttataatattggacctaccaatttaagttaaaataaacgttacatatgtttttttctcaaaatttatatgattttctctaatttattagagtgtcacgtgatatggtttaggagcgattatagaagtcccatgtggcccaaaatttatatgattttctttaatttattagagtgtcatgtggcgtcttaggaatgattataggagtcccacgtggcagcttgagaatgtttgctagaagtttaatggacttttagtatataatagatagataataaatggctatatatataatgggtgtaaactttattttaaaatattgcatttctaatttaggtatgtatatttggaaagagcgatatgatgataaaatttatatatgtttgtaaagacctagatttaacgctggtgtgatattttagttatgagcttagtagctagttgtccgcgaatatagacataataattaccttacatggttacagtgtacttatattttgcattaacccttctcctctttacaaagtaccaatccaaaaatacgacatatatatgtatgcatttatattccaaagaaactatatacaagggaaaaaaagatacaaaaggaaggagagcggcgtgtttttttttgttgcgatacatacgtacatcatgtacgtacctatggggaggtgagaggctggtgggaccatagttgtagttgcggttagctttaagacaaatctaatatataatattggacccaccaattttaatgaaaatcaatgtacggatgttttgcttttttctcagattttctagggttttctctaatttattagagcgccatgtggcaacttgagagcgtttgtaggaagtttaatggacttttagtatataatagaagatttaaacttattattgctaccgcaatctatagacatttaatagagagggagtttatagttgcgcgatgctcaacttaacatactagtactattaaatagcatacagatgtcgccatcattagtgtcggttcaataaaacctaacactaactatggttttctgcacccaacactctcacactaagtagaggtaacacatgccactaataagaagacattagcgccgggttatatacaaaccaatattgattattctacgtacaatcaatatcgatttataagaatacccgacacttattggttaatcatcagtgtcggttcaagtcgattatagtgggatgggctagcctgcgaaaagtcatcaatgtcgggtcctaagcattcgtgccggtttgggatatgtacttaactttttcatacaaattcgaattatgataaagtttatatgaaaaatgtagctcttgacaatatctatgattttatagttaacttttttagttgaatacttttagatactcaaatccattattcaaaaatcgattagaaaggctaaaaaggaaaatatccatttgctaatagaattgatgtggatgtgagttggttgaaatagatgcacgtggtagggtgtgtccaattcggtggtagattgctataacaattagttgttgcacttgtacataatgaaatgatagaatataaaatgtggagtacaaaaggttaggctccttgatccgaaggaaaaacatagaaattttggagaat

SEQ ID NO: 34520 - DNA, 596 bp, Oryza sativa
tgctttcatgtcgtttctgttgtttgtttttacctcaatcagcgagtgctgtgcttcagcatggcatctgaagatattgtaatgcgggcagcagggcaattgatgccgtcttcctaaaagatctggttggctagttctgaaatgtccgctcagctgtgataaaatgctctttatgcaggagtccctttctaatgtttatcccagattgtgtgccatctgtgttatgcaggcagtctggttggtggaacctgcaatcaaatgattctttccctcgaggtttttgccaaattctcgtgcggtcgtgcctcgtaagcttggtgaaagccttctgtaaatttggatctgatcgtttgtttgagctagttggttggcttcttaaaccgtcttttcccctctgttcttatgctacgataatttggttttaatagatggccaaatttcagctaaaagtgtttttttaaaaatattatttgctacaacattttggtcttaataatggccagcattcagcataaaatgtgtgaggtcccccaaaaaatttgcccccacgcaggatcgaactacggaccttcagtttacaagactgacgctctacc

SEQ ID NO: 34521 - DNA, 726 bp, Oryza sativa
cattttccatgctgtgtccatacgattaaaagcaacctagcttagcttctggaaaacacgtagccactgagatcagaaaggatcaaaagagcactttgttttttccttcttttttttttctttttagatgaaccaagagtactttcttacctctccttgatcgatcggcgaattagtagagaaagtgtccaaaaaaaatatttagtaactcatgcacataagtgcgatcttatgtggactagtcgagacctcacaattggaaactattattttccagaacacgcaaaagattttgttacattattccattacaaaagcacgttacaagccgttcatgcatgcttaattggtgtcaaccttataaggccagagtttgttgtcaacgtcacctcccaattatactttattaattctcatcatgttaatgtcatgtcctcggttatctttgaaaagtgtgaggaaagttacgtacttcctccgtttcatattataagattttctaacattattcatatttatatatatgttaataaatctagacgtatatgtatgcctagattcattaacatctatatgaatgtggacaatgctggaaagtcttataacctagaacggagggagtaaaagaacacacaaaaaaaacccaacgaggacattaaaatacgctccggtgttgttgaacaagcaatcgattccaacaatgacaaagaaaaggatttagcggtg

SEQ ID NO: 34522 - DNA, 656 bp, Oryza sativa
ctagtatgaagcgcgcgaaattaccgaagcagcaggtgatggcgttgggcttgtgggtttgaagcttccggcaatacaatgatctgcagaactagcttctgactgggcatctgtaactggcagtttagttactgtttgtctggctagttgacaagacattgacagcctgtcatgacaacctctatcttcatccactggcactgcttccactggttcattttccaatataacttcatgggtattaccgttgggggtaagctgcgctccaggaacatttaacgtttcatgtttttcttcagaagttgggcagaagttttcattggaggcacttctaaccacaccccctgaggagaatgctccagctctatcagtatcagcaacaacattttgagtgcaaccgattttgacaggattgactgtgtctttgttaccagttggatgtgtggaatcataagcaaggggagcatggtttctttccggacactttgagagcacaacagattcttgaggaagcacttcattattcaaagcattagcagtcatagaggttaagcatgaagaagatacgactggaactccctcctgtgatccagaaatttctagtgaagtaccaggtaatgtggatgcaaatgacatagagtttacagcagttgcat

SEQ ID NO: 34523 - DNA, 683 bp, Oryza sativa
cagctgtaattattcggtgaaacccacccagtaatgtggcctaactagcaatagcatggcaacaagtaggggaatctgtcacttttatatacctaaaagacactcttagaacactgctagtcatctgtaacggctatgattctatcactacaatttgggggggggagtagctaaattttagtatccaacactcctatattccaaaaaaacaaagagatttggcacagctcaaataaaaaagaagcaaaactttcaagaagacagtgatagagcatatattctgctacagaaatgtgtgcttaaaattccaatcatgcataccaaagcttacagctttatacgaggaaggggaatattagcaggtcctaacaaattcaagaggataaaaagtagcaaatatgccatcaaaggatcaatagggctgcaatattatactgcatagataccataattcaaaattcatttctatcattgttgcaatttgaatttggtttcattattatccagataataccctcaaatgtagaaaatgtacaattactaaaacatctttgtgcatctttcaaaaacaaggagctagaccatcaatctgctctaaaactctctaatagttgaattatgtatgctcaatcaatgccctgatcactttcaaagttctgagaaagagggaggatgatttgaag

SEQ ID NO: 34524 - DNA, 705 bp, Oryza sativa
acatgaaggtatactttatcagtatattccataagtcgtaggatatgaggtatgccttatccataaccctgacaagtttgtactgcatatgtttttttacaaagtatatcacagtaaatcaaggaaattgctaaaaaccttgtcgcaagttctaattcaataagcagtactaaaataccatatcattgatcatacgtaccaaatattgtgctcgtgttgtaaaaaaaaaaatttaccctctttccatatcgaatacccaatcttaaaatccgaggcccgtccctggtcgtgggggtaaaacaggaaatgggcggtgaaaaaagttaccggttacgtgaaaattgcagtgtactggcatggaaactgtgcttactatacattacggcggaaaatgacgtgtatacattgttggaaatttggtcataattcggcatattttaatccaaaataacaagataataaacatgatatttacaataggatttgatccagtgatagtggtgaatgtaatcaacatgagcatgcttaacgttgaataagcatcaacaatcacataatgacacaatgttgacattgcgatgaacattaacagtaaaacttctaattgaaataatgtaataaggttataccccaagaatggtcctccgctggagtttgaggcagtattacctccgttggtgttgacgggagtcgggctgcaggaat

SEQ ID NO: 34525 - DNA, 681 bp, Oryza sativa
tgaagtctgaagattaaacacaaaaactaacggtattttgcaaagcatattttcacgcgtcccttcattataaaaatgtattatttaccccccaacccccaccatacccctttcaaatataaccataaggagaaacagaaaactaacaatcactttgcaaagcagtacatagcccttaaacccatttttcatgcaaagtatcttgtatacattgtggactgtgtagcacaaaatgccctcacacaagatgcataagtgcagtaggacttatgcaggtctccgaatttcataaaaaacatcatagaaacctacgaaaaaataaagagagaactctaggtatcaagaggatttggcttgttgtcacagtcactttagctctttctacagagtgttgacccatttgtttgacacataaactagccaaaaaatttcagtcagtgggaactgatttggtcaccagaagaagcatgataaccaactgaatatgcacacattattacataaggtactcattaaaagtacaggtatacacaaaatgggggaacattggaacacaatctaagaaaatcaactaaaactaatcactatattataagctacaaacatataaccaagataaccaaagattgttcaataatatgcccacaatagccacattgcatgatacaatttccaacattc

SEQ ID NO: 34526 - DNA, 981 bp, Oryza sativa
aatatagatgtgaaagttctttttaaaaaaaggacatctaatctaatggtctacaatattgggtcaacaatttaaataaaaatcgacggtgagattaaacagtgccatgtggcggtctaggagtatttgtagaaacgctatgtggcagtttaagagcgtttctaggaagtttaatggacttttagtatataatagatagatagatagatagatagatagatagatagatagatagatagatagatagatagatagatttcatgttgtttcagttgagaaagttaatttctagaatttccaaagttggtaaaaaaagtatttgagacatgttgtctattatcttgtcaaattttggtagtgccaaatactgtatctattatgactaaaaatagtagtaaaccaaacatgtacacatatcataatgagatatggtgcactcactttgattccaacagtagacttagttacccttcgtttatactacataaaaagaattatttattcataaaaggggtagcatttatttagcaagggcaaacaaaaaagaggctctgtagaattacgtataaattttaaaacaacttaaacgacttacatttggaactattgggagtatctatactactataaaagatattagtagtggtggttattctgtcaccatcactatttgtattttctttttaaaattagtctttgttatttttaaatattatacaatagtctaatatttatttgaatcaaatggatatattatgtatattcaaataagcaaacatgtctataacaacttattattattattattattattattattattattattattattattattattattattattattattattgagttaattgtactttggttcaccttttattaccaaagtttcactttgagccaccctctaactaatattgtcactttagactaggtaaaattacctttgttacggtttggaccacccca

SEQ ID NO: 34527 - DNA, 613 bp, Oryza sativa
tgttgcactgtgatgtggaatctaattatttagaatctttagtaaggctgtgttcgctatgggttgttcccaacttggaacagtagcacggaaaacggagcaatccattagcgcgtgattaattaagtattagctattttttttttcaaaaatggattaatttgattttttttaagcaacttttgtatagaaactttttgcaaaaaacacaccgtttagcagtttgaaaagcgtgcgcgtggaaaacgagggagataggttgggaaaatggacgtccgaacacagcctaagacttttctgttagagccaaacaagaaacttagaactaaatgctactattatgcatgcatttgtaaatccatcacaatgctgtcggtatgatttgttcagattactagaagcacagatacaagaaggattcaatatttcatattgttttgttatcattccttctgatagcttgtcttgattttcctgataccctgctctattaattgtatgtaattaatctgcactcatagagaagtacagtgtgctccaagtgtttttaacaactaaaaacctgtgctggtgatttgtcctgggttgtgcgctttaataattctttattgtt

SEQ ID NO: 34528 - DNA, 688 bp, Oryza sativa
aattcctgcagccctccggagtgatagcattggactatgtccaaacgctagagatctggcagatcagtttaccaagggggtaccacgtaatgtgatagacagtgcatcgagggaaatgggcttgatacccacctaaggttgcataatagtggaaacctgtccattatgatcggagatcccgtgaatttggatggtgaaacaaactattgtgtgactgagagaagagacccttgaaaagggctcattttcatgatgtgcttctcttctttcctgcatggtaggatggcttatgtcttaatgtgatccgagtggcttttccaagcagagatgttgacctgcagaacatcttagaaggaacacacctatatgagttcgactgctagtcacagtctatgagatttgggtgatctctagatactcatgaaaggcctggagtatgacttataagctccaacccgagggaatactaatggttgcctagtatcacttatggaattgagtgaaacctaactgcacaagactgacaattcaaggcatagtccattgttcagttgtggtcaggtgtagctctttttctaagtgaaagttcaacttaacagtcttcaccgaaacactggtatataaaagctgctatggaatagagagcattctcatgagccttgaaatttggtggggattgttagattta

SEQ ID NO: 34529 - DNA, 667 bp, Oryza sativa
tcatttgattaggccgtccacaggaattggatgagaaagacatactcgaaggaaaattttaaagaggttggagctcttgctaactttcattcaaaatatctacaggattatctattccataggattttcaatggaaaaggatataattcaatcatttatgtaaaagtccttcatatgaatctttaatatataattggaatatttgtttttcctggaccttatcgttcaagttaagattttgtcgaacttttaaaattttaaaaacaagtgtattgttccatacattttgctatcttctttatgctaattggatgatctcctataaattgcagcgttaattttaggaggccaagaaatttagaaatgactccattactcagacaaaaggttagaagttccaatgttaagaaaaaaaaatgtcactcaaccatctatcacattgtacgtcgttgatagtaattatgaataatttaatatatctcatttgtatatccattatcaaaatgggaaaaaaatataaccttgaactttaattcgtgggtaattttattatcctttagaaaatcctaagtggtatcatagggcctgttcggcgtgcctagatggcagccagcagctacagtaacaacgtacaatttctacgtagttgctgctgctgcagcagcag

SEQ ID NO: 34530 - DNA, 683 bp, Oryza sativa
ttagtggcacttctgttagtaacaaattaaggccttatgtgcatttgaaaaaagtaaaaaagaaaaatctcgaatgaaaggatgaaggaaataattgtttgccgctggcaggtgagcaggagctttgacctcctccatggttttaaatttttgtgctgaattcactatagcttcagcaaaatttaagtgtatctgacttatgactgatcgttgtgattgatgttaattcctcatgctccaaataaaactatctagggcatgtgcgtgcctttcgccctccgaagctccaacactactgcacattattttcctgccctcaaaattcatataacaatttaacaatcagatcttatttgtcatgcctccatatcccagatccttgctgaattttataagttaaattatagtattctgaaattttgtattttctattaaatattaataaaatgattcacctctgtaaggtttaacagttagaaatatccaattaaaaaatttggtccggacctgtgccaaactgaagtttagttttttctctacaagtgaacaaccaaacataggcaaataaatttcataaaatcctatagtttaaccagtagtatacctctagcaaaatttactcatcatgaaacaattcaaatatgtttggtgataacccacatcctcctcccgtgtcacctctc

SEQ ID NO: 34531 - DNA, 640 bp, Oryza sativa
tgatttatgtgtaagtgtgtcttaatgcctcgagagagtggggctggtgatggatcgagagtcatcctgtcagactagcaacataggtgcggtataaccggtgcatatctggctctcacacagaatttcgtcagaacttcattgaatttgagggtagcttttaattccgctaaaagttttcgttttttggtgtttatatcattcatcccatctgataggcttggttcttatatttccatcccacaaatatcttgaatactcttttttttttatgtgaggagtagaatttttttttctcttgtgatgatgggacacaacagatgcaatagctcaatttccctgtataaatcagctgagaatgatcacaatgtacctccaaatgcatgcaactacagtccttcaatgtccgagtatcacttgtaaaagatcattgacaatttgacattgcgatccattttttaataaaagaaagcacaaaagtatagtgtcttgtgctcgcggctatattcatctatgagaaatcgcatctttttcttttcagtccttgcttggtgtacatgattttacaaatataaatatagcttacacttttcgatcgaagaagaagatgacacagcgatgtttacataatcgtaatgaa

SEQ ID NO: 34532 - DNA, 634 bp, Oryza sativa
gtgccaatatttttttaagtatacggacacatatttgaactattaaacgtagactaataacaaaacaaattatagattatgcctgtaaactgcgagatggatctattaagcctaattaattcatcattagcaaatatttactgtagcaccatattgtcaaatcatggtgtaattaggctcaaaagattcatctcacgatttacatgcaaactgtgcaattgtttttttttgtccacatttaatactccatgcatgtgtccaagcagttgatgtgatagaaaagttaaaagtttgaagaaaaaattttgaatctaaacgtggcctaattcttaacgagccatacctacgtacaacatatccttttataatccttttatagcttctgaattacaattcttatagagtactccgtttccattagcacgttttttaaattgttaaatgatatatttcttatgaaatctttattttagaaggtgttttaaaatatcgagcaaatctattttctaagtttgtaacaactcaaataatcatacgctaatagctttatcattttatatgtcttatacttaattctagattcgaacaggaccaagcagtaaaacatctcacttttgtattttttaaacggtca

SEQ ID NO: 34533 - DNA, 676 bp, Oryza sativa
tgtaacaggatcacgagagcactctcctaccatgtatactggccattaaaaaaaaaactttcgactataaatttattatcggtacaataaatttcttacctcgtgtaccggctagcaacctatatccggattcgtagtcatactaatgctacattttgaaacgaatgaataactatatatttaagcacggacgatatctaaatttgaacctagtaactcaattactagttttttttaaaaaaaatactagtaattgaatttattttttttattactgcatatgtagtgctagtgcgggtgctcttcctgcagttggccacttggccaccgcccggtcaacctggcatatttcttttccttcctttggctttgctcgcctagcagaaaaaaaggatcaaaaggcaaaaacaggtctcatcgatcgcaaccgatcactccacttttaattatttcatccattatctcctttagttcgtttctcttttcttttccccctttgacctccatttctttttcttttttgtgtttcttaattagactagccttcaaaactttccttttttttcccctctcttttttatctagtgccctgcctttagaattccagttagggagggatcattttgactggaaattctagctggtgttcttttcttatcacagttggtttggatca

SEQ ID NO: 34534 - DNA, 632 bp, Oryza sativa
atgtgtgggttatccagtcaagccccacgtgtggaaattgattttcacaggtggtgggtataatcgaaatataaaaattccacaagagatcgaatcatgacgacaaaaccaagacattatatttgcctaattatggactctcctcctcgatctagtataattacaatgtattagggtagccatgacgatcgaccggttaggcagccggtcaatttcccttccctatgctatagttgccatgcatgttgttacaacatgtgtacatctctatttaagagagagtctaagataatatttgactctaattctattctaacatatattgttacaactaaaaaatctaatttgtaactgattttgtatatatattcaacacaaactataacagtgataaatttgatggtataatactatacgtagaccgacataaagatactcatgtgaaaaaaggaattgcattttggtagaaatacagtttgtttggcatctacatccaacctaaacaattttaactccagttagttaaaccacatagttatctagctaaacatgatgtttgtgagtgcactgacaccgatatctactctagattttgaatcatgataacctagggatacaagggctgcaggaat

SEQ ID NO: 34535 - DNA, 937 bp, Oryza sativa
agatttcaccagttacaaaattctaaagcctttctttagccattttggggcctggaactgcacgcaaatcaaacccatttccaacaaaactaaggtagtattaagctgactggattatttaccctaaacccccaaatcaactaagccagaaaaagtagaaaaccacacaattttcaactatttccagtaagagaaaactgaaaattaataagcgaccccccccctcccctttttttttcccaaaaactataaatagtttacaaaagaaatgttacattgggcagattcgaagcaaatcagcaacaaattcccatttcacaaaacttgctgaattctaggcatagtctactaaacttagtcttctcttcttttttttagcaaaatatcttggatcctcatccaagtgtacaagaaacccaggaagcaacagtaatttgatggtttcctatccatgtttttttttccagttggggtttacactttacacacatgtatcaatacttcaatagtataactgacatgttgtgcatatattcaacaggatggtcgcattagctatcaggagtttgaatcaatgatgatatctggatcagactggagaaatgcttcccgacgatactcaaaagcaaatttcagctccctcagtcgtaagctgtgcaaaggaaattcatgaaacagaggaggatctgagcaacagttacttactgagtgcatcaagcaatcaactaaaaacaaagcatcagtggacagcctaaaatataaaaccagattactgggtagaggacatcagcagggtgaaaggagattttgtatctcagttgcatagatgacaaggttcatcaagcagcgagccctatagcatcgtcccttgtaatggaatcaagacattccatatctaggatatatattcatgacttagcataggcacatgtaaggg

SEQ ID NO: 34536 - DNA, 672 bp, Oryza sativa
tgatgccatttttttatttgatcgtgtttggcatatgaaacaattaaataaagaggccctacaatcccataacaattggttttgttccctcctgaccagggaatcgatcataataaatgaagcgggacgtacagacaagcaggcgcctcgctgtcgacgggtatgtcgcctaccactgaaagcacaacgccatttaatcctggaaaattcgctcccatggggagtcgaacccaagacctcaggtgctactgagtctcttgtaaccactaggctacatgcccttttgcagataagtgtaatactattgaaatcacttctataattttttttctagatttttagttgcgtacacgataagacttgtgtgcacatacacctattcttatgagcatcttggaaagattgagccgacatatataactaatttggcagcaaatcaaacgaagtcattgtcaattcttgctaaaaatttggtaatgaccaatttttgctgtgccaaaaaaaaaatgctaacggcaatgagccaatcggccaaacaagcgtatagcaaatttgcactgaggcctacctgttacataatagtacccctacatatatattctccaaactgttccatagggaccataaaaatagtggaaagtgggaggacctgggtacaatttatccccactg

SEQ ID NO: 34537 - DNA, 682 bp, Oryza sativa
ttttcctgtcctcctaaactctcagaggagtcaaaaataaaaatcggcacctataccggtttataaaaaaaaccaacacatataatgtaagcgctggttttttaaaagacgacacaaataaaaatactatgagtgttgggttttttatttacccgctccaaatttagagccccacaagcacgcaaaaaaatcagcatggagaaaaaaaaaatcatgtttgacccatgccgtgctaccctgcccattaatctctatcccttatctcctcgttcgccccacccccgccatccctctcttccacgtctctctcgattcctccatctccctcctttccatcgcggcgagaaggaagcgacccacctctcctagccaacccaacgatagcggcgacgaacaagctgtccggtctgactcctgccgcagttgaccatggcctcggctctctttgctagatttgtcggcgacagttgtatatacgccagatcccaattcggtgtgcatcctggtgtacctatatggattgcacatggaagtcttgaaaaatgctggccaactaaaattgatcaaacatagtatatttgacttaggataaaactaaaacaacagaaatatttaatttatgataaaactaaaacgataagaaaaattgaaagcacatttctatcgtttcgcatatgtttat

SEQ ID NO: 34538 - DNA, 866 bp, Oryza sativa
tacactatagatatttgtcaaaatataaacaataatatagtgcttaggagattatcttggtagtattctttaaaaaaatgactttgtcccggttacatataaattcctcttttgttttgggataaaatttgactcatcgaaattatgtgacgaagggagtataagcaatataagtctatctttaattagataaagtagtctattagctacgttttaacgaaaaataatttcattaatatataataaatccataaagtcatctatagcacacaataaaaaatgttagtaaaattttggaaactgaaatgctaaattctaaaaacgaatcacatatagtacaaatatatatgaaccaactccatcattgtgacacaattttttcttggttgtacagtttcaaacaattttagtatagagtttatacgttgcaaggataatcagaagaaaaacataaccaatgtccaaacctattattaaccaaaatatgtttaaaatggactcaaaaaaatatttcaacaatatcatcctaacatttgtaataaaaactaaagcaacattaaataaggtgtctgcgcgtatgcgcgggctactttcctagtttgtaataatgattaatcataacatctttaatgggtgcatagttgatggttacatcagcatatcacagacacacatacaaatatatactatatactcatcactaatatatataactttgaatgatataaagattagtcggatcatattaatctttattaaaagatgaggttatttgtaaaccgtgtgatttataaaattatatgcacaacatttgttggatctttctaaatataggtcaatgatctatatgtaattttttttcctca

SEQ ID NO: 34539 - DNA, 694 bp, Oryza sativa
gttagagaaattaaacgagtaatatgcaagtttaggtactgggatgacacagtcgaataagtttgaggatctaaacagtcgatttgcgagtttagggaccgggatgacacaacggtacaagtttagggaccggtgatggactttactcttgaaggagtttccattcttaaatagtatattttcatatttgaatataccttttgtataatatcagatatgtggtattcctggtagttagaaatataagtataggatgtattcataacctgtaaaactgacacacatatatatcaacctttaggaaactttatattctacagttattgtgaatccaacaggtgagaatacagagaagccgagaatctaaacaaaatgttaatttttttggggggctttaattctgtaagaagttattacgggtagtagaaatactattataggccctgttctaatgtaatgaaaaggatggattaaattttgtattaaagtggcacgttttttaaattgctaaatagtgtgtttcgtgcgaaaactttctatatgaaagttgttctaaaatgtcagattaatccatttttcaagtttgtaataattaaaacttaattaatcacacgctattaacacctcgttttgcatgaaacacttaattttcatcttcagtagattcaaacaccacctatgtcgctatgtgtca

SEQ ID NO: 34540 - DNA, 682 bp, Oryza sativa
tggacgccacggcatcacctgccggtgttgctcacgagtgcaagagagaccaaagatgattaagaaatgccgtactcacttaacggccaccgttcttcctctcatcgccatcaattcagttagtgaagagaacctaattgcagaggttaattgctactacctacttctaatttttttggatgcttgactagagggagaaagacttacgttgttcacagttgacgatctagtagaacgtatctgaactttgtacacaatctgtggttggttctgaaccgaagcgcggagcgccacatttttatcagcttttctctccctgcatgttgaagaatgttcagtccaaaaatccaatggcgtgagcatttgaaaaagatgaatgatcaagtaaatgtacgggagaaagccaaaagccgccatgaatgggaaggtgaaacgagcaaaggagttcacctccacgactccttccttccattcttcatctcttgctttcaccttgtcaaatctcaaatataccaatgaacatgcgtgcagcctgtacatacacagtatgtgggttgttgtctgcaaatcctcaactgttccggcgaggcagtttcgctgtgttgagttgagtgactcgaaagtcaacatgaggggagctaatctgcatgtcacaatattctcgagcagatcataggatcga

SEQ ID NO: 34541 - DNA, 563 bp, Oryza sativa
catggtattcatggacgtaacaagctcattattgatgaaaataaaaagaaattgcagattacatccaatatagaattatacaaaacttcctacatcaaataggttccagttatttgtttccattatgaaggtttacttctacatggcatgctgtttcatcaaatatcaaaggaaaagctgatgtacagattagacaaagcatctgccaaatgaacattagtcctagtgcacatagcagatgatgcagcacacaataaaatcaagaggtctactaaacaaaatacacttctacatatgtgtgtgcgcgcgcgcgcaagagagagagagagagagagacctggagggatgtacccatgcaccactcgctgccaggacgaaaggggtttcatgtaatgcagctctcacagaagtatcattttctgccaatagtttcacatcacggagaattgctgaaacaacagctggttgtgatagaaactcggatattcgaggaagcacgtggtccttgtaaaattcagccttttgaagttccctaatagcaaagtatgataccaaaattgact

SEQ ID NO: 34542 - DNA, 1416 bp, Oryza sativa
atccctcaactccaaaatcaggtaacctatccctcaactcttaaaaccggagagaattagtctattcaactgtttggcaattgtttcacgcacataagcacattgcacacaggatctgagggggtcaaaacctatttttagcaggatgagaatggaaccatgctaagagttgagggatgagagtgagactttttgtacagataatgatacaacagctttaaaaagagcaaactcatactggcacccaagtattgatgtatgacaaaacttatattcattgcactataaatggaatgccctcgggatgtctctctccttggatccagttttttattgaactattagatggtgaaaacttacttaaatgtcctggtagtctacacatccattcaacatagagcctcattctgatcaacattgaattaacttatttaatttcagtgttacctgcttggatgatgcatcatactcttcctgccaaccattgccaattttgtcaattgatgaaaccttcctgtacttgcttttaagttcaaccaaaggcatttcccttgagaaaaagagaaggatgaagtagttaaaaattgtcaaccaatcaccagtacataatgcatttaataacaagcaacaaataaaagctatgctttttgcataggatggatctctatgaagaaatgaaagtatttattgttccatccctagtcaaaagatgttttagaatgcttgccgagttgcagtcaaactcaataatatatgccaaaatactagatttttttaaccttcatataatatgtggaaatgacatcagtagacttgtcatccaaaataatttcacataggtaatatctttaatatattctatgaatttatgattacaaaaaggcaatgataaacatgttcattggacactgtggaaagggtaaaacgatgaatcaagtaccttaaagcttctccaacagcaggacggattactctgtacattccttctgttgagctggtgaagtaacaaagattcagatcatttatatatcgcaccaagcatccatgaatttttttatatttgttgtcaaccaaggaacaaatgaaaaacataatgaacaatatacaaggcctgtttattccaactaatatactaaactttagatattcagctaaaccactaaaacagatgaatttcatctttcatgaacatactctttccgacctatgatacgagggattttggctatgcaaatgaatagccaaaatgaattgttttatgggacagaggaagtaactattaactactacctctgtcccaaaatataagaactttcaaggttggacacaggtgttaaggaattagttggaatgaaataggggaaggttatgattggttgagaagaggaaataggtggagaaattaaatggggaaag

SEQ ID NO: 34543 - DNA, 534 bp, Oryza sativa
taggggccttattggacctgattttttagtctcaactctcaaaattagtataggggctgtgtttagaacctctactggagatgctctaagggaaaatatatggaatggagcctctgcaaccctaattagtgtggatccatcttatatatattgtcatcacataatatttcatgataggaaaaactataagctatagaactttaacaccgctgaggtcgataacatagcacacctcaaagtttaggtggatcaaacacgttagccacttgccactaggtcatggctgatcagtgacagtacatggtggattggtgccgccctgatgcttagaccattgctaagattttcagcccgtgtcaaaagacaaaaaaagaggtttctatttaacaaatactaaataaacagagtacattttacttcaatctatataaatatagaaaaattgcatgaatttcatgtgatcaacgtcaactatagctataccaaaggaacttactaactgacaacgatggtgatgatcatgactaagtagga

SEQ ID NO: 34544 - DNA, 671 bp, Oryza sativa
ttgaaatcctaactttcgtgaagtgaaaaacgatgttgggactgttctggccactaatgatgaaataaataatttgccaagtgataatttgatgggaacccttttggtcaatttatatcttcatgaaggagaattcaatttcattgtgactttctagtgtttcacgtattatagagagagaaaccaggagagaaaaatacaagaaaaagagaactactccccccgtcccaaaatatagcaacttgtctacctacattttcttctcaaccgatcacaaccttttcccatttaatttctccacctatttcctcttctcaaccaatcataaccttcccctatttcattccaactaattccttaacacctgtgtccaaccttcaagttcttatattttgggacagaggtagtagttaatagttacttcctctgtcccataaaacaattcattttggctattcatttgcatagccaaaatccctcgtatcataggtcggaaagagtatgttcatgaaagatgaaattcatctgttttagtggtttagctgaatatctaaagtttagtatattagttggaataaacaggccttgtatattggtcattatgtttttcatttggtccttggttgacaacaaatataaaaaaattcatggatgcttggtgcgatatataa

SEQ ID NO: 34545 - DNA, 744 bp, Oryza sativa
cagaaccccagagtccgcacatcctcaaatacaaagcacttccctagttagatgtaggttagacttcccgttcgagaaactctaccttctacctgccctcaatttatgcacgattaatgaatgccacctgggtggaagcgagaggtggaaatggaaggtcttagttcggaggtgggatctctacctgatagttgcattgccattcatgatgatcccctggcattcgtccattcagccattcaccattcacccattcaactggaattttggttgaatgccggaattgtgtccacaaattgtggatggatagttggttggctggctggatggctggctggatggctggctggatggatggtgaatggctggcggcggttcggttgctttgaagcatttgttgctatctaaattccatttaaggtcgtaccttatcggccagcatcatcttattctctatttgtattccctccatctttcagatacggatgtagccttggatgtgcccgtgcccaatgaagaggaagagcgcaacatgaaacgtaagtacaaaagtaccggacacccacccagatcccaatagaatccgccaaatcctgcgggaaattgtattcccattcaccagctcctacatttaattaacaagagaactattgtatttatctaacacctggattatctccacctttcatttgatccctatttatagattacgctgcgttgctaacgggccgcacctcctatttc

SEQ ID NO: 34546 - DNA, 545 bp, Oryza sativa
gaggtgggccccccaccaccaaaaaaaaaaaaaaaaaaaaaaaacctgaagaaagaagagaggagaggaaagagagggaaaaggaaagaagaagagaacctcgcggggtggcatcagcccacgcaggccctcagcattcagtgtcattgagcatgtaggctgtgcaccacctgtgctacccatgagacgatcccaggtgcctgtggaacgcagagcaagaacaccactccctccctttccacctgcatttccatcttgatcatatggaggagaaagtcttagtttaaagctagcctgtctttgacactttcctactccctgtcaatctccattttaaacaatgaaaggcccggtctcaggccataactttggcaggtaacagtgtaaggttagaatttaatgatgccatgtaagtttcatatatatgtatgtttagggttgccatctatgtaagacaactgaagattgttttttacttacactggtcataacaacttttaagaatccagttcaagtgagttgataaaaaggtcaagtccataata

SEQ ID NO: 34547 - DNA, 921 bp, Oryza sativa
aacttttttataaaaacacactatttaaccgtttgaaaatcgtgctaacagaaaataagtaagttgaagtttcgagtggagaaaaaagaactagggcttacacaagggctaacagactcatcttttaacccatgcttatccttataagccaaaatgtgaattttcaatcttaaattttaagttgattgtggagttttttttatcgtagtttatttttccagtctttgcttttatatcgctaaaaaaacgtatataaaatttttatttataaattattttctgtttgtaaaaatactactttacttattccgtcaataagtggaacgatagagtactaacactattatgaaagctttgattgtaacaaacctggttacgccattttttatgtccaagacatttactattccaaaaaccgtaactatggtcaaaatcaatttatattcactgcacggatttacagacgagatgtcaggcggagtatattccattccagggtccgtttattccattccacaagtcacaagttacagcttcgtgataattgttgttttcctgggcgcgagtagatgcagcctccgctggttgttggcgcgcggacgcggcgtgaccgcgtgagtcgcggcgttttcaagcccaatgatcgctgatgcgagcaatctgaccgtcttctgagttcagatatagaatcgccacaagtggagtagacgatggctcagacatgggcgccacgcacaactagcacacgtagcacaccacaccacacagcccataggtagatgtgatgtggctgcttctgccgtttgctttgctctgcaatcctgcatgctctcccagccgggatcgcgtgccatttgcaaagccaccaaactttgcctttgcctgctcctagtactagttgtactactgtgatctgaacat

SEQ ID NO: 34548 - DNA, 559 bp, Oryza sativa
gtgtgtttctacccagtcatgatcaatcattcacgaagtcagaagctcagagcagaacaagtaaacctcaaaatccagctaagggggtacagagaaatacaggattcacgtcgaattttccaaaatgtaaaatctggatgcttactagacgaccaaaatgccgtcttgttccatgcacaacggtaaactttaccttggcaggcaaagaatttaaccactggtcctactaatcgaagactagactggtactattttttttgccaggacgtacaaaggatgaccggccaatttcattaagatagaagaaaagactagcctggtactgcccctataattagccactcaatagcatcagcctttttgaacagcctagcaatcatgttcccaatcatgaattcaaacagaggtagtacggtcctattattcataaacaggtattactattaggacggaattaacatatattttgttcactgagccaaacactaccaccgaaaataacatttttttttgctgacaaatatgaaatatagagttcatagaaggtgatctctttaat

SEQ ID NO: 34549 - DNA, 660 bp, Oryza sativa
aggaggtataattttgtgtgtgtgcatgaaaagtaaaggggaacaggatgttggtgaacagtgataatgttcccacgttgaaacaggataatgtcccgcactgaaagaatgagatatttatattgatgacttcacagatggagcacttgtgagagatgaagcagaggccaaaatcttcaatgcataagggtactccaaggaggtcacaaaaatcaaggactgagaagaagaagactccaggattgctaacaacgttgacatccatcttttccttggttggctctagctaagggaatgacctcagcctaatagagtgtgtttttctcttcttatgtaattcaggtcttcctgaactagaaattctcctctggtatcctaaactatgtgtcctcactgttgtctctgttctgtaaaccagaatatccctttagggtgttaggaccctcaacattctttgtagaacagtttcttcatctcagtctgccatttctcaaagtccagattttagataatggtgtaatgctaagaatatctgttttttccagttctcccagaaaaatgcctaggcttagcaccagattatgctgtttgatcctgctaaaatactgatcctttatctcttgaggcatttaaacccttccctcaagactcaacataaat

SEQ ID NO: 34550 - DNA, 716 bp, Oryza sativa
cccactgaggaaggtggagggggtgggtgaaaagtgtccagacctgtgatgacatcagacagcctctgagctactgcagagaccccctatacctatggaccacttgatttggtgacattttcaaaatatatccaaaatctgactatttctcaccacccccagcactgccatgtgccccaggccaccacctcctctccccacagggctccccgctgctgctgtggcccctcccaggctattctccacatggtagccaaagtgaacttctatgaacttctacaaacagatcatgcaactcctcccccagaaacccccaagccttctcttcccactctgtgaaatggccaaagcctttaccacatggatgaagtcctctaagacctgggcctcgccgacttcactgacctcaccttgcaccactcccattgcctggaagcccctcaaagacacagagcacactcccttccgtgggatttgcacttgaagttccctctgcctggaacttgcctgtcttcctcctttgcttccttcaggtctctgctcacatgtcatgctattatcaaggacgtccctgacaccctgtatgacagcactgtcctgcagaaccatctatgatatggaaatgcgtcataacctgagcttccaatacagtagccactggctacacgtggctactgagcacttaaaatgcagctagtgtgctggggaactgaatt

SEQ ID NO: 34551 - DNA, 695 bp, Oryza sativa
tagtaataattatatactaagtctaattcaaataaagtatcttatattaaaactcaaataatattacatgctaagactaaaatagtcatgtatatgctaagtgtttcgtgcgtatatgctaagtctaattaagactacaatagtcaattgctacttgtcgcaccaattccgtagtcaataattacatactaagtctaattacaaataaagtaatcttatattaaaactcaaataatattacatgctaagactaaaatagtcatgtatatgctaagtgtttcgtgcgtatatgctaagtctaattaagactacaatagtcaattgctacttgtcgcaccaattccgtagtcaataattacatactaagtctaattacaaataaagtaatcttatattaaaactcaaataatattacatgctaagactaaaatagtcatgtatatgctaagtgtttcgtgcgtatatgctaagtctaattaagactacaatagtcaattgctacttgtcgccccaattccgtagtcaataattacatactaagtctaattacaaataaagtaatcttatattaaaactcaaataatattagaacactacacaatcttatatgataagtccaattacaggtctaataatcttaattaattgcattacaaatataacaatcatttatattattacgtcacttgcctgct

SEQ ID NO: 34552 - DNA, 730 bp, Oryza sativa
atgaagtatattgttggaatgtaaaaatttattggatgagactattatatttatgagtatgtgatgcatcatattatttgtgacaaatttacttttacatatgatataaaaagtttatacttatttattagttattaaaagttcttttatgtagcatatgtgttttcatagtaatataacagatttgtttattacttcagaacacatatgctaaaaaaatcatttaataactaataaataagtattattttttatgtcatatctaaaagtatatttatcgcaaataatatggtgcataactatctcataaacataatagtctcatataacaaatttctatgctccaacaatatgctctattaatttatatgcttctttataccaaagggcaaaatggattttttcataagaatttaacgatcaagtaacggtcaactagcggaaagggcatggaagggatctaaactaaaattcagaggtatgtaagggattgatcaaaattcaggggtacagaagggattaggtgaactttcaagggtacacaggagattttctcttaaagttatgttaggcttcttgtttaatatatcttgcttgttttgatatcttagtatagagtggtatcggaatattagccgatacatactagatctatttgatcggctatgctataaacacctatataatctttgctttaatatatatttcgacttaagtgatttatactgtc

SEQ ID NO: 34553 - DNA, 2122 bp, Oryza sativa
agtcaagagacaagacatgcatttaatgcaaagattataatacttctccaccggagctaggttaggttgttgggcccatgtggtaaccccttgaggtataaaaggaggtccaggcctagtgatggagggggggacttccgagcgaactggcgcttgggtctcgcaaccccaaacacttgtgttctacactcaatcaatcaagcacaggagtagggtattacgcttctcagcggcacgaacctgtataaaccccttttgtctcatcgtctttgggggatggaaccccctcaagatcacacagcttcgctcaccaagccctcgaatctcacccgctgcccccggccgaactcacaaaggggggcctcacggttccctggtggaggagttctttctccgacaaaatttatttccaaaatttgataacagtgttacaaatgtggcgtgcatgcgatcaatgtgtgggaagcaagtatcaaaattaattaattgaaatacagaagtatgcacgatatgatcgacagtggtgtgtatccccaaaaaaatttagcgtcaggcctatgtataaaaaagaactgaggaattatatgtaccagtgagcatgcacgtgcaaggcacatttttcaccatttatgatcttttcaagctgaatttatcaattgtcaaattagaatcttaagatccatctaatatatgttgtttgtttccatctaaaatattaatgtaaaaattagaatgtgtcgtttccatcacaatttcaaaatagaaacataaaataaatattgaggttctttttgcacttccatcaaaatagaataatttgtagaagtatctttgtatccatttccattcactgtccaacattttcacatattgatgaatcattgaataataagtggggaaccagttcattattgaaaggttaaccttcattatcactactacagtattaaggtgctattgcgtgtttaccaacatgtaatactatatatcttaaaggtgctatcttaaaggtgctagagtcgccgcaagcccacccgatccacgtcatcaaattttgcacaaaacccctcattattttcgtatttctaattgagtccacgtgatcaaagccgttctttcccacgcgtggacaaaatctggccgttcgtttcctagttagtataatgcaacctaattgactgaggggttgaatatattggttgcgcaagcatcacatggagtaattctttccatgtgcatctttcctatttcttcgtagacttatattctgtcatctcttggcaataagctgtgcttttcacatccaatgctcttatattcactccgtctttcatataaaagcattaattgaatgtttcatgaacataaatataccattattagttcataattcgttccattgtcaatgacataaaagatatgatattcataacattttggctctgttcgaaaataataaacattatttcgttagtcacacacatccagttaaccaaatatgcttagcacacaacatatcagttatcaccactaatggcttgttcctatgaaaaaaatttagtgtaaagaaatacatggtctacaatccacataattgatataatctcaaaatgagcatgaacaacattgctcctaggggaaaaaatattactttcagccttttaggttataatcttgacaggttaaagcacttccatatttcacctgacaaaattatcttagtcaaaagatgtttgaagcatttatacatttcacatgttaaattgagctatgcttctagaataaaattgatcaagcaaaacacaatgtacatgaaaaaaaaatcacatataacattgaattcaggttcctatagaattctaacctcaattttttacagggccaatggcacatttcattgagcaacttatctatgtgcatctatcttgtggctgcagcagtgcacaaaaaattgagtacagaccatatttacgataatggctgctcaaaatttcttgttaggacagcggggataccgaagtatttcatcgaacatgtaggcatgtagcttttgtaccaattttcaccatcatcttttctatctgccataacccgtccgggagaaacacaaaactgatcaatg

SEQ ID NO: 34554 - DNA, 3059 bp, Oryza sativa
ggtttattggggataagatagaggaggtagagaggaattcgtttttgccatcaatttgggaagggaagcaacggattcaccggatttgatggaggagacgccggctctcgggaagaacacggtctctggagcttgaagacgcactgtagcgagagggaggcgaattagacttttcttcctgggctggctgaaaacaaagcaaaagaaagaaagaggaggaactcggctgggccgacttgggctgcacagcacgcgcgcgagggagagacatgttgggctgaaatcagcccaacggcttaagaggagatttaaaaacttttttcaattaaaataatcactgaaatgatctttgaattgttaaaaatacttccaatgctcaaatagtttcaagaaaaatcctgaacatacttaaacactcaaaggacttaaaaaaattataatcagaccatttaatgattaatttaatatgtagataattactgaaatgttctttgtatggttaaaattaggaattgagctccgaaaaatccgagaatattccagagagtataattaaccatggagaatttaataaaaattaaatccatccatgctttatatttaggaaattttatttcccatatttaacttcacttgtaaattaatgaacatttaatataaattctaataataatttattaaataatttataaatcctaagacgaaaatcaggatgtgacattcggcgcctggcagcggcactgtgggcgacatacacgcccacaggaggaggaagagggaggcaatatggacttgtgttggttgagctgagaaggaaggtgggctgaggagggaatttcggcccaaaagaattgtttgtgaatttctaatagaatttgaattgtatttgaagggaatttgaatgggaaaggatgaaaagaatttatatttggatataatttctgaaagatatatttttttagtttatttgagtgcaatatcttagaggtggcatataatagaatttatttgatgcaatcaaatgagaaagaaatatatatattagcatggatactatgattcctaaaattgaacctattattaggaatgtgggagggaaataaatggaggaagataaataggacttttagcctcaaaatatatggcatgggttgcaaagaattgtttgaggctaaaaggaaatttagatgacaaggataaaatctatgttcttagcacaagagcaattattcacaatatttgtaataaaattattcttgtgccgagaagaaaatcaagctacaggaattaaattggcggctggatcaaaaggaaggattacgaataggtttggaatcaaaggatgggtcgagaattaaattccaataaaattggaattgctttggtttaggttctagaggaatatgggaaggtttattggaccataattcataaaagtaaaaagggttttcaaactaaatttgaataaaagaattttagtcaaaggaaggttttaaaccaaatcaagaaatacctcaattcaaccacatgtattttaaatgaaaaacacaaaagaagttaaataccagaaagagattttatgcaaattagttttagaaggtccctctaattatattttcctaggtttaggaagttattaagaacataagactcagcatgatgcagaattagaaaatggttaattttcggtatgttacagatttccccccattctattctcatggccctgcgacgctcgcgtgttgcgcatttgtttgctccctcggtggtaagagcccaacccctctcccatctacatgaatgattcatcgctaagtgtgggggctaagttttctagccttatcctagccttaagttgagccctgggtgccgtcgaagccagggaccccctgtgctggctctttcgtagcagctggctttggtcctaccggctggccatggtgcctggcccggctcaactgtggacggggattgctggctctggagtttttcggctctcacactcgtgcggaagtaatcgtccatgtgggagcaaaagagattggaaggaggtcaccgaaaggaaagagcgaacaaaatgtgtagtgtggggacgcaggctcgtgggaacctgacctcatttgctaagtggtcgcagcgtttgctaagtggtcacatgcttcccaaatggttaggaacccatggtgggaggccctcttcgagctaacggtttgaaaggtcgcgacatgcaagcatggtttgtgtttgcttcattcatacaagcgattctttgctataagtgtggggggctacgattcctagctccatcttaggcctgcgacgagctctgggtgccgtccacgtctggggccctctgtgctggctcttccgtagcggctggccacagcgcctagcttggcttgatcgtgggtgaagattgttggctatggaaaatttagtcctcgcactcgtgcgaagataatcgtttgcatagaattattattgtttatatttatctctcatctcttcctcgcggtcccgcggtacccacgtgtcgcgcgatggcttgcctcccttggtaacaaaaagtttgtattcgctttatacatcgaaacgattttttgctaaaagtgtggtggctacgattcctagctctatcctagccctgcatcgagctttgggtaccgtcgacgcccgcggccccctgtgctagctcttccgtagcggctggctttggccccgtcggctggctacggtgcccaacttagcttgatcgcgggtgaagattgctggctatggaaagttcagtcctcacactcacgcgaaaataatcggttgaatagatgaagtagaacacgaacagaggttaacaaaaagcaggggcaagcgaggtacacggtgtaacgtcacgggcccgagagaatctaacaacgtttgctgaatatatacagaaaataagttcatagcctaaggtacgggctagtgagttgccctcaggctagggcgaaaaaggcgcatgggccttagttccagctaagaaagaagaagagattggacccacatatcatcagactaggaga

SEQ ID NO: 34555 - DNA, 944 bp, Oryza sativa
ctccaagactctaaccagtctgaaaatacatcgtttagcataagtacgtagtgatctatggcataagttttcagaaaatgcactgagcatttttctgtaaatttttgtagtccggagaacaatctattggattttttatccataaatgaatgaagctgatacctgatcgagggaaagttagaaacatcaatcagcaggtcaccaatttttgtcttagtagcaggcaataataatggcatcgattgtcgtcgctgaccaccaggatcgtcaccacgatcccccactgcatcggatgctcctttccggctgcaccttagtgcgttggcataaacgaaaaaacctgattgtgttgacaaatctgttgtggagttcccatcatttttcattgtattaagatgccgcctcctatttgtgcagggttctaccaacgtttaagtcaccaactgaaatagaatagaacatgtaagtcagaaactgaaataacctggtttagaggaaggattcagtttgtactgttaaggatttcctcttaaccagactggttttggctagtaatagggatagcaagttcagcctttatctccattctcctaagtattcatgatttggagcttctacagacgtagcatattaaatgcttcagaaaaccacttatctggaacatatctgccaacgagcgaggagggagagagcagacccggcgagcggcggagaaggcggcgacccacagcggcggcggcggcgcgtcccgcggctccgagcggcccgctccctcggcgatgacggcggcaccctgctcccagtggagtcgagcaacagagacggcggcgacacacggatccgaggcggcgacgggcgcgtgtgaggaggcggcggggtagggcgagcggctccagcgggaggcggcgccattgggcgcgcagacactcgcgagcggagcggct

SEQ ID NO: 34556 - DNA, 1236 bp, Oryza sativa
tctgattagccatgacttgggattgtggctgatctttgagaggtttgacgtgggaagcttatagaattgagctgagttgatccatgaaactgacgggatcctgatccgttgaaattgcccctcacactgaccatctgctgcaggcacgagagagagggggagggaatgagagggattactagagatgaggtactaaaccacttgcctactgatctgttgtgagtagacttttattgttcaagttgcttaagcaaacaacctagtatggtcgcatccccaccaatgatgcaaaccatacccctacacacaagcaaacaacacacgacctagcagctaacgaaactactcttccaggaagtattgggtttaggtaaactccgggaaaactctccttgatcttcgcggaacgacgactctgaactgaccttcccgctctttgctgcatgaagcttgatgcttgacttgacttccgaacagacacgaagctgacggtttatcctccacggtttaacaactataagaattggagggacagggaggagaattttgaaaaaccgtttcgcaaagaaaagacgaagggcgaggggagacatttttcaaatagggttttcagaaagcttgtccttagggtttgaccgtttggctcaacctacagtcgagttggctctgataccactttgtcacgcccagaaatttaacccaaatttccagactattttgcgtattaaatccctgtccaggaccagccagggtacacaaaacgacaagtaatatacagttccaaacgtaaataaagcgtaaaatacttacagaagaggcacttagtcctcacaccgaaacaaaagcagcagcagcggaaaaaggcgatcctagcggggcttcagctccactccacaggcaaaactcaactggggtctgagccttggtcctctaactccatcttcagctcagaagcactacacttctgaaaagggggaataatagcaagactgagtacaaccaccgtactcagcaagccactccaacgatgcagacgtgcaaggggatacaaggatggtttgtggctatttgcataacggcggttgtaaaacattttattgagcaaaacagtaaaactgttgagtatttagagtaacattaaatctccactgatcaacgctacactacgttgaacaggcccagccaacccaccagaactacagtgcattgagtcgatttattaaggggactaatcac

SEQ ID NO: 34557 - DNA, 2243 bp, Oryza sativa
ttcaattacctaagaggagtgacatggggttgccattccctcataaacatcatcaccgatattgacatttacaaatttaaccaatggaagattcctcgggctttcggttccacccaacagacgaggaattgcttgtcaattacctaacaagagtgaaatagggttgtcatcccttatacataccatcaccaatattgacatttacaactttgatccatgggagattcctcagggtttcaattccacacgacggacgaggagttggttgtctcccaaaatgtatcgagaaaatgcctttacacatagaaatattagataatgtctcccaaaatgtctttgccacacaattttgcacatatttctaaaatcacctcaagccatatctaaaatgtccctatgctacaaatattaaggtgatctttatcatgtttctaggcgaggagtgtagattatgagacttcttttagaccatttgaaattgtctcagcatggagagttgccctttttgtgtgtttccttgtgtgtttgtcctaccaaagctcacatttcttggtggcacactgtggcacacttaacattgtagcacacatgcacacctttttgccaccccttgaataggccactacttgacagcctcattggttggctgttgctaaggctgattttcagcaacagcccatcggttggctccttagactatagcatcagatgatagaaaaacttatgctgataagcatcagcctagttgtgctgatatacaacagcatatgccaaccgatggtggcctgaataggccactataaaagaccatccatccttgaccaccatcacactaaaggaactcaacaatagtgaggattctatcatattctcacttatggtgatgtggctcattttcttggccagcttgccaatggatttctagtttcatccgacagatatcgtcgatgttgccaaaagattgctgatcacgacgggagtgttgtcatctcattaacatcatcatcgatattgacatatacaactttgacccacgttttttattgaatatccatgttttggtcatacatactttattattgactggacagatccaccggttgttgaccttgaaccactggcaatggaaaattctattattgatgacattaatgttgtctttatcaatgaggcaacgaccaaggctatcctaatgaggatgatgttagccacaaaattgatacaaaaattctaaacaataaacaacatgtgtaaccaagagattgatgctcatggatcgtagcttcatttgcggccagaatcaacaccgagcatcaggagtgaattggtggatggttttcatttcctttaaaaattaaaaataatttattcatcgtagagaggatggccaaaggcttttcactctctttttgtttgtggagtggcataacaaactaagttgggttaaccagtatagcttaatcgataaaaccataataaatcagttttaagtttgtggtttccttgtttgcatttattataaggctatcaatttgtacttatgtgcatgtagtttatgtgtatgtagtataccgcacaaactcagaagataaatcaaaattcaacatgtaaacaaagttggagaacaaaggaggtgatgcttgaatttatgtaaagaacacggccgtgttcttttctccaacaaaagttggattaaattttggatactcggggcacatttttcaaactgctaaacggtgtgtttagtgcgaaagttttctatataaaagttgttctaaaatattatattaatctatttttaaagtttggaataattaaaactcaattaatcacaggttattataacctcgttttgcgtgaaacacttaatcttcgtcttcaggacattcaaacaccacctaaatatagagtttgggtaataaacagaatcttgtgtgaaaaaaaatgtgtaaagaaacactttcaaaggagtttgtgcgaaaaggaaaaaaagaaaacccattcccttctcacgcaagaaatagctacagtaccatcaccactaggctgctactgctagtgctagccagcgtcgtcctcctactactcgtgaggcgagagggcacgtgacgcggtggggcccacctgccagccaacccagcagcagcagcagcagcagcagcagatggcagcgaccgtcacgacgaccgcgcattgaatgcgggagggagacgcgtctactctttccgtttcgccccctcctc

SEQ ID NO: 34558 - DNA, 998 bp, Oryza sativa
tttcatttgcccttgatatgattccagatttccaggtacacttctatttggcagcgtgcgtcccaaatgcacagctgagtggtggatcaggcatgtttataggtcaggtctcatgtgacggcgactaaaaaaatttcagcaatattcacttagagggtgtttagatccaggggcttaaagtttttgcgtgttatatagagtgtcgcatggggtgttcagccactaataaaaaactaattacaaaatccgtccgtaaaccgccagacaaatttattaagcctaattaatctgtcaataacaaatgtttactgtagcaccacattgtcaactcatggagtaattatgcttaaaagatttatctcgcaaattactcgcaaactgtgcaattagttaattttagcctatatttaatactttatgtaggtgttcaaacattcgatgtgacatggtgaaaattttgattgtttcatctttggcaagcttgaaaaatatatatggcaaatctatacaaccttagtacataaccatacaaccccttaaaccggcatacataatactccctctatcctaaaatataagaatctaatattgaatgtgatattttctaatactacgaatctggacattggtcataggtttttatattttaggacggagagagtatctcagatggaacgctttaaagggctagcagaggaaagaaagttaagagaaaagaggaaggtaaatatactgcaaacaattaatcagcagtactacctccgtcccataaaaaataatctaggattggatgtgacatattctaatacaatgaatctggtcagaggtatgtccacattcatagcattaaaatatatcacatataatactatgttagttttttatgggacgaagggagtaccgatgaaccacgacaacaacagatgagtcggtgaattttactgtagtacagtacatttcaaccgtgagatttaaggtcctgttcgtttctactgaaa

SEQ ID NO: 34559 - DNA, 3600 bp, Oryza sativa
gaatgcttaaacgcagtaatacattttaaaattggaggggtattttttaaaattggaggggtattttttaatataatatagtagcactcagtaattctcttacatggaaaatgaaggaatagttttaatttaattataaacaatggtttcaaccgatacctttgatatttgccagaattttatttttatttacagtggactctcctgtagcagaaataatttgctccctccattctaaaatcaatcaatttttatttatttcatgtataaaagtagatttattttggggcgagagagtatatgttttatttgaagtgatcgtaactacaattgtgcaatataaccttttttttgtattgtcattttctaggtttttttttataatggaaccaacctgcttatgttcaagtggtagacttgggctaattattagtgataagcattgaatccgtcgatagctagatgtatgtgatcttccgaaggtgcttaaaatatgtctgtctagttttctcataggtgtgcacgcgcttgtttatagaggatgtctagttttcttataggtgtgtgtgcgcgcttgtttatagaggatgagtgtgccgtgtacgcgtgtgcgagcgcctctgttttactatatttcttgaggaaaaaaaaagggaaattgcaatatccgaaaaatgctatgggcttggctgctcgatgaatcggtgtgccaatgcccaaagactccaatgccgaagagccaatgcagcgcaccgtttgttccatagggttcaggaggctgctgctcatggatatcgctgaagtgtacggcgccaatttacgccactcgtatcgtacaccgtcgtataccggtatatatacgatcgatcgtacgtacgtgcgcatcgccgtcggtggccgtacgatcgacgtcggcgggggcgaacgaaagcgaccgaacaaattaagagagaagatagatatgaatatgcatgagtagtggttttgcagagagaaataaagggaaaaaaaaggaaatgaaagaatcaaaagagatgagatagaggtcgcaagagttgttgccggcctttgctggaaacggcccagttgatcaaaagagctttttttttttaagagacagtacaaactgggttgatatatcttgacactgataaagtcacaacccattgtcaacggatatgtcatactgaaagaataattagtcataaaaacaagcattaatttaaacccaagtatactagtttcaccacaataagttgtgttatgtgtgcgtgtctcttatcatgcctccctatcccttaaaaaaaaccaactccttttataaatttggacataggttatgtttagatttatgttacaaattttttttaaaaaaaaagagtagagtttaaattacattgtccaccaatattgcttataagcgtgtttcaatgcaactttaatttcagaaaaaaaaaaatggaaattttcattatcattttgttacaaaaaggattgtactccggatttcatattaacatatatgaacatttcaagaatctcttccaatgcatgcatacatctaaaaacggttttctagcctcgagccagcgacggacacaccataggattttcggctttttgcaaaacacccaaatagttttgcaaaacacccatcatatcacagtgtatatattaaatttatttgggtaaaaaggaagatggacataaaagaaggaatatctaggcacaaatcttatttattgtagaaaaaatcttaattaattaagatcacattccattaatatcctaccagtatttaagtttgtaccctttatgcaaaaattttctgcatccgccactgtggctgagcatgattttgtatcacaatctcgatggcctatgatccaggcagtgcgcgcaaaccgcggcatagtgcaatttgcaacctgcaacttgcaaattaatttcatgatcaacgtgtatactgaatacatacacaggataagtgatcagctgtccgtttcagagagaagcaaatggttctaggagctactactgtaatctcatcatcaaggactggacgtatacgtgctcgatcgccgcgcacagatcgatcgattgttcagataagatcgacgagagagacacaaacacaacgtacgtcacacgtagcatcgcgcgtatcttatctttgaattgacctgaattgaatttggaaggccctgagccggcagactagagatacatatctccaaattaatactacaaaagacaaagccaagccagccaagcagagatgtactacgactagctacagatggttaattgattggttcgtcaatgttcatctatacgctaactaatcgctgcatatactgttccctctgtctctagaagtccaatgctaaaggtaaatatgaacgcacatacatccagattcatttctagaatagattagacttttttatagaggaggtagtacttatcaaattgaagttaaattatagaagaacatgattactaattaacatgatacagtacgctcgatctgaaatacgcatgaatggcagcaaattataactaattaagctaactgatcatcaaattaacttacactgcgattaggcttgcaaaattgcgttggatttggccaagaacaagagctaattaacaaagctgaagcgctcgccttcgatcgtcgtcgccacaggccggccttacatgaggagcaggggccaagatgtagccaagaacaacttgccaattgatggatggatccatggccagctagcttagcttcatagatagatcgatcgatcggcaagtcatccttggctgcaccatggcctccgatcccaatgtcaggccgccggcgattcccggctagctgcttaatttcatctttggcaattaaccatagctggcacagcgaataatgagaggaggaagaagaagaaggagaaggagaagaatgatgagttcagatagcaatacagcacgcactgatggcccttatatagactagactacgcgtgctctgatccttccttctaattcttaaatgggattaattaaaacgagcaatttaattaacacgataattaaggtgtgcagtgaggttggtgccgaatcttgagcagggacaggtcctggaatgatctgggcgtgtgtgggggccaatggagaacatagttcgcaatgatcgatcgatcgatcagcacatgcagatgcagcgcatgcaggatcttctgctataaaaggtacaactgagcgtactgtgcatcgtcagcgaatcactgcgtgatttgatttttcagggtttcgggtctagtaactcggggattacacatgtatatccagctggcacccctccatgctgtttctttctctctctttttcggttttttccacctttttttcagattttttttaattcttcagcacacatgttttcaaatctcgattcgaaagtttttcaaatctgattgaaagttttcaaatctgagttgaaagtttttaaattttgtcttacaaatttaaatttcaagttaaaaattttcaaagtttgagttgaaaattctcaaaatttgacttcgaatattaaatcttgagtcgaaa

SEQ ID NO: 34560 - DNA, 553 bp, Oryza sativa
tgtaaacatattttaataacataaaagataagagagaatagcagaaggctacagatctgtagccagttgcagcgttgactctaaaacacaatatgtgtatgataggtgggaccatatattagtactatagtaagtaactattgtatgaattggctattggattggttatagatgaattaaagctagtagtggactatactattaaacttgctcttaggaagtttgttcatggtaaacgagaaagtagctcccagtccaaccttaaataacgcaacccaagagaatataccaaacttctactctagaatatgtcctgataattacaaacacatgtttagaagaacccctatttatgaatgttcggccgaaatcgtaaaccaatgaattgcccttacaatttagggagagttgcgattcatgtggtaagccctgttatcatggcaaaaccagcaaaattggataaaattcatcgaaacattaatttttttttagaatttctttgaacatggtcgagttattgcggaaaagctagctggcgcgcgtttccgaagtt

SEQ ID NO: 34561 - DNA, 682 bp, Oryza sativa
attcctgcagcccgaactatgcgagcatcacttttggaggagcagaatgtcaattattcctttacctcctcagcctgcctttgacaacatggtcgacctttctgctacaccatatttagttgagagaaatggtgataaaccttctagacagtccacaccacccaagccccgtgatggcctacggaagaaggacgaaaattctgctaggtgttcacccctgttaagaatatgctaagtggtaagaaaaacaatgcaaaaccttcctgtaaggctgatggattgaagggtgtaaatatcctcaggatgtctcgtgtagctaagaggaatttgcagagagaaaaagacaaggagaactacaggcgacaccctacagaagcttctgagaatgatacagaagttaagattgaaaacaatgatatggaacttgattttggtgaaatccagaaggtgatgcacctgatgacaatgatggatcagacaatcctggatccgcagaagatgaaaaactttccactcaaggcactgatggtaatgaagagaactgcatgagtaatcagatggatatgctcacagatgaaggcccagttaaggctgaaaccatgataaaaactgaacataattgttcagaaaatcttgatgtggtggccactccaccaagtatttgtatgaggaaagcacaacg

SEQ ID NO: 34562 - DNA, 682 bp, Oryza sativa
tagcacacagtgtttgattgtgtcaaggatgattaactaggatgaatccatgacttgtgtttttacctttgcttttaactgaatgcactttgtttttttctcggatgccaatagcatcgggtgtaacatatattggtattattcagatgatgctaacgctctagacgatactggaaatgaattgtggcctggtcaatctctcgatgtctcttctcgttttttaatcgattggaaactgccttgctcctcggcaaggtcgctgcttggaggccagccaggccgtgatgcctaattgagcttggctagatcaacatccaactgtgcctggatagacacgcattcgccggtgtccatgacgcaggcaccaccggcgaggccctgcgtgcctctgtgtgggtgattcgagatgccgccggcatccattcctacagcatggtggagattggtgatcgatttgggaaaaatgttgaataagagaagaggaaagccaagtgaggtgttacctctaaatttaggtggaggggtgtgggcggtttcgtgcaaaaatatgccaacctcagtttgtatccgttggattggaatcggagggcctacaatgactgagtgcataagtgcattagaggtagcgtgtggataggatacgttgccctatacattgccctattagagtagcattggtggt

SEQ ID NO: 34563 - DNA, 700 bp, Oryza sativa
tggagctcgaattgaattcctgcagccctgcgctaacctctccagatgaccacagatccgaacacacaccacacgttcgacaccacgacacacctccacgtggcggcatcccgcacgagcgccgcgctgtccggtgtccggactccggacgcgagcaccggccgagagccgcgcgggaaaaaggcatccgaggtcaggagcacgagggtacggggagaccccccgccacgtcggaccggacgggcccagggccccacccgtcagagaggacgacgtggctgcacgcggtggtgggccccacctgccgcccgcgtcagcatctcgtccttctccatccatcgcggccgcggggagcagtaaaaaaaaaaatgggtctcgccgggaggaagacgacgacgaggccgtgcgcccgtgtcgacgcaacgcacgcagcgctatgactttttctctttttttttttgacagcagcgcctgtgattcttctgcgagcgtaacagtggagggtgaattcaaaatttaaaccttgccgcaaaggtaaaaaacgcaaaccggcaaaaccccattgtgatctgtgaattcttcaactttttttctctgtgttcggagctctcctcttcagattctttccctggttcatgtggatggatccgattcatcacccatcaagcgtggagacagctcgttcgtaaacaataacgcc

SEQ ID NO: 34564 - DNA, 624 bp, Oryza sativa
  unsure (1)..(624): unsure at all n locations
acgggagcgactcacgatgcaaggaggagcagcgccgaggaggaaaaggtccggtggcggggtggctcgtctcggtgaggaggagcggtaaagagaaggagggccgacggcggcggcgacagctcatcgaggaggaacgccaacgagttggaggctagcggcagatnggctcctcccctcccctccaatcccgccggcggcagtggctctacgacgaggaggaagggcggcggcttggtggagatagtgacgaccactgcgccagcaagggcaacgtacagcgacggcgaccgcgtgggaagagtgatgtcgacagtctctagacctcctcagttgttcttcttcctctagatccagatccataattttttttctctttatttctgtggaatatgtgaatcttgttcttctcatttgcatggtgagatttgatttgatttgcatcgtgcttaatctgtgcaaatggcagctgaatggggatatttttcaaatgtatttttttgcccaaaaatatcttcgtaggtggtctgctttaggtgtccacctcgaaaatgattttcgtgggcggacagggggtccgcgcataaaatatttttcctctagtagtgttagggctgcaggaat

SEQ ID NO: 34565 - DNA, 653 bp, Oryza sativa
ttgacatgaggcctagcgccctgacataggtaggagtggcaatttccaccagagtcgaggacgggaaatttggtcccatgggtggattgggacagggccccgaggtaatatggggtggggatggcgacatgatttggaatcataccatgcacctatgttggcccgatagccctattagaggagttcacatacatttggagaaactctaatcgtgttatcatcttgttcccttaccattgccgcatgccaagtggatacacgactcagcttctgctatgctcggtgactccgtttcattgtcgcacccaattagaggtgggcactcggtttatttggtgttctataagttcagtttctcaaaatttctacctgaatatcctcattagaaaataaaaccgagaacaataaacctcattcaatttttgttttataccgaactttatggtataaaacggttagtatgcacacacgtacaaatgtgcgggaattattaaattgactcctgcaggaacatattttttcaggtctattatttagttgactttcatttagttttgaatgtacaagaacttattaggatgatgatgaatcatgccatttaccatttccgtaggtgatatagtatggatatagctgccaattatgtctctttt

SEQ ID NO: 34566 - DNA, 7662 bp, Oryza sativa
gagagtcatccgtgacgggtttttgtgttggcccgattgagatgtgtgtcatccgtgacgcccggatgtccggttgagatattttctcacatcactgacctttgcttagtgaaggggccctgcccgaaagagatgagctttaagcccgttagagataactgatcccgttctagtgtgtacaccaagtttgtatatgtacgtattaaaaaccaaaaaaaaaaaagaaaagtgtaccgtctgctgcctccctctccgtgcgcgccacgtgttcaatggtgcacgtggaggagggggaatgcgcgtgactagccacgcattagcatttgcgtgctgcctcagctgtgtcgatctatcgtttaataacgcttctgcattttttgctggtggcctatgaaaattaaaattttcatatacgggatctagtgaaaataaggtaatttttacggctgtcctgttatacacatttgtaaaaatcaatttttatagacaatgctgaatttatagggtctcttatcctatatatctataaagttcatcccccgctgagtgtagttaataatatttatctcttctctcataaagccacattaccttaattgtgttgttagcctttggatgattcatcaataatgtaaattacatctcttcacgtcatctcaattatttttagcctttggatgattcatcaagggtgtaaaatacatttcttcacatcatcttatttgtttttagcctctggatgattcatcaaggttataaattgcatctcttcccccaaaaagtacaccatacaacccaatcatttctaacatttagataatttataaagtataaaaataaataaatacatgaaaaaaaaatcgaatagtagataagaaagaaaaatttagaactcatatctactatattatcacacaatttttccgcagcaacgtgtggggtatccatctagttatttttaaaggaggattcttttgaatccacctaaaaaataaacccatgtgttgggaaaatcgcttcttatagtgcagctaatcatctccattaaatattcatttgttatatatgctacaatttatttagatgacctggaaaatatggtatttcgcttactcatgttctacgtacgcacatgcctgatgcatattttacccttgatgtattgcgcattatatactggtcttttattcaaagccgtcatcattagttctaaactgaatgattaacatgactattattctactaattaatttcacgacatattttattggtctttttaaagatttgaacaaaaataataacctattgtttaaaaattatattttcgctggaaccctgaacctctgaagtcaacacaacaatatggttaatttctagcaaaacgtctctcgaaatgaatctaatacccatttccaaaccaaaccgagttagtcaattaaaatgacctgataccattcacagttgatataaaagacttcaagtttccttttaaaaagcaacaatttaagagttatatcactgttagtacgtaacatttttttaaaatagaattagcacgggattgtgctttttattaaatataatggaagaaaaaaaaacccaaaagcaagaaaagagaaaaaacatcatatacaacccccgcgggggactcgatgggtgagcgggacccgcacaaccagatagagttaggctgtgttcggaagtgcctgttaccaacacacacagtgcgtatagaaaacggagtggtacattagcacatgattaattactagtaattattagctaatttttttaaaaaaaatggatcaatataacttttttaagcgactttcgtttataaacttttttaaaaaaaacacaccgtttagcagtttgaaaagcatgcgcgcggaatactagagaggggttgggaacctagggctccaaacacagccttaatactcattagaaaggacacatcacactgaatgataatgtacaaatcacagaattaaatcctaggctattgcattggcaaatagcacaggacccatccatgagagatgtattggagtctagaatatcctcgttcctcactggttgcatgccggatttaacatcctgtcaaaaagaagtggttaaaaacggtgagaattaggactaagcacatcccttctttctataaagttaaggccaaaagtttaaacctcgtgcttccacgtcatcatcaaattgtgaaccgttggataaatatattagattgcttctcagacattagatataatgcagcatagagcccaacccatcagtcaccaccccggtgagtctcttagcttcttcagtgccaaatgtaacccacatgggcatatctccacacacatctatatgcatccagcctgtcaatccatataaaagagctttatggctgaacattccttcacttgacatgtgctatctaaattatgtacaaatttttgatagggctgctaaaaagaatttcttcaagaaacctatttgtttattttgtttctttttgagattatacctcttatctaacaaattgatgttaacaaagtcctgcagcaacgcgctgggcatcctctagtttgtagaacactggataccgctgcactaacaaggtagaaagccccacatcgtacccatgcatctgaagtcagcgtaggaggaggaggcagcgtggtactcagagaagcaggagggactcaggaattcaggaggacggggagaggtggctgtgggcttctggtgtcgaggtctcaaggaggacacaacgtaccgagcccaagccccgctcgagagcctgtgtcgaggtctcaacggagaaaacaaagaatgaggttggaggagagggggaggggggggagatgggaagtggagaaattatggtttacttcatatacctctatttaaaaaggccaaataggcttcaaggttctacctcatatcttcggagcccaccgggtcatccgcgagctggaatttccactcaaccccaacaagaaaattgtcacccctaataagtatcatagatattatcactgttggagccgtcgggaggagtgtcttagagaagacggtgcttccgacaccagtcttggtgttaaacaacttaagtaaccaatcttattttagaaaacagataaaacttatattatcatcgatgtctcaattagaaggactttaattctcgatccatcctacaaataagcaaagattttaaaactcaattatctggccatctacagaaatacggaggattttgggcttcccaaacaaactgcaactaataaagccaggtccggtcccacgtcccagacacctgaggcgggaaacaaaaacctacccaaaagatttcccccgctccactgacgggtgggcccatcggacgggacccagcgtcataacaaccgggtacacggcagtggcagtttcccctggccccactccacgccacagaacccacatcccaccatgacgcgcaattacctcattatcctctagattttgtggcaactagactctagcgaggatggcatcccttgtaattcttccgaaccttgagtcctctctctaaatctctccgatataaatatgagccggcatcccacagaccccttcccttctaccacaaattttttttccaccttccctctctctcttctctgctgtctctccccccctccatctgctttgctggcccctggcctgtgaagttacgattttgcccctggtgggccccacctttgtacatctccttcccttttttttctaccctttttgcagaacacatcgcccttctctttttccttttctcccatcgaaaccttttttttttttctgaattcctctctttctttgacggctctgactcgtgctgacgtggcacgtggcgaacgaccctcagccgtcgatatgtcgctcagcgagaagctggaggcggcacgtgtcgcggtcggcaagcgcaaggagcgggagctcctggctcaggctccggctaataaagctctagccgagccgggtactaataagccggctccggggccggtccccaacaacaagctcctagccggtcacctggcgcacgagttcctgacccgcggcacgctccagggccgccgggtcgagccgacgaagccgagccaagccgccgccttgcatcccggcgagcccgtgcccgagccggagcccgacgccgccaagcggaggaggtacgccgaggtgtcgtggctcctcatggcgagcggggcccgcgtccccggcgtcgtcaacccgacgcagctcggccgctggctccagataaaggagtgacgtgccggcgaccagacatcacaaccccaggtggttttcccccttttcaccggggagaaccgacacatcatcaaaccggtttcttcgttttctcctcctctttgcctgctcctcctgtttagattttagatctaggagagaaaaagaaaaaaaaaacgttggtgtactagcagctttattcgatgaaattattgttgttattcaaaaccaatgaccagaatggtccagctttctatagaaagcgcgatttcttgttagtactactactagttcgctacctgtatatcatgtgcgtgcaatgtttggtggttgtcatttgtcaagtactagtagaacggcgagcgtgtgcacgcacccgggacggtgaatcgcaatttttttatataactgttgattcgcgttgatgggtggatttcgcgtgctaccgagcgccgccgccctcgcctatcggtttcctcggcctgtgttccatggatgagacggcggctattcgcatgaagagacgcgtagaggcggtggcgcgcgagacgtgggggatgtgcccaacgagcatggcgccgtgcaagcggttagtggtggcctggtgggagttgctcctcccccatccatcatcgttccatgtgccctggtggcctgatgctgtttttagatctaaagtttgacgcaaacttcagtcctttttcatcacatcaacttgtcatacatacacaactttttagtcacatcattttcaattttaactaaaatctaaactttacgctgaactgaacacatcctaaaaacgcatgtgtttccagaccacaaccagacgaattattggagaattgttcggtgtcctccatggctgacggtgtacacggttgaagcatgctttggacgacgcgattgcagaggaggtgattcacgaaaaggacgcacgcacgcactacgtattattctgatctgaagctctctgcgagtaatttatttctgatcttcctctgattatttattcgggcaatcaggcaatggaaagggcgtaggggcagctcctcccgtattgttttccagagcaagattagttggtgtttgctgtttccatttgattgattggctagcattgttccaagtggttcgattcctgcacctgcctggtccattcctgccagttttaattgcatttaaataaatcggggatcattgttggttgggtaattgtctgaactgttcgttcatctcgtctctcggttttggtcaatggcctgcggagggcaatgtcaaatgtccaagcaaccgggggaattggatgggggtaagcaacgcgcaagatagcgtagccgtgttaagggaagacgagaaaggagatgcgtgtgatttacttggaaagcaaagcattcctcggctttgtttacaacatcgaagcatttctgagatcattttcaccaaatttacattgcgaaagtttagacgaaaatgcctacacgaaaaaaatctgggtttaatttttactttgtatagcttgtaaaataaaatatgtttgattcgacgctcccacagggtctgcatccgacgctccaaccttagggccctttgattcggagaaaagtcagccttaggttctgagtatttcatttggaggaaaaacttgatttaggggaaaaacaatcatattaaaacaaatgattgaatgatatactatcatagattttgaagaaaatttaaccaaagcttcaacatcttaaaaaattttcctttaaggccctgtttagatcccataaaaaacctttacaccctgtcacatcgaacgtttgaacaccacgtgaagtattaaatataggctaaaaataactaattgcacatattgtgatttatgtgcgagacgaatcttttaagcctaattgctccatgatttgacaatatggtgctacagtaaacacttactaatgatggattaattaggcttaataaattcgtctcgcggtttactgacggattatgcaattagtttttttattagtgcccgaacacccccatgcgacatcatatataatatccgatgtgacacgtcaaaactttacacccttgaatctaaacaccccctaaatctatatttttcattcgattcatatgatccaatcaaacaatcatttatgtgtcttatacttctctattttgcacttgctttactaccagaatcatatgtttcttttttttattactccgttttccctttgtatgtttcaagcgacccttaactcgtgaaaactgaaaacactacttatcaagtctagggcctcgttcagatccaaaaattttagccaaaaacatcacatcagatatttggacacatgcatagggcattaaatatgggaaaaaaaatcaattacacagtttgcatgtaaattgcgagacgaatattttgagcataattacgccatgatttaacaatgtgatgctacagtaaacatttgctaatgacagattaattagacttaataaattcgtctcgcagtttacatgcggaatatgtaatttattttattattagcctacatttaatactttaaatatgtatttaatatgtgtttgtatagctaaaaaattttacgcccaaacaacttaacaccctagacagatcagctttggtgtcttggtggttgttgtcacttgagagcggttcaattctgccaatacgacaggcgatgaaaaccaggcaagtgattgatacggccggtccgcttccatcggtcggtcgtccgcccatgacctgatcccgtctctcgggctctcggcacgcagccacgcacgcacgcacgcacgcatgccgggcacatctcggacttcgcgaacacgtggccgcacgagcacgtcgccgactgacactaaagaaggccaccccaagaggccgacgcgcacctcgcgggccaagctttagcctccggcccgtgcttctccaactcgctctcctccgcggcccggcccggcctgcctcaccacccccgctttagccggctgctaggtctaaggtcttcagtcttcaccctaaagccgcgagcccgcgacgtgcgcggcgccggttgggggcgcgcgcctgcgcgcctctctcccgcagtcccgcccgcccgcgcgcgcgcgcggcgctcgaaacaggcaatcgctttccccatccaaaaccagtccaccctcgcgccgcgggggaaaaccccgaaaaattttcttcttcccgccgatggcacgccggttcagacccgcgcccgcacgcggcggcatccaaacattttttttccagccgccgccaccccttccctccaattttcgagcgtggccacgcgtatttcagtggctccggagctagcttaattagcagtgcccaca

SEQ ID NO: 34567 - DNA, 3899 bp, Oryza sativa
gaattgtagattttctttactgaaaactgcaagcgacaagttctgttccattggtcaatataatctttttggtgatattctgcaagatgtttagtcaaatccatgactattatatccagactagaaccaaatttataccacaaaatatagtatttattgctgaggtcgtagggtttatttgtaataaaatgtgttcttttttattttatgtatgtatgactacctgcctttgtttaatttatttctcgcatgcttgttttctatacatatctaactttcatgtaacctctgtttttttacctgtcttgttgccggcagcgcggcaacggcgcgcgccacccctagtgttgatataagatgaagggaaagaatccaaatacttcctaaactttagatggaagatcgtctaacaccctgagctttgaaatcggacatccaaccctctaaagtttgaactttgtcatactatccacttgcccttaaaatagttttggatggtggttttgcacatatcataagcttaaacaaacaactttaaataactaatataacatatttatatatcatcagttgtcagtcatcgatttatctttatacaatcatatcttactattattgtgtaggtgtttgtttttcagtgagagctaataagaagtaaaaagaaatatttaagtcatatttttaagtgtaagccataatcagaaagttttacacgtcaattcattagaagatgaaatactcatactctcctactagaatgtttttagaaaatactcctattataagttttagggggtgtttagatcaggggtggttttagcgtgtcacatcgggtattatatagggtgtcgcatggagtgttcggacactaataaaaaagctaattatataatccgtcagtaaaccacgagacgaatttattaagcctaattaatatatcattagtaaatgtttattgtagcactacattgtcaaatcatggagcaattaagcttaaaagattcgtctcgcgaattagtcataatctatgtaattagttattttttagcctatatttaataatacgtacatgtgttcaaacgttcgatgtgacagggggaaagtcctcggaaaaaaacacacggggcatcagttgtactgtctgcaatagggacgctccaacactggtgatgaacacatctttgaggacattgaattcctggacctggaggctgatgcagagccaaggtctgacctgtggttggcagatttgcagaaacggttgccgaaggaagggaacttgcaagaggaggagggataggtttatgtgtggaaaatgagcatggataagcagctgaggacaaaggctggaagagtactgccaaccatttatgctcattgatacagtctgcttgtacgaattgaagttgctctgcaagtttctgaagagagccaatagcccaagactaccacacacaagagccaaacgctgctctgaaaatttctgaaaggagatgactagtacagctgattgacatacacaacaggatgaagattaagattttcgtggcatatttttcaaactgctaaacgatgcgcttcgtgcgaaaactttctgtatgaaagttgctataaaatatcatattaatctatttttaaagtttgtaataattaaaactcaatcaacatacgttaatatcatctcgtttttgcgtaaaaaaattaattttcatctttatctttaagagaaaaggagaaaagaacatcaccgcatagttccaggcctattattgcacagaggttgctgtgcttctcaacgattgccagaagagatcttcagaaagaccccaaagtctagaaactcttccaaacataagctaaggatgtgtttttatttgagtgtaaagtttttaaagtatatgaacgcacatttaaagtattaaacgtagactaataacaaaacaaattacaaattccgtatgtaaactgcgagacgaatttattaagtctaattaatctgtcattagcaaatgtttgttatagcatcacattgtcaaatcatggcgtaattaggcttaaaagattcgtctcgcaatttacatacaaactgtacaattgattttttttccacatttaatgtcctatgcatgtgtccaaacatttgatatgatgtttttggctaaaattttttagatctaaacaaggcctaaatgatacttgtgatggaaaatgcatcaagtttattcacagataacagaggaacatgcatgaagatgaagtgcacatttcaagaggcagggaaaatatcagactactttcatcctactgaagtcagggtgtgtttagttcacgtcaaaattaaaagtttggttaaaattgaaatgatgtgactgaaaagttaaaagtttatgtgtatagaaaagttttaatgtgataaaaaagttaaaagtttaaaaaaaagtttagaactaaactcggccttacctgatcttcagaaagaccccgaagtctagagatgaaaatcttctaaacataagtcaaggatcacaatgcgatgaagaatgcatcaagtttattcacagataacagattgatgaacatgcatgaagatgaagtgcacatttcaagaggcatggaaaatatcagactgtactttcatccttctgaagttagctgatctgtaggaaactaggaacatcttaaggttttgattggaattaggattagtcctagcttagctgtcatcagtggcattacaacagaagcacagaacaacaaccgtggaactgcagcattggaacctagtactgcaaagtctgtcgaagatattatcagcgacacctgtataacaaaagcgtggcacatgagacatggatacattcgcgcattagatgcgatgtcgaccagtcaaccatgtcgatgatataaactatagagatgaatttatagtataaatacttacagatcgcatgaacttcgttattaaaaaaatcgaggtggtcaggtgccacattgccaatgctgcaattccaactgtcaacataaaactatatttatttttatgaagtgtctgaaagttcaaacatgcacatgtgcagatgtctagtgattttattattatgcaaagtactacaacctgtatttcagtttatcaaaattattcatcaaatttgccaactgagctccccttgcggtagaacatatccatcgaagttcaagttgtagtcttagtataggtgcttttgcattttttttctaggatttaatctgatgaggtagtatgctggtgcttgcactttctcggagacttaatctccggaggcactgaatgcacataatatttggtggataagtttatacccatgttaaacgaggctactgttcgaatttgagtgtatgttaggacttagatgcataaagttagtgtgtgcatatgtcaacttaactcgacaaaggaaataagccttacatttgacataaacccctcgttggattactttgagattcgttcaaatccccccacgttaaccctcttccttttcttcttccctcctcaccgatgcacgacatgctcgaccttgacgcctcttgtgctatcacttggatggaagtgtcattaatattgacggagccctcccccctctattccttctcaagccagcagatgcccatgatccgacattttccccatcttcggctgctcataaccaccaccaccgactaccgcttcttacacaagcttgctttgcccctaccgcgctcctttatcccaatgggcgctgacatcgccgttgacgcctcactagcatccattgtccaccaccccccttgtccaccacttcccatgatcatgcctctaagaccgacgatctcctccctcttccccaatccctaccctaaatctaatatggaccctaatc

SEQ ID NO: 34568 - DNA, 1281 bp, Oryza sativa
tttcatgttgcaaaaccttttatcctatgccttctttttgctcaattggcctaacaaccaagggataaatagaaattgccacaggatcttcttacaacgatggaaagttcatttgtaataatcattttactacctcaataggaaaaacaaaacatagagcgagcttttatagcctgaggctgtgtttagttcagcgcaaagtttggattttggttgaaattggagatgatgtgactgaaaagttgtgtgtgtatgacaggttgatgtgatggaaaaggactgaagtttggatccaaactttggatctaaacacagcctaaatgtgaaactaattctgtgagtagatgaggttctgtgataattttcttgagcataagtgcacgttttgatgttctctatctgcattttcttgtatgctttccccttttgtgcagataaataactggcaagatattggaatgcctaagaatggtacaaaactaagagcaagaactttcggtgccaatacaacactgccagcctttggtcatgaaaacattagagaatcaacttagacatcaccatgtacgttgttattagtaccatcaacatcctaattaactcatcttaattagctggcactacaatactatatttttctgagatatgttatctctgttctacagaatttaattattgttgtatagtgactgctttcatttgttgcagatcttacaggtgggcttaaagtatataataaacaaagtggaacaagtcatgaatgtcatgcctaattgttgttgttttaaccaggcaacaaactcaggaaatcgagatgcacacttcaaatgatctggtagaaatccccaccttaaatcctttatactctacaaaccacaactatctttaatcatttgttgcccttattttgcttatatctacacatggccatggtgcttcatgtttattttctgaaaatgccaacaccaaagattttgaagcacacaactgacaaagtggacatgctacaacaatttctacaacaagaagcaccatttatagaacaaaatgcagtacacatgtatgttgattgcagtgctaggagtgcagtaaatttttttacatgggtgtattttttgcaatgatggatgttaataattgagggatatgatgagttagatgatataaacaaggcacaatgaatgaattgaggccatcctgatgttgggttgcacatgtattatattttattggatttctccttttatgcactatgtacaatagttggtcagagaggaaagg

SEQ ID NO: 34569 - DNA, 789 bp, Oryza sativa
tccatgagacgtatattggtatatagttttattcttcaatagacgcatatagtattctttcaagttccatttgaaaacttggggattttcggtcgtaggttcacgagtttgggaaaacttgggaatttcattctagtttatcccaatcttcccaaacttgctgaattgaattgctggaaaattttgctttatcccgaaactccttttcctgagttaatccgaagctaattgcttcatttactgataatttacatcaagacataggcatatatggcatctaaacggaatgatgggaacataatggctaagtttctgctctgataccacaatgttgtctctaattatataaattgaatcttagcctaacatgatcacttcttgcttatgtgaaatttgatctataaccgttttgagatgccactgaagccacttcaatcttctcccggtttctttctttatggactagtgtttatgcacttatgtttggcttcgagatcaccggttttagagatcgatggagccctctcttaggttttaaaattggtgatagaagaaatagttgtcctactgctcctcttaattcttttcttataatagacggtgcttgtgaggcttagggactaatcccgactaatttttcatataaaacttacaaataatgatattagccgtttaatttaacactattacgggcatgtttggtacagctccaactcctgaaggcatgtttggtacagctccaactcctaaatattgcttcaagagttgagtctggagtggagttgtgga

SEQ ID NO: 34570 - DNA, 1138 bp, Oryza sativa
agggagtacatgtttctcagttgcatgtaattttgccgatttaaagtacttgtgatttatgaaccttcctgtgggaaaaaaaattacactgactagtttactcatttctcctcccacctttgtattaaaactagttccatgtattaacaatgactatttactcatatccacgtcatttctggtgtcatagttcatttcttattatgaagaactcgcatgtgagaattattgatattagcagtcaggctttatcttttcagataatatttaatatgaatttattttatgacttgcccttgggagaaacttacaatgccctcccaaccttttccaggatctttaatatgattcattttaaggcttactcttgggagaaacttacaatgttcttccaactttataggaagtaatcacaacgttacggttgaattagaaggcctaggtggtggtgggactattgatgtggaggtaaatccttacctcttcttttttttttggcaccagtatactctagcaaaggtgcatgtagtgaactaattgtgacctctcagagagaaaaactaagtacctttctaatgacaagaatcttactccctttgcacagcacagcaagttgtacatatatggagtagttagcatcttccccttgcacaatcttaataagtgggaaatcctttgtgctatagttgtaagtaaaatgaccatgttgctcacatgtgatgctatgcaatatatgtcgcggtttccctagcaaaaaacagttctgatgatatattgacagccacctgttatgttgcatcaatatcaatggtttcatgctttgacgaaactgtaggctttattttgttataattgttaatctaagctctaagtataacatatcaggtcaggtataagagttatgatgacattgagcgtgaaaaacaatggtggagaataccttttgtgtctgactttcttgtgaagagcagcctaggatctgctcttagaacggtccttggatctgaaagtataaatgcaagtcagtttgtgcaatctgcatttgggcaactaagttctttcacttacacatatcttccaaagccaccatctttggatattagagctgaggcccctaaaagggctgaacaatctgtag

SEQ ID NO: 34571 - DNA, 713 bp, Oryza sativa
cccgcttggcagcgtagccggcgctctcttcgcgcagcgtggcgagtgtcctctcgatgtcgagggcctcccaccctgcaccgccgccgacctaccgtgcgatccctcgacggcgccgagggcggcgttcctaggccgggaggtcatctcgatgggatcgatgcgcctaggcgcctagctgagagactacgggaggaaaagggcattctctaccgttggataatgccccttatatagggaggcggcggcgcgaggagagccaagcctaagtggggaggcgcgccggcgccaccgtggcagcgcggaaaccctagcggctagcggctcaggttaatggggcggcgcaagcgccacagctgtggctgtgtggcaaactggcaaccctaacaagcagctgatttggaaagaaacaccgaaacaggaagccattcaaaagcgtacaggataacccaggctggcgaggcgcgggaagaaggataaggcgcgcgaggaagagggaatatagacgttggcgacgggaaactgtttaaacacgggtgtacgttcacccgtttcttgcatgtcaattaaatggttagaaaaaattttaaaaaatttgacatgataggttaatatgtaatatatcacttcacaaacatgcaagttcaaattcaactgctacaagttgtaacaaaaataacaaatttgattgcgaatatacgggctgcaggaat

SEQ ID NO: 34572 - DNA, 840 bp, Oryza sativa
tcttaaagtggggcgtgaaccaaaaatttggggaaataagctgctattagaactaaatcgattaaatccacacaagtgatatgatggatttgggtgtcttattaaatactgagatacgtatttgattgcacacagcaaagaacaaaatcgttcttggaacaacagatcaaaactaccagtaaaaacaaatcaccctagatggatcatggatctcccttccgctccacgcgagatcaggggaggggcctccgcctatcgagaaccgccgctgcggcgggaggggactgccacaagcgagattgggccgaaaatccccaaatcccagcgaggccgcaacaactaaccgaagaaaatatatttaaaaaaaaaatgaaaccgcgtacctgggcggagcacgatctggaggcgacggcgggtcgcggtctcgcggaggatggatggatggtggcggtcgagatcgcctcaagctcgttgcatctctctctcgctggttcgtctgttttttttttcccgtctttttctccttttttcggttcgaaattatctacgcccctgtccccctcgatttgttgtcgcctgcttccaatccaaattccgattgcgaattcgcctccctctgccgcgtgagcaggacgggcgtgagcccgtgaggcaatcggtgggctctggcgtcgcaagcgagcagagatgggccgggccaacactttgggccgtcagcagtacccgtggaccgtggtcgtgacatatatgtacatcttctccaaagttcctctcaaagggaaaaaaaaaactacctatatattcctcgacaaattctcttaaaagaaactactaacagat

SEQ ID NO: 34573 - DNA, 1607 bp, Oryza sativa
caggctagcttgagttgcagcatgggggcgagccagtgtgcctggggtgaacacgcaaagtacgtgagagctggcgtgtgtcgctagctgtgttagcggtgtgcgcacacctggagctctcccgttctctcttccgtgcttcgtcgatgtatgaagtatgaacgggagacgcatcggattggattgacggatgggggatatgtgcacgtgtcacgtcgttatcgatcgatcggatcgcggacgcaacgcgaaaggagaaaacggtggccgtctctaccattttgccacatgcgtgaaactaacagtagtgatgcggggaccgcaccagagttatcggccggctagcttgcgcgacgcgacgtcgcgaggatgtggtcgatgcggaaactacaggaaccgtcgcgtcgcgtgtgcgcgcttgatgcggaaagcaccggagaaaaccgtgctttgctttcttggatcgcgatacttaaccagcgtgtgctgccgcaccgtgacaactttggctacaaagcctaccggaggcaacgcgcgctctgcctaacgaacccacggatcatcatgactcatgaggtgtagccgtgtaggtgtttgtgccacgacgccgcgggttctggcgttagtcgcgcgagggatatgccaggcgcaaaaagaaatgctcggcttcacgttttttctacatttcgccccttggcgttgggagaaagatgggaaccacggcacgatgcgttgcagccttgcaggctttgcagcgcgtggtccaagttaagtgcgagttgtttcggggaggcaaagcaactgggctgtcaattgagttttggcggcgggtgaataagattttctcaaatggccaccactgccaaaggaaaaagtacaccgaaggtacctcactagtcatccggatacaaaatcgtccaataaccgcaaaactagatatatatatattccccttaactatacaaaaccgatcaaaataggtccctcggcggtttttgaccccggttttgttctacgtggcagctcagtcagcgtgggacccacatatcagtatgacactctctcttcctccccttcactcgcgccgagcaacgcgaggcgacggtggtcgcgactccggcggtgaagggcggtggctggcccggagctcggcggggcgaggcggaagaggaggagggcggcgccgtgacgacggccggcgacggctgcggcggtggcggccgttgtggccggctccacggcggccaaagatgggaccggggaggcgacagcgaggagccgagcgccgccactgcgcttcttccttctcagcggccgaacgcgtcgcctcgtcgccacgtcgggaacctggaagcggcggtgcgttggacgagtattcctcgtcaatccggaggcggagcgcgtgcaggggcagcgcggagaggcggagcaggagcggatggaggcgggacgggtgggagagcgaggcagtgagcgacccgtcgggggtgacggccaccgcgccacgaccgcctcctcccaaccgaggcggcgtcttcgccgacctccgcgccaccgcctactcctcccaaccgaggccgtcgcggcctccccctcctcctcctcct

SEQ ID NO: 34574 - DNA, 1180 bp, Oryza sativa
agtcatatattaaaattgcattagaatcaaaggaggctgtggaattactgcataaatgttgcacaacatgctatgtgcaacacaataatacgcgttgcggacataatgaacatttagtgagttaataagttagtccaaaccaagaaggcaaattcaaagtagatgagctggtgtaaggaccaatgacataacaccttagttaagaattgtgttatggcttttagagactacatatagctcaatactttctcttagattcatctaagcttgattttttaaaatttttaaacctttttaatttttaattttaaaaataaacccatccaaaacttattttcaaaatatgaaccattttggccacgttggccaaactggcgtggcaaaacaatattgtcacgccgctcctgttggcgtgacaacgttatttggccacgcgctctcgatggagtgacagcacaaaactgtcacgcccgctacagccggcgtggcagtgttgttttgccacgccaggcgggctggcaaggccatatggttcagattttgaaaataagttttgcatgagtttatttttaaaatttaaaatagaaaaggttcaaaaaattaaaaaaaaatctctaagcttttaactttttgtgctcacagcaacaaattattctcaggaattcagttgatgccatgtagtatagacaaaaaaaataccgatggtactttgatatcttccagtacgttagtaaatgagctatataaacaattatttattttgtatgtttttacactcttcaagccattgttggtaaaaaaaaaaactgactgtgaagtaacataaatatgatgtgtgctagtagcataaattgtaggagcaatgacaaacatgtaacaaaaaaaagaatggtcttacatgtgtaacagtacatgcaccttacttactgttaactactaaaagcaattactgtgaattactggctcatgaatagtttttggtgatgaaagttgagtgatgcatttcatgtttctatgataagaactttgtgtgctcttagcatcatgatagcatgtggtgctactttggcggcagattgatgtgaatatcacatgagaagtgctttgttttttttaacatcttaccatcatctgcaattacacatttactgaagctgatcaaaatcacacagtgcaatat

SEQ ID NO: 34575 - DNA, 2418 bp, Oryza sativa
gccagctcgagctggctcgagccaggaaatgagccgagctcaagttagctcatttccacccctaatcgccgctctcatacctaagaaaggagtgacggcttctcctggatgagggagacaacgcctaggttcctccctaggcacgccgcacaccgtcagagagaagagagagagagagggcgacaatatcctcaaagttctttctgtataggggtaggtagcttgtggaaagggagcttagaagagttgcacgacggtgcctggggaggcagatcatggctgagatggagacagaggcgtatcaagaggactgacagcaaagagaactgcatgtactgacggttacagcccagtcgatggcaccttcagtcgaagaacgggagctaatggcttaagcaagggtcgaacaaatgtgtccaacattaggctcctttacttcccgtcgagatggtcggatatctcacacgagattccctgcgcccgcctcatcaaagccccaaccatgcgtgctgctacggcgctcgtgtcagtgttgagggtgttagctatagcatggtgatcccctcatcgtgaatgtcgatgggtcgttccctttgtgaagatagggtccacgggacggtctcgatctcactatgagcttgcttctcattgctagcggagcccacgataaggtctagcttgagcaacctctgtcgagctctaggcttccaatgtgcaagccataagtatgagagagagagaagagtgaaaggaaggagggagaagaagacatgtggaccactggaccctatcaaacatcgttattattgtttttgctggacatagcgcataggcaaaaactactctgatatgagttaagacggtaaattaaacggctctataagttaaggggtgtttcttctcggttttaggatcccgttcaaagatcattttggagttgcatattagcggtgtgtataacgggatggtttattagcgtacaattagttaagcattaaattttcaaaaataattttatttgatttattctttaaaaatatatagattttttaataataataataccttttaacgacttagaaagcgtattaacagaaaaagttataatttggatttataatttagaactcagttttagagttaggcctgtattttagaccaacgtaatagttagcagggtaaaaagtaccgggtgatggtgtatgcttatgtgtagttacaaactgctagtactagtacaccgaatggtctacaactaaatcgaaattgttaattggcgcagtcgcgctagataaataactagcgcgcgttttaggtttggcccatcgttagcaaggcccaaggtccaagaacacttttgactttttgtttttcggtccgacagtgcaaatgcatgcaagtgatgcaaatgggcagtcgggcaagtgagtaaatcaatctatagcgtgattaccgctttaattcttcattattagttctagtattgtaattaggtgacgtgattaacacgagcattcatatctgaaaactttcaacccggtttttaaaactttcaactcaaatttaaaaatttcaactcaaaattttgaaacttttcaactcaaaatttcaaaaactttcaagcgaaaattcaaaattttcatctgaaattttaaaactttcaactctaaattttaaaactttcaacttaaatttgaaattttcaactcaattatttgaaactttcaattcaaattttcaaaaactttcaactgaaaattaaaaattttcatccgaattttcaaaactttcaaatccaaatttgaaaactttcaattcaaaattaaaaactttcaaatcaaaattgaaaactttcaactccaaaattttttaaaaatcaattccaattcgagaactttcaagtccaaaattcaaaagtttcaagttcgtatctaaaatttaaatcttcatgttagctagtatttattagcgttaatcatgtaattaacgctaatcacattattagcatagtaggaggggggcacttaagcgggttgatcagaggatttttatttttgtcgctaacaagaacgagaaacaataaatcacggattcctagtctactccacacgctcgcgacttgatcttccggcgcgagcgcgcgcattaggagccccccaactaaatatacacaaccaggttgttattactccagagtactacagagttcaggatagtgtatgatcagggtattgactgatggttttaaaagtttgtggagcttaaagtatttaaatgtatattgaagaacatgaaagatttaacgctctattttcagatttgagatggtcgctgttttttatataaaagtagcttttattaatctcagacgattacataagagatggtccatgtttgatatggtcaatgtatttgggt

SEQ ID NO: 34576 - DNA, 526 bp, Oryza sativa
attcctgcagccccttgacgagctcacggcgaggttctccatcgtcgtattcccagaccacatgagggagtggtcccgcaagtgcaagttcagggtcgtcgccggtgacgacgatggcggcggcgagctccgtatcatcggcgtgagcaacgacgaccacctgagagtattttcctggctacccagcaacggcgactgggtgctcactgctcagtcaagaacaccctgaatttgtccgtggccacccgcgggctgccgggccgcaaggagatgtgtacttcggctgcggcatcgctggcgtaatcgtcgggggcggaaagggggtacctcatgctgtctgtcgccgtcggaggaagcgtggctccggaccatggcggtggaacgggagcaccagcggaacgcgcacgccggcgtcgcgttcccgtatgagctgccgtggccgccggtgttcaacgcctacatcgagcattcaaaaacaatttagtttagaaaccccttcacagatcaatttattgattaattaggg

SEQ ID NO: 34577 - DNA, 596 bp, Oryza sativa
aacaaccttgagagagttctgaatcttatccggtatctgcacgaggctaccgaatccccgcgcaggcacgggttcacgattactgcttcccatcaagaaaccgaatctggtagatgattccctcggtcactgaaacaggaacaaaacccaaatctttgctacatcaatctttcagacccagaaagcagattgatgcacccggctacaacaagaagcaatcttgcatcgaaattaccccaaaaaaagagctttgaagtaagaggacacaatataatggagaggtaagtgcaagatctaaccagagagaaatggaagaatcagagctcggctcaggtggcgactggctctgaaatggaagggcctaaggaaaaagagaggcttttcttgctcggaccaatcatggagttgaacggaggaacaccaaaccacgggaagggacgaggattggtcgattggaggaagcacgtcaaatcccgcaggattgctcagactgggcccacatgccaactgtattcaagggggagtgggctacggcctgaaaatgagtaaaatgggccggatactgtagcttagtaaaagcctcatatggtatatta

SEQ ID NO: 34578 - DNA, 962 bp, Oryza sativa
  unsure (1)..(962): unsure at all n locations
ccaccatttcaaaaagattacatgagttggtgattgtttccatgctgagtgaagaggtgatacctagacaaaagcataatatacaagatcataattccagtgtcaagtgatagactgatggtaactcaggtgaacagtctcaaaggacaagtttgctgaggcaggtttagattggaagaagtttggacaacaaggtgttaatcctcccctgttagtgacatcttaaggtaccaattcaactgagatatactgaaaatcaaggggtcatagttgtttttaggccatcaacaaattatctttgtttctatgtgaccaggtatgctattaaaatcaaggatggtgtaaatattcagtgcaagtattctctgttgaactcaaatattggtgttacaatggatatttgttattccatttctgcgaaaataagcatgccagagaaatggagcgcctgacggtcttacacgagcagttggggttcacataaagattcattgtcagtgcagctaaactttgcatgatatatcagatgcggctatgaaatcgtgagaagagataatctgtggtatctgatcaggttgctatcatggtgcagcaggcaagtagcacagtggctgattatgtgttgccaagctgaagattctgttcagtgaagtctaacagtggagctgtggacgcatcttcatatctgtggctccctctggtgttgtaagttgtacatttccttacaatacttcatcaaactagttgcttaattcatatactttgcctgaaagttaacatggaaagcctaaggaggatatgtgtnnnnnnnnnnnnnnnnnnnnnnnnnnnacaatttcaaccaatggttttgaatcgtgatttatacggttccagggcagtgtgcccaaaaggcggttagtaacatcacaacagccctcaatttttcattccacagccaccacgattttatatacacatga

SEQ ID NO: 34579 - DNA, 617 bp, Oryza sativa
actcttacttatgactttttcgccctgcccacaccctcttaactataaatggcttcacccctgtctagtagccagacgccgacaaggaataaacgacgaaaagacatcacatcctggtgcctgatccacaagacgtcttcgcactcgttgatcagatgccgaataatacttcaaacgaaggctgaactcgatgcctgcaaatatggagatatccaacgcacttctccacccaaggcatagtactgatcattgcaatcttaagtttaagagtaaatttcacaaaactacaggtattttaaccaaattatcacaaaactacagatttaaggagttgtatcacaaaactacacatttagcatcaaatttatcacaaaactacagattttaggttaagtatcacaaaaatgcatatttaatattgaacttatcacaaaactacaacttttagagtttaaatccctagcactattgttatggtggagctataaacattattactttgtgattaaattggttctaaacctataattttattataatttagttactaaacatgtagttttgtggacacttcatcttaaatatgtagttttgtgataaattcggtgctaaatgtg

SEQ ID NO: 34580 - DNA, 501 bp, Oryza sativa
agcggaggccggtggccgctccgtgggcgcgggcagcggccgcgccgcgcgggggccggcggcggcggcgagcggggcggcggttgtggcgagcgcctcctcctcgtgctccttccgtgcggttgtggtgtggggaactagggatggaggagatgggttgtgtggggcccgccattggccagccaaatagagtggccaaatttggctagtggagggagggttttggccagcatccggttggaaaggctgttggagcatgatttttaactagaatgtctaaaatttggcttggagagtgggatggagaggttgttggtgatgctctaagagcatctccaacagcatctccaaatcgaattctccaaacacccatatagccaactttccatctaatttagctagtcaaactagatactcactccaacagactctctattaatcctctccgaaataaaatcggacccacgtgtcagcctcacccccctcttcttcctctctctc

SEQ ID NO: 34581 - DNA, 3295 bp, Oryza sativa
gtggtggcgacgggaggagcggagaagaaggcgggaaagagaacacgaggtaaaaattgaaatgcgtgcgtaatttacgaaattgaagacagtgtgtgctttgatttgtaatggttttgtgtaaatttgaaatgaattcttctgggacaacgaaatgaaatcgcattaataataagctggtttgagatcagaagagcgagaaattaagctgcattcgttttgtaaaatgctgctatatcaatgattcaacagcaatggttatctcaatgtctgacaggctaacagcactaagatcaaatgatcattgatcaatggtaccttgtctatttcatatcagaaagtgagatacatttctgaataaatataagtatgtatcaacttttgagcgcttctttttcgaacatggagatattctcctattcctgcaacaattaaactgtaaaatatgaaattcatgtgaaaattcatcgaaatttctagatttcaaacaaatgccttagcattcaggtgagagcaggaatatgggagagaacagaaatacagaagatcgagaaaagaatcaaaagaaaatatgcgtggagatatcctccagccgaggcctttcagtcgttcaaaaggcatatcccagaataaatttgttcggaagggacaattgcattttgtgcctccctgaaggccacaaaaacatgctacgcgaagcatcaaggatcttctctacagacttggcctaggctcatgtgtgtgcttttgttaaagagacggagtagcatgccggtattgcacatttgctgatttgcacagttgctgtggttcatgagatgaaaagaaaagataactgaactgctctaacttacctacacatctatatttttaattgaattcggttggtaagaacttccagcttaaaaataatatgaacgcggtcaatctcgattgaaacatgcaagttcacttcctccgcctgatcacccggcgccatcgcccgacctcgccagcgcatgaaaaaggccaagagtgtcagcaaggcccaccataccccccctcctccgccttcttagctgtcctccttaagtcaacaacgctacccccatctcgtcgtcttccttgtcttcggcaactccctctcctcctaaccactctttttactttgccctcaccgctaatacaggtccaccgtttgccgcacatcacgcgtggaggcggatctgtagggtggttcgggtggtccctggatcataaaaaaaatcacaaccaacccctctactatatataatttcagaaaaaaaagaagaaaagaaaccaaaacaaagtgccgctacgtttaggtaattgcggcatcggcacatcgtgttggattggatgccacgtcttccgcgccccgcccgtgattccgcaccgcatcaaccaacaagtcgacccgtcgccgagtccgagactccgatcgccacctctcgccgtcgctgatttgacacgcaaccatgccagagtgggcgaataccatgctcctctctcttctcatgtgaggttgcaactcatgaactcagcaaagaggcggttgatctcttggcaccgatttctatctccgcggtgagcactaggtgcaaggccgaagcagtgctggcagcacctacaagtctccaaatctgcaggtacaagctcccgtgttctctctctctttctctttttcatatctcctttctacaatctgcattgttcttgcctgaaatccatgtgctctgctgtaatatatgcttctactgtgcaatagtaatacaacaccgaccagaactaatgccaaagagatcatagattcaaagttgatctcatgtcgctgctaggtaattcggttctgttttattaacgtgtgtgtactgattcggtgaaacaaccaccgagttgatctactgaaatgtagtgcttgttgatctgctgcagtgcagtgctaattgatctcacccttaaaatgaaattaattggtgtcgaaaaaaagaaattaattgtttatatgtacttctatacattttgtgagtcggaccacctataccctaaattttagatacatcactaatcacgttgcttcgatgacacctccttcttgttccgccgcctaacttccccctcttcctcctcccccaaccccccttcccccctaaccccaacctaagatgctaaccgatcggtttgccaccatcatgccgaaatccccattatctcatcggagctaaagccaaaatccccactattcatcttcctttgatctggtttagttcctaaaattttttttctcaaaaatatcacatcgaatctttggacacatgcatggagcattaaatatagataaaaacaaaaactaaattgcacagttcgcatggaaatcacaagacgaatattttgagcctaattagtccatgattaaccataagtgctacagtaacccacatgtgctaatgacggcttaattaagctcaaaagattcgtctcgcggtttccaagcgagttatgaaattatatttttcattctatccaaaaaccatttccaacatccagtcaaatatgcgatgtaacacacaaaaattttcttttcgcgaattaaatacacatttctttttttttttcaaaaaagaacatgaagaaaaggcacaatgatgacaacagacagtttcccacagaagatccaagacgcctgccactctaaactaggcaaaacacctccgaagtctcagctcagcttctcccctcctcaaccaagcagaaatggcggcttcttgcgcgctcaccctcccctccgccatctccgtctctgtctccgtctcctccaattcacctcgacggttcaggtactaatctctgtgcccctgacctgtactggttcaagtcgatctcctgtgcgtgcgaaggattgatccctggtggtggtgtctgtgttttttggggggcgttcttggatggatgcaggcgctctaggagggtggtggccatggccagcgtggggcagaaggtgtacgcgcccggcgtggcggtctccgagggcaatggcgggctgccaaagatcgacctcaagtccccgcatgggaggtaattctaggtttggttgatttggggtttctttttattttaaggtgaaatatttggggtggataacttgtgtgagattcttggagggattgtggtagtttggtttgtgagtaggaatgttagatgtatggtgccaaaggtggaggaacttggttgtgtttgtttgcttgttttttttttttttttttgtagagatgggataaatatttgcactgcattg

SEQ ID NO: 34582 - DNA, 844 bp, Oryza sativa
attcctgcagcccacaggcccattcctgcaggtagtaggtattttagttcaaataaatatataccagtacaactacctgcaaaactatcatatcaaacaaaatattctccataagcaacagcaacatcatcctgaaatgttaacatacagggtgtgtttagttcacgctaaaattggaagtttgattgaaattggaacgatgtgacggaaaagttagaagtttgtgtgtgtaggaaagttttgatgtgatggaaaagttggaagattgaagaaaaagttgggaactaaaccaggccacagtatggttttcaatagcacaatacgagcaattaaatctataagcatacatgtagaatttccatgaaaatcataaggtttgcactgataaaaaaaagaaatgtgatactgtgataaaagatcggacatgagtagatcatttgatcacgatgcaggcatagtgaccagtgccatgaattcacccagctatatgacatctggaacgaatagtagcatacatgcaagggattagctatggtccctacctgctcaaccaaacagatcaagtcatacacccacccagcgctctcagacacaccagaagaaaccacactaaaagtgggatctggatcaatttgcgcaaggaaagccttctacaggacaggcatgtacctagcaggtaggggaggagaactgataagtagtacctcgtggcagggatgaccgctggatctagccagccaggtgagagcaggctgggaaactcccaggccgctgcacagggacgtctaagcagggagaggctctcagcttcttctccttcctcaccttggctgcctgcctggtt

SEQ ID NO: 34583 - DNA, 797 bp, Oryza sativa
ggccaattcgagctctgtaccctggaaaacattcctcctttttttcttcctaaaaaatatcacagaaaagtttttgttcttcctttttgtgccactaatttcagaggtgtatccattggtgggaactctgctatttatattgaattggtgactgataagttctttgaataaaaacatataatgtatcttctgcatttgctcaagatactgggtgtgattacttatgttcaaccttgttatatagcattcaccttagtcattggtataccatatatctattcatgtcctactattatagttattaacctgtcaatcactaattgcagtgatgatatttctcttattaggcagttgttgtaagtattgaccctcgaagagtatatgtcaagaatccggaagaggtgcaattcaaaactgtaaaggtgtccaattaaggtgcaattcaaccactcatactgaatctccatttgcatttcaagcattaagatctcatgtacttttttcaggtccattaggagaagaatatgcatggtaccagtgcacagtaagcaatttgtttccatttactgataattttgcgttactctcttatccatgcacataaggggtatttttgtatattcatatgaaaagtttttcccagtacgcaggaatattattacccaaaacgcccataccaaatttcagactgattaaaacatgtgctttctttagatatttggtgtactaccttttaggcaacattaaatgactttatgctggcataatctactgttgcatgcttgcctttaataaga

SEQ ID NO: 34584 - DNA, 629 bp, Oryza sativa
ggtgagttaatcatagcccaagttaactgctgcctaaatgagtctaccatactacttagatacttgtgatatcatatcaccaaaagctttgcaatggattttaaaataaatgtgctattttgttctatccttacatgtggaaaacttgcaacattgttcacactagtaatatgaaatctgcggagaatgtgacgatatacaaatgatccttaaaaaaatggtttgaaatggatgcgatgggtaaaggccttgtcatcacaaccaactccttttgtcaggggtctctggaagattattggtttgtgcgaaaaaaaaaaaattaaatttgggttggtccattaaaaaaaaaaaaaaaaaccccccttttgggagttcaatatgttgctctagataaataatgtcaggcaagactcgatggaatttagtacatcatatgcatggtatctaaattttagctatagggagcaatcagtgtgtgtctcactggtgttctaggattgattatcttctagagtcagaaagcaaatgtactctactgaactacagaatatctgactggcaaaattttgacaacaggcaggagtgttgtctggtgatgtgagcgacattgttcttcttgatgtaacacc

SEQ ID NO: 34585 - DNA, 625 bp, Oryza sativa
ttacttggtataaaccccaacttttgtcagaattacttagcccaaagtgaaaataatacttttaagatgggcctaaattaaaactttggtaggaataggtgatcagcacaaattactcaatttcaaacaatcctataccatagcataagaatcagatctttgccatacaactctaacagtaataaagaaaggaaacgaaagctatcgcattagccctaatcaaataccacaggagattgctgtagattatgcgtaggtctcctgcccctttatagaaaaagagggggagattgttgtaggcaagatttggagacaaatctctttgtttagactttttgttcatctagggaagttaaaagtcaaaacaggccatgccagggcatcaatctttctggcctagcttatgcatttcaccccgttgctagtgcgctgacaggtgattaaaatgagccaagaagaatgtgctgattaattaattaggaaatcgctggttgcctagcttgttcactttagtggtgcacacattacattagccactactcactgtcactagcgcgtgttacctagtaaaatgctaattaatgacatcacgagagcagaaagtggactacctgatattattgtg

SEQ ID NO: 34586 - DNA, 585 bp, Oryza sativa
atataaaataactgggttggtaaattttcgtatcgaccaagttatcgtgtgtgtctcgttatcgacagatacattatctactactaaaaaaataattagccgtgaatacttgctcctttctcattagtcacaagagttgaggcgtacaatatagtctttgacattgaataaatattttgatcattaatttcttcctaatataggtacaaaacaagaagcattaacaattaaaagtatttttaaatattaatataatgatattatgtcatacatgaaaatagatagggttaattagatacatgccattaaaaatttgctggtttcgaaatatactattactatttacgtatttgtaacaatgctactgctatttgtaatctcaattgcgtatttgtaacgatgccactgctacttatttgtaatttcaattgcgtatttgtaacgatgccactgctacttatttataatctcagtggtgttaatacccacaaagataccgtattttgcatgtattagacgaaaatgcactcatcttttacctctcttctcttccctcgtcttctacctctctcttcccgctgcttt

SEQ ID NO: 34587 - DNA, 600 bp, Oryza sativa
agtcgccattacccgttctagagactctctcctccgtcggcgaatcaaatcccccaccgaatccgatcgaagcagcgagatttcttcttccgcaatccaaatcgccaccgatggcggccgccgccatctcccacctccgccgcggcgcgccgcgccacgcccgcgcgctcctctacctctcgacccgccgcttctcctcctcctccgccgcgggggtggctcccctcgccgcggtcgccgcctcagcccgccgccttctctccacgtcggtggactccggcgcgtcctcgacgggggagagctacaagccgccgctcttcgaccccttccgcgccgccagcctcgcctcgtcggccccgccgctggagtcgccccccatcgaggagctccccgatgacgcgactcctcccccggaggaagagcctgggctacccgcgcccgagaaggatccggtggcgacggcgtgccagcacgagttggagggtctgaaggcctgggtggagacggtgaggagcaggaaggagtcgacggaggagaaggaggcgtggagtctgctcggccgctcggtcgtgagctactgcggcaccgccgtggggacgg

SEQ ID NO: 34588 - DNA, 560 bp, Oryza sativa
atcaatatgcggtgatatagtgccgttctcctccagtcctgtccacagatataagggtttatatttttttataaaatttcagaaaatagtaaaataataaatatgatggttagaagaataaagtagtaaaaaatgatagatgaaaaaataaaccagtataaaagatagtgagtggggaataaactagtaaaaaatggttgataaggtataaagtattgtctcaaaattataaaatcttttatattatacgataaatttgaagggtataattctttatatttcaagacggaggaaacaagtagacgccatgtcatcttttcgggtatagatatttaatgtttatgataagatctgatcaggattttaaaacattaacaagagtatatatgcaggcgaactcggtacagaaatagaaattctgaacgtcctcaaaaaagagtttaaccgcttcttttaaacttagttgctagacttagctatcataatctgaagcaaaaacgggccggggtatccgtattctgcaaaccatttccggtgagctagtgtgatgagatcgatga

SEQ ID NO: 34589 - DNA, 647 bp, Oryza sativa
tgctatgactattgagccgacagctaacttagccgaagcattgttcagcatttggtacaagtagccgaggaggattttgcctaaaggaaattgtttctttgcttccaaagcttcggctacaaactgccagttggttgtaggaccacagcttaatctacaaaagagaaatttctctagccacatgagcaaaaaggccacatgttctcgaggggtgacagaaccctgacccatgtatgctgttacatagcctgaccaacctcctatactcttggtcttaaagtcatattggttttttgtgttcagactcatggggttagccgatgaagtgacatccagacccgtgatcataatgatgtctatgagagttggggtcatcggttcttggttgaataagaaggcgttgatggtgttggaccagaaataggaggcggctgccattagaggttcatccttggctgagtttgctatggttaggttaagtgcttggccgattccaatttcgtcccaatgaactcttttgctagccgatatgcgcttgaacccatgtaatccaacttttctcgggtgaagttttttctagagatggccaagatttaaaggtattcttccaatgacctagatctggattggatagtctgaaaggaatc

SEQ ID NO: 34590 - DNA, 637 bp, Oryza sativa
ttaacgccgtttactttttaaacatgtttttaacgccgtttactttttaaacatgtttgattgtttgccttattcaaaaaccttttataaatcttatcctgcggccggccggctggatgaatgccgggcctagctcgtcgccggcgactgatgtttttcttcttctccggtggcaggttcgcttgggtcggactactccggcctggggatcagcatgttcaacgggtcgcagccggggacggcgccgccggcgccgttctcgttcaccgtcaagaagtccggcgccgccgcctcctcccttatgccggccggcggcggcgtgctgctccacctcctcctcgtgctggtctcctccttcatgataggatgaacagcagagcacagctagtagcaataatagagagacaggcagagatttcttttcccatattgaggagacgttttctttttcctatttacacccctttttcagtaggaattttgtttcattcatgtgatcatcagtgtatgttaataatttcatagaaataaaatacttagcagtagaagatcttgtgcacatcagtagataataatgctgcgctaactatcacaccaggcaccagccatactcttcaaaagatctgaccaccatcag

SEQ ID NO: 34591 - DNA, 873 bp, Oryza sativa
gcatgaagaaaaatccaagctcgatcaattatctaaaggtccaatcaaatctaacattgatcggcttgaagctcgcaaaattgatctcttagcacaacttgaagaatgcaacgctgagctggatatggaacgcaagaagctagccgatctcccccagtccattgaagagcagaaagctaggctcaaataggttattaagcatgttgctgaactgaccaagtccttaaaagttattcctgcaaccgatgcgcaagatgctcaagccatagaggaagtagagcagattaggcagaaagctatatcggctatccagcaatacttatcgcagtaatcttactgtaataggacttagagcttctgcaatcggctaaacattcttcatcccttaacatccttctgtgccgattagtatgactgtgagatttgctcaaaaaattttgcactatatttactgcattgtaacagatctatgccccctagttttacaatgtcaacagcattgataaaactataaaacaactaagggcgatataacaatatcggccattgtcaattggcaaacctcagccgattacattataaaccaactaagggcgatataataatatcggccatcacaaggcgatgtacacacatcggctatcatgtatcgacattagtagccgatcacgagttaatccatacactcgagtaatatttcttcaagtatttacaattaagagctcggccataaacttcaccatcaagcccttgcagcatatatgctcccttagaaacaaccttttgaatctagaacggtcctccccaatttggcgaccacttgtcgaatttattatcacgagtaccaatcagcaaaatcaacttccagacaag

SEQ ID NO: 34592 - DNA, 621 bp, Oryza sativa
tctctaaaattataaccgtcgagttagtagtttatttaaaatattattttccatgtttgtttctagtgtttatttcttgtttaattcggttgcaatgtgcatctcaccttccgaacaattctttttgatccaaattcaattctatcccgagtagaaaaccatttaaagcctacaacaattcaaatactatttattttaattttccccatattttctttttctctaattttaccttaattctctttttccatctattttattttcttttctattctttcctttttctttcccctctctctctgttttcttttccttcttctcttctcctgctgcctcgcgccaaacccgtgccgccttgcgcccagctcgtgccagcccacgcatgatgccacacactcgcacgcgcacacacgaggacgaacgacagaagaatgccgccgtgacacctccagtttcccgcctccgtatctccttcgtccctccactaaaaggctcaagacctgtcacaccctaaaaatcctaaatatataaattgttgtttaaatggaattattagaaatgattttaaaagcctagacgagaagatctattttttttaaataataaatcccaatataaaat

SEQ ID NO: 34593 - DNA, 565 bp, Oryza sativa
tttggtgttagatacatgtttgtgtttgtaaaacggggggagtacgtaggagtagtatgaatgatcaacaggttaaagatgaaatgaggaggcagaaaaaaaaaacaaaaaaatgataacgattcaaagttaattgctcctacttctttttgtgggcaggaaaatcattcccctttggcattaaaaataaggacaatttgaaccatgccacataaattttacaaaatttgtgatatgccacctgatccacgtatcattgacttatgtgggtcctacatatcattgagatacgggtggcatatcttaaattttacaaatatagggtggcatgattccaacaaacccttaaaaatactgtgcccacaacgctttgttcactttagagcttgatcacgtaaaacacattgtaaattatttttccaaatccggtctccgtattcacgaaacggacgtacacggtcaaaacatattgtaaatacacggcaacaccaccaaaataatgatgttgtagcatgcatgcatgcgcgtcatgttggctcgagccaaggcattcgatcgtatatgg

SEQ ID NO: 34594 - DNA, 522 bp, Oryza sativa
tccaaatatccaaccatttgaagatcaaaagctgcttttgggtaagcctcaaaaaataactaactcaacaaccattcttctgttggaacaagtactatgaacgcatttcttttcaacaaataatatggtctcagcaagaaccaagagacaatcgaaacagtccacaactaataagagaccctgatatgtagtctattttttgccaaaaaaaaaaggagagatgagagctaaatggtgtatatgctaacaaacagtatttaggctgcttcaactccagtactaataatggcttacattccactattaaacatggtttgttgcacaatatcatgaagctaaacttaacataacaacttatacttgtgaatatgtactgctaaacattgacttgaaatagctcttggtagagttcgtctcctagtttccaaggtaaatgccagtaggctctactcagccacatgaaaacagaaaagtctacttcagatataccagatgaattgccttacactcactctcaaaagt

SEQ ID NO: 34595 - DNA, 746 bp, Oryza sativa
tcttcaacaaaaggtaaaacctcgtcctggcgaattatgttcttaaggaatagtgcttccatcttcatgacattctaatctcgtttatataattcgccgagttatcatatatcttatataatctctagcaatatcgctatctaacccacaatcggctaacatctattaacagacggcagccgattgggttaaatgttgacattgatctagattatataagatatctaccattctatgaatcttctagtagcttgattgtctagatatcattcttcttttcatacttaatgctgcatcaattgagtttgatctattgagtcgtgcttagaatattgatctctagcctgccacctagttgtcgattagaatagcatcggagtttcacccgatcgtatctgatttaactataattatttctatttgctttactgatatgttaaatcggccctttatgccaagatattgctgtatttgaatatattagccatttgcttgatattctatgcctgttttaatatcctgacataaggtagtatcgaggtatttgctgatacatgctagatctatatgatcggctatgctgtaagcttatatagtcttgttattagtatatatttcggtctaagtgattcattctgtctcggcatggcgaccgatctatcccagtcacttgatttaagtatatatcgagataaggagtatatatcgctaacatctacagccgatcaagtaggtttagttttctt

SEQ ID NO: 34596 - DNA, 1682 bp, Oryza sativa
  unsure (1)..(1682): unsure at all n locations
aaaaattcataactaattcatcttagctcggatttagttggttcaagtctctaattttttctaaaattgagatctacatgttaaaaatatccacatgtactgttcatgcttgtttatgtgctgttttggtgattttgctcttttctctttagattccgacgtttccggagagtctgagtttgcaggagaagattttgaagagttccaaggccagcaaggcaagtcacacagatcccaaacaaccctttgagcatgttgatcccgtttaaagctattgtttctattcaactattgcatttattttcgaatgtcgttgggtggaattttaaaccctnaattgttttttttttgggggtntttttttaaaaatttctcgcctttttgttcttgattactttattccttgataccttgggttattataacttgactagtcgggctttatatattggttcagctagatattagatatgattgcttagccatgcttagaaacattagcacactattgggacaacttatgactcactattatttaatgatggcttaatgatagctcatgatggttaatcatgattggttaattaattaatttgccaactaaaacctgataatggtgggttgtgagcacatggttttgatggtcgtgctcatgacaattaaggaccggttcatgagtttcggttgtaaaatattaaccgtgccaaccacaagccagcgtgggcaacagctttaccttttgtatagcatggttcattgcggggcaccagactgagaagtggcggagataagcccacgggggtcgctggggagtccatgccttgtttataagggggcgattatgatccaggaatagtgcgctgtggtggattgtgttgtgcgaggggtactgtcacagctcctttccgaggtaccgtggtggtattgaggcgcatggtgacatgtcgtggggctgtgtcttgtgggtatagtggtacatttctgaccagtgtaaaactattcgaatagccgtgcccgcggttatggacgggtctaacaatgtctttcgtgattagtttcacacttctcaccataataaaagattctataactggtaataatttgattagctcctggtttggaatggtatattcctggtttggagatagaactgtgcagccgggataggttgttcagaatgggtgggcctatgcaacagggtatgttgtatagcgttggattaatattgtttaattactacttaactattttattaaattctgaaatgtttattaaatgctgtttatgcaaatgaaaccctactatgccatcctttgttatcctgtgcacttgcatatttgctgcatggcttgctgagtatgtcatatactcaccttgcaatcattcatcagaggaggagttctacagtgatgctgatggtgtgaaggattaggtgtagccctggtcaagctgcctgtggagtggagtcgtctgcgccgtttatcttattttttccgctgcttagatctttattgattgagaggaactatctacctctgtaatgacattttattcgcttattaattagagtaataattgtactctattatcaatttgttattgtgtgcctcggctgattcctaaacgagggttcacacacatgtaagcgtttagaattttggatagaaattccgggtgtgaca

SEQ ID NO: 34597 - DNA, 503 bp, Oryza sativa
atccatccggtctatccggactgggtcaattaaaaaacacgtggtttttcgctcgtgcgcatatagaataaaggagaaatattattttaggataaaattggttacgctcggaatctgtctggtatgtccggaccggatcgattaaaaattaagtgttttttagttttgcccacataaaacaaaggagaaatactattttaggaattggtcacaatgctcggaatccgtccgcttctgtccggaccctcgagtcgattaaaaaacatgtggtttttgcttgtgtgtatatagaataaaggagaaatattattttaggacaaaattagttacgctcggaatcggtccgatctgtccgaaccgggttgattaataaaaactcgtggtttttacctattgtaaacatagaacaaaggggaaatactattttagcacaataatggttacaactcttggaattcgtccagtttgtccggatccacgggttgaccaaaaacacgtggttt

SEQ ID NO: 34598 - DNA, 572 bp, Oryza sativa
ctaggctggtatacatgccatcattcgcgcactccctagcaggcactaagtgccgccatgctgtctccaacccctcctaagctcctccacgctgcatatgtgaccgcacctcccccatgcctcctaggctagcagtcgttgttctgccgtcccaacaccacaagacatactgtagaagctcggtgcatctgcccgtagctgcacagccaacttctcgagctcctcccttcacactaaagtcttcccaatgctccttgatccatgctgaaggctttcccgagctcctcaaccactcccgtgttcctccccaataacgcaaggcatctgtggaagtcctcccccccccctcccctcccgtgctctagttgtgcaacttcaaggtcccccaacatcgttttcacctctgcctgaggacaattctgaggtcccccaaccgtggtttttcattcaaaattggttatgtacgtggaaattgaatttccttgtcaactaggaatcgtgaatttatatatcctacactacatagttggagccaaaagcttaacaatcattgagccacatcatctataaaa

SEQ ID NO: 34599 - DNA, 522 bp, Oryza sativa
ctagaaacttccttttccaatccatccaaccaaacatgggataaaatttcccttcatataagagcaagtttaataagagagtcatcagttagctataagccaatgacacgtcatctaaaagcaatcaaatagatagatctttgtatcaaccagctgcataacacatactccaatactaatcattcattttattatatggaggagggcccaccatcatccaatgcatgcatgagagtaaatggctgatgaagataatcggctaagttttctaggcgcctgtgccaaggctggcgattgcataagcgcccgatcccctctctctcatcttgcctctctccaccacgtcagacgaagctgagctgtacaggcttatagctgactgaaattttgttattatacttgctctaaactaccaccacatcctaccaggatattatatccatttcccaatgggtataacctattagccaaacggagcctgataggctagctttggcctatattttcacccaaaaacctatt

SEQ ID NO: 34600 - DNA, 602 bp, Oryza sativa
tccccactgccagccagccgccgccgccacctctgccagccagccactggccaagggaggggtgctcgtcgctgccgccacctctgcccgccagcgcccggccatgggaggggagcgacgcgagagagagggagggagagagacgcgagaagggatgtgatcgatgtagataaggaccgtgtggtgtggacgactagataaggacgtttggtgggtgtggaccatgtggtgctgctgagccgctgatggctcggcttaagctataggtgccggttctttcaaaaaactggcacctataatatattataggtgccagttttttgaaagaaccggcacctatagcttaagccgagccatcagcggctcagcagcaccacatggtccacacccaccaaacgtccttatctagtcgtccacaccacacggtccttatctacatcgatcacatcccttctcgcgtctctctccctccctctctctcgcgtcgctcccctcccatggccgggcgctggcgggcagaggtggcggcagcgacgagcacccctcccttggccagtggctggctggcagaggtggcggcggcggctggctggcagtgggga

SEQ ID NO: 34601 - DNA, 599 bp, Oryza sativa
aaatttcatatacctggaactaatcccttttaattccctctaatttatttctcatggggattatctgaaaagccttttccttcattgacctggcaatgccatacaagcaatgatgaaagaacattaccaacaatctctgtgcgcgctgtgaaattattgataaatcctcagctaagtcatttaccgactccgacgaccaccttaatataccgcggccgcaacaactcgacgccaccacctcacaatcaaggtcgctaacgcaccggccaccgccgccacagcaccaccacctcatcaccgtagtcggcaccccacgcccgccaccaaagtcacggccacgggccctcgctacctcgcagccgccgccgctaccacacacaaggggaattaaactagggtgttcagctagagaaaacttatctacacgaaaagacaaaaatacctttccaccactctcaatacaggtggtaccatctcataaaaaaatatgtacctggaggtaccgtatgtttccaaccgttcgatcgggcaggatgaagggccgagattcggtaccgggagagctgctggatgggagcaaatattctttctagcaaagg

SEQ ID NO: 34602 - DNA, 585 bp, Oryza sativa
ccagtcccaggaaacagtgctggtatcacaggaagacagattatcacagcaacagaggtctctttattatagagtaaaggtacagtcatgttgggctgcggacagatcccgagctcacaactgcattacaaaagggaagcggaagccaatacttggaccaaacaacacaggcgcgacttgggaactaggccgaaaccctaaaactcatcatagccggcttgctcctagaagaactcgtcatcagcaggatccgcttcatcttcttcagcaactgggggggaattatttatatagagcaagggtaagtacgggagtactcagcaagccatgggaaataagtgtttaatgcaggcttcaaggaaaggctgttgtttttgcaattgattttatttgaactcttttctgtaaacaactaagtgagtgcttctcaaacgacacggatgagacagtgcgtctcgtccggtcggagtatgtacaatgtatcagtcttttgaattgttcaagattggcacccagccaacaactttcaaacggccacccgggccaacaactttcaaacggccacccgggcctagctgatcccat

SEQ ID NO: 34603 - DNA, 1263 bp, Oryza sativa
cttcaccgccagcgcagagagcacattggggcgagcagatgagcaactaagaagaagtgatggtgaggggaagggaggaagggatgtgcggtgagtggagggggggcctgagcagctgccggcgatggccggaggaacagagaggaagagaaaaaggaggaagacagcaagggagaaggaatgggtggttgcaggggcggcctccgcagatgccggcgacgggagggtggtcggagaccagactcaccaaccacggaaggccgaccaccggtgcgtactggcgccacgccgccacgcagacgccggcaaaccaccgcccatactccggcgcacgcgccgccgcgcgtgaccgcgctcgcgagtcgacttgcgtgacgaccccgccgctcgcacgccgctagacgctgcagcggcaccgccagccgcgccacctccgcttcgcgccgccccacgacaccaccgtcggcgcaccgtccagatccggcaacggcggtgccggatctaccgccgcctggccgggattcctcgccgccgccactctccgccgccggcaaaaaaactccacctcccccacgcctgagagggggcaccactgcggagaaagccccgccgccgccttcctagctcgccggccggctttgccggcggtgagctccggcggcggcgaggtaggggaggggacgagggtggcggcgccggtggtagggttcgcccccatgtcgcctgcgtgtgggcgacgcgggggtctttttcaatgatggatcattttgcttggcacatcatcaatcattttgccttggcacatctaatatgataaaacagccacatattataaggtttttgaagtagtatattacttttgaaacaaatctccatctcaagtcaccaaaacagtataataggatgattataattgacgatttgacgtttccatacacaacttgctttgtgcagattagtcaaaaggatgatagactcgtaacattgaccatgcatgatcctgtgcatgacatggcaagatcagtcatagatgatgaattaattgttctagatgatacgaaagaaaataaatgtgggcaaagcacttaccgctacgtattcatcaccaactatgacaagccatcaaaggaattctccatgattttacatggaaagataagggctctccatttggtgggttgtagcaaaacaaaactcaatgatggagcattttcatctgcgaagtgcttgcgtgtcttggatttaaatcattgctctatacag

SEQ ID NO: 34604 - DNA, 670 bp, Oryza sativa
ccccccctcggggggaatcagaaggagggcggacacctcaccctcgggcccgacgtccccgaaggtgccaggccacgtgggcgattgtgtctgcctcaagcctctggtcatgatactcccggtcccatatcaccgacagtatgtatgtatatatatatatatatgtatgtatatatatatatatatatatatatatatatatatatatatatatatatatatatatacatatacatatatatatatacatatatatatatacatatacatatatatatatacatatatatatatatagatgtatatgtatatagatatatatatatgtatatatatgtatatgtatatatatatatatgtatatgtatatgtatgtatatgtatatatatgtatgtatatctatgtatatgtatgtatgtatatatatatgtatgtatgtatgtatgtatgtatgtatatacatatgtatgtatgtatgtatatacatatgtatgtatgtatatatgtatatatatatatatgtgtatatatgtatatgtatatatgtgtatatatgtatgtatgtatgtatgtatgtatatgtatatatgtgtatatatatgtgtatatatatatgtgtatatatatatgtgtgtatatatatgtgtgtatatatatgtgtatatatat

SEQ ID NO: 34605 - DNA, 601 bp, Oryza sativa
ggtgggtgtgcggggtgcgagaggtatatgagtgggtcccaccgtttgctcttcctcgtcatgactcatgaggtgtgagggggtgtgcgtcagtgggcctaccaactatctacttatttaaagtaggtagatagaaatttatttttgacttatctttagtgaagaattattgtttttatatatcgggaccatttgaaaaaatatatatatataatatgtgaagatattgcatcaattatacagcaaagatattaatacaaagataaagtagatgagtatatctaattgttaaataacataggtttcaacgagaggggttggactacccccttattaatactctaggtccactcgattcaggggaaggtgtttactactacctccgtcacaaaataagtgcagccgtgaaaatccgtgtccaacgtttgaccatccgtcttatttgaaaaatttataaattttttttaaaaaattagtcacacataaagtactattcatgttttatcatctaataacaataaaaatagtaatcataagtttttttcaaataagacgaacggtcaaacgttggagatgaatagtacaaaactgcacttttttt

SEQ ID NO: 34606 - DNA, 826 bp, Oryza sativa
acttttaggctttgatatttcttaaaaactaattaaatattctaatgtgacctttcataataccatagcacattggtcgagtttatttgtataacaatgtattttacatggacatgttcaatctattatgtcataaaagtaaattgaggcttggtacaatattggtctaaatgcttaattaaacactcacataaatgtattttatatataaagctttattcgttttcatgaccaattatcttatgtgagtcaatgttattccatgagggactcgataaaagttataaatattaatttaattattctagtggaacactcctttatatatagggtcgttgtagtggtgactatttcctaattacttagatgtcatgacacttgtcgatatggttcaagtatttaacatacaatttgtaatttacattatagaaattaataattgactcgtgttttatttggcttgctatcatgtgcataaatatttatgtggttaataataaataatgtattattgtgattattacttagatgtatatatatttagtttaatttttccattgtgacaattttatagtttggcgagcaataacaatcataacatccagcatgatgcaaaagttttaaaaagttcaaaattttagtgatttttattgtcggtaattttcaggacgttatagccaaccattccatagtgtccaaatgacatgagaattcccaaagtctaaagctataaaaaccacctaatgttgtcctattaatcagcgaagcatctacgtaaattcatactagtggaaccatgaatagggtacccactagttggggtttt

SEQ ID NO: 34607 - DNA, 663 bp, Oryza sativa
aattaggaacagtagcttttcgtaatttctcggattaattcgaaattgaatctttaaactagtataacttgctcattttaactcggatttgagtgaaacttgaaccttaaattcatataaattcatatctttccaatggtatataattcactaattaataaaatatatttataattataaaataattaataccaagaaattagatactagttaacttaaaaatgtgctaacaaataaaactaatattttacagtaaagtagatgtaagaatatttgtctccaacatgtcttgtcactgtaacaaatacacaaactaatttaaatgatgtctcatattaatgtatatattaatgtataggaagatagtactatttaatggttgtataattaaacccatgacttacgaattatttacataaattttagcctcatatttagtaactaaaatataaacacataaagatgaatcattaacttgtttaggagaataataacagagctagatgtgaaggaatcaccaaataatttaatcaatgcaataccatatagaatagcatgtatagacctaaattggttaccacttattagtaacccaacagaaccagtgcttaaacttgccccatcacatatataatatcactcatagaaactagctaatgtata

SEQ ID NO: 34608 - DNA, 554 bp, Oryza sativa
cgccacgccacgccacgccaccgccgccacgccacgccgccgccgcatctcccttcatgcatttcgatctctccgatctcgatctctctccgtcgccttcgacgccgcgcaacgccgccgccgcatgccaacgccacgccgccgccgccgtggccacgccgccgccgccttcgccgccgcgcgcgcaatgccgtcaccgccatgccacaccgcctgcgacacgccacgccacgccaccgtcgtcacgccacgccgccgccggcacgggcccacaacgccacgccgccggcgacgtcttcacgccgccgcgccaaccgacgccccgatgccgccataccgtcgttaacgaacgagaacgagaacgatcgaacgaacgagagcgagaacgaacacgtcaacgtacgttgccgcgacaacgtgaacgagaacgaaaacgatcgaacgaacgtgaacgagctagggaacgtgaacgagcgaacgaacgaggacgaacgttaacgtgaaatgcaatatatatatatatatatatatatatatacatgtatatatatata

SEQ ID NO: 34609 - DNA, 597 bp, Oryza sativa
tcacatgtatatagcaaatcatcggccaactaatttctgttgacattttcttccatggaaagcgttggaagaggccagctccaagcgtgctgcgctggggttgctgatccaagaagtccttttccagatcatcaacttcgccaatgagaaaaaagaccatattcctccaatctccgataggatattcaatcacgagatctcgatccccaggtgcatattttcatttacatatctaattgcactgaacatttcgttgggtaccctctgatgacagatgaattctgtaagtttgttgaagattctgtatcaatatctgaatctccaggtgacaccttttccttggacgtgttgacagctcttctgattctgtattcgggtggaacgccgacgtccttagaagagtgttgaatagttgaactgaagacggtgatcatcaagtacgccatgtccagcgttgggatagaagataaccccctatgtggtcgttctgtcaaagatgtcaagccattgtcatgaacagtatcatattgtacagaataatttaggtaataatagaacagacagaaaccaacgattttactcactggagatgtaaat

SEQ ID NO: 34610 - DNA, 676 bp, Oryza sativa
aatacttgagtacagtggcaggcttgaacttctgacaactgaatgcggatactgctgcaaattgtactaagtgcatgaaagtatttatactcattggtagttactgataatgacttaattaataatgggctaattcgagtatggtcaacaggacagatgtgagacctgatatttggcattttgctctacgcgaccccgtttgactgaataattcgtggtgtcaatgattaatgaattgactgaaaagtgttgtggagcaaccttccccacttatttcctaaagtgacgtgagtgtgtacatattgctcggtttctttgctaagttgatcagatattgcctgtcttctgtttaaactagaacacctacttgacactatctgttcactattacttgaatgcatggcattatctcagacctacctgttatgctgcaacaagaaattaaaccttctaaatccatattgaatgaaaattgtagagtaatcaacgcttctctaaaagactaaaacttgaagtagctcatcccccatttttaacttaaaagaataatatccaccatcttacatatcatgccattgaacgcattataccgttcctatgagtaaataggaactcatttctaatataataggacacaatacgggttaactatcttaaactcttctgcacgagttaa

SEQ ID NO: 34611 - DNA, 511 bp, Oryza sativa
tattggcgctaaggctcaatatgatactccttgccgtcaccccaccccccccccccctcctccccggtggtaggcaagtcgctgacgtttaagggtcagcaccaacctctttagcactaaggacctattcaggctctttggcactatggatctatctgtaagaaaaatatttatatcctgacccttttcataaatttatgttaaaacataggccctcgatacaaggatcattggcgccgagggtccattccgagaataagtttgtccaaggatctatttgtaaaataaattttaaaaagaaccaaatgtaaaatctagacctacaacaaacaatagcgagcatatacttagcgcaacgtcatcaagaaaggcacttatgcaagaacagggataataccaaatgtcgctaagtgcattctccatgttcttgagtaagtgtattctccctgtggttacttacagaagaatgagatcgacctaaccaacttttagttctagattattatgagtc

SEQ ID NO: 34612 - DNA, 614 bp, Oryza sativa
aacttctaagtttagctcgatatcatgtatgccaatatgtttggctcttcatttcatgcatacctttttgttcctatatcattggttgttctagaatgaccatatcacccctcatttttttctccaatacgtaggagatctgtttatcatcatattaacaagaaaaaaagatgggctataaccctgagtacagaaccaaacacgcacataatgagttctaggaaccatacatgttgcaaaccaaaccacaacacaagaccacaaccacaaaccaaaccatgatgtgagactaaccacccggctcttgagtagtcaataatgatagcccctgagggggggccccccccgcaaaaaccacaattgtgctttctccttggcaagcaaaagagcatcggccaatttaggagcagtcccataaaaaacacaatggtttcgatgcatccaaagcgtccaagaaccaagaatgactatagaattcaggccatattgcaccctcaatgattatgctccaccacttaatttgatcgtcattcaagggggaccaaaagaattaggacaaacctctacacgagggagtacaaaactgtttatgaagacacatttgtgagaaagtg

SEQ ID NO: 34613 - DNA, 585 bp, Oryza sativa
aacaccgcacgtactcacttttggggaaaaacactctctaagtgtgtttatttgccagtggacaccatggccattaaaataatatatttgtgccgacatggcgattggggcccaaaaattttacacggagtgaccaaactacccctggcgataggggccccatctgtcaggcttatcttctacctctggtcggggcagagtcggagtcgtcgccgcttgaccgccaaatccggctgctccttttgctctcgagtaaaattagttgaggggaagtcctccctttatcctcctcaaccgtttccagcaagaccatgacgaggaggcggaggaggtggagcacggcgacatctagtgccactgccgcaggaatatgccgtgggcgccgtcggaccacccgcgccttctagagttagaggaggcaccgctggtatgcacagcttcaaatcaaccccaaatacagcagctccaagccctacccagcgcacaagccacggtagcaaagcgagcaactgcactgagggcgtcggcgaggggagcaccagtagccatggagcaagcaggttctcgatgattgacggagcgagc

SEQ ID NO: 34614 - DNA, 537 bp, Oryza sativa
catcataacaaaggtaaataggcatggctagataaaacagtgataacgcgggaatttaaataaagctattatgcaatatatttaaatcaaaataattttataaactgggattcaatatgttataggatgatgtgacttgccttgctcgctttcccaaacgttggcttcaacttccacgaagagcggatctttcgaagctgcagcgtctacacgaccaacggaaaagaaaaggcttttactctaataaactccatataatcagcagaaacaaagcacaaaaatgggttcttgacttcttaaggaaaaattagagacttgaacggtccaattccgagttcaaatggccaagttatggccatttgaagtttatatgctctttaaatgaatatttgcgaatttcttcatttaaattttaattcaaaaatggatttattgcgtcaacctaggggaggggcgcgcggaccgggtccacaggggtggggcccacgcgtcagcctcacggtccacggtgaaccgggcgcacccgggcgcgcaccg

SEQ ID NO: 34615 - DNA, 623 bp, Oryza sativa
ctggggtttcatttgattaagccgatatcgaggtaggatgaatatcgactgggatttgggtgtttgctagtcgtcattagaattggatagtatgacgactaggttaggtgtctagccgatattgatagacaatacaatggctagagggataagaagattgtgaagctttagcggggtggaagtgttactccgataaccgtgagtggccacggaacggctaggatcacacagagcccgagagctaactgtgcggtgtgctatggaggtcgatggaatagtgaagctccgaccactatacgcatcgaggcgtggggtgccaggagcagcacttcgaccttaggtttggttttgccgggctttacaaccgacggtccgacgtcggggtcggtagaccgcacgaacgttcccatgaaaggcgtaaagttccaaccggcggctttttagtggctaaagggtattttgggttaaaaagaaatatttgaaaaggcaaacataaattcaaacggcatttgaataaattaagaaaattcaaataaatattacaatagcaaatttagtgccaaaaggtaggatttgaatttatataaatttaggtccaagtttcattggaatcggatcttgat

SEQ ID NO: 34616 - DNA, 691 bp, Oryza sativa
tggtagtagccaatccattttacatgacaagacaaaggagtcatcagatttgatattcccatttataatcagattgcacttatttctctctcaaaaaaaaaggattccactgtctattacaaccatttcacactaccaattagagtagaagcaaaccggaaaggaagataaatattagtaatttttatccttttttaacactgaaacacaactgtattatagatccaaatctggtaatatgctttttcattagtcaatgaggatgataattttaacagagctagcttgatacaaagacatgactcaggaaaagagtaagttgcatctcctaggcaaggtggtgggtgctcaacctcatggcacactaatggcacaacctcaaactgacctgaaatctaaagtggacatgaaccttcaaattttgcattgattcacttgggtgctacatagaggacaccaaaaaacttcaaagctctgtcctgaccagggtgctaccatgatagaaattagttggtgatgccagcatgttgtcggctagttctaaaatacatattgtgggcagttttctccacatatatttagtcaatctagcctcactggctcacagctccaaagtatattagtttgcccaccacagcttctgtggctcctagcagtcacttccttttatgtaattaacacataacagatg

SEQ ID NO: 34617 - DNA, 565 bp, Oryza sativa
tctctctgtgtttttcttttttctcttcctaaacggaacaggaaacggaaaccgtgaagcagcccagcacgtgggtgtataattttttgccgggcccaccgatgggccagctataaaacgtccggtgctctggcagcttttgcgagtgacgtggccgcctcacctgatctcctctcgttggcgtcactgggatcgggcgccgagatctcctctcctgatctctgggcgctgaaacgaacgggcagatcaggcgcgcggccgtactggaatctcaccggctcgtcgccggtgacctggagcaggttgttcagggcgtggtggtattaattggggtggaattatggtcttcgcctaatcccttcctctgttgtcgtctcgggctttgtccagaccagattcagccacgcaatctgtgttcggatttatatgtctctcgcattcatcaaatgcggttgcaggtgctcgcccataagaccataataagtactatacgtacgtacgtacagtcgagacggtccatacctcagtcgcaaagccagatgcgtcggccatgcgtatgtaagct

SEQ ID NO: 34618 - DNA, 633 bp, Oryza sativa
aagttttttttttaaaaaaaaacaggaactggaaacaggagcttccattaatcacaggctcaattctctttttattttgaattgcagtagactcctgcgcaagttttaggacaggatgaagtcgaacaggaagtaaaatgagaagacataaacgatcgtatctgcctaaacagagcagttaggactccgatccaactcttcgtttgtgtagtaaatgccgcttctagacagtagcatctgtttccaggaagattggagtcattcaagttgtgctgctctatccagaaccacaccaaacagctatcgccttagggtgtgtttccacgtcaaaattgaaagtttgactaaaattagaagcttgaagaaaaaagttaaaagtttatatgtgtaggaaagttttgatgtgatggaaaagttgaaagtttgaagaaaaagttagaaactaaacaaggagttagtctagagatccttcgcaccataaatcaccatccaccttttatgaactcccatgtttcaagacattaaggctgtgtttagatccagaggtgtaaagttttgacgtgtcacatcggatatacggacacacatttgaagtattaaaacatagactaataacaatacaaattacggaat

SEQ ID NO: 34619 - DNA, 722 bp, Oryza sativa
ccaaggatcggccaatcctgatcacaacctcttgccacaccacaacatagacatacgaagtgtcacaccttaactattgagttcctgaagggagctatatgaccaaggtttaggtggaggttgctcatggcctcaaagaacaatttttctaagcttgtcctcaccaccaccaccaatggatgccccagccaccaagctccattgggtcactattttacattatagcatcaattactctggatcaacaccaccatgatctttggtaaggcaaatttccgccaatgtgtcttccattgcatcggcaagctcttgatcatgtagacaatgttgcattcgttcatctgcttccatccagtctttaagacaaaagattgactcaactgtctcggctgtcaggcatgaccttcgttcttttctccctaatgattccagtaacgctgaatgcttgctcggaagaaacgaaggaggccggaaccagaagaatatctcgagcaaagtgagctaacacaggaagagttcgctctttctctttccaccacccaaggagatcgacatcgtcgccaccaagcgtcggatcatgcttagtatgattggtgacgaggtagtggttaagctctgaatccgggttccatgttgatttgttctctgaggatggagaggcttggtcgtttcctatatactgcttccacaaatttactgcacttgactttcttgctttcttt

SEQ ID NO: 34620 - DNA, 583 bp, Oryza sativa
aaagttgctttaaaaaatcatattaatccatttttaaaatttaaaatatttaatactcaattaatcatgagctaatgactcacctcgttttgcgtatcttcccaatctcctcaatccccctctccttaaacacaccctaatagtagtatgagtagttgtgatagacaggagaggaaataatttaaaaatatacgtttttttccgtggaatttgcatgaaaatgctgaatataagacgatttacaaaagagtactgttacacgtactaaaattttcttacaaaacttttactaataaatttctcaaccgtttgatttaactagatgaaagttgtaagaaatctagatttactcatagcttgacaaatcagagtttgtaaacattttgtaagaaaaatttagtacgtatagacttttcctttataaaaatataccactgtcgcggtttggtttagcgagaacgcggcgtcgcacgggggatgtgcgagaacgagagcggtatcgctgtttagataagcgaggacgaagtgccggcggtctcgcggcttgagtaaccagagcgtcagcactctcgcagtatgcgtt

SEQ ID NO: 34621 - DNA, 635 bp, Oryza sativa
ccttggtgttcgccagcgagcacggctccacctgccatccctgtcgtctccgccacgtttggctccgcgccacgccgcgcccacgatgccggagggaaggagagagagtttagtactactccatatgacatgtggggcccatgttaatttttaattttttattttttattggattgccacgttagcgctacatgtataccatgtaggacaaaactgttccgatctgccacgtgtacatatataccatgtaggacaaaaccattccgatctgccacgtgtacacgtaggatgaaaaccattctatattgagtagggggtaattcgtccggttttaaaagtggttttaaaagtttagggtgtgaaatatctggtcaaaccgtcgggatccaaaaaacacgtatcgacgaaacaaagtgcatctaaagcactcctctctcaactaagtgcacctaaagcactcctctctcaactaacgaactatgattgaaacctcgaagtaatccctctcaactaacaaactatgattgaaaccttgaagtaaaccctaactttttttcttcgtctcaacccctcatctatttatataaaaacttgtaaaacttttattaacaataggactcaatcccttaatttcc

SEQ ID NO: 34622 - DNA, 549 bp, Oryza sativa
tttgttagaaagtcaatacaaaatgattatcttcttgcaaaatttgtttggaattacttagtttcgtcaatatgcacaccagtaaattttgagtgttgttccccttaaatataagcctctttagacttgaatttaatactgaataagatcgctgaaccagaaatgtgtcaatcatgcttacccagctagctagctgcctgtacggctgcaacttgtacatcataaattcataataattaacatggacatattttgtaacaaacaaatgccttagaaacaaaacaacggaattgacctacattcctcttttctctatggaaaaaaaacatctacagatcttctctttattgttttccagtgcaataagtgtgataacatgttgtcccaacttcaaaacttccaacgacaaagctaaacataccaataaaggttgcaagcttattgcaccccttaagatcccaccctaaatagatgatgggtgatggatgacacagagttcatgacaattattcgagggcataattaaatattggaagttgatttaaacaa

SEQ ID NO: 34623 - DNA, 570 bp, Oryza sativa
atagtaatgtgccttcacgtttctactaccgctaaccgaggtggcggcataaatagattcgaaccctattacacataaaaataacgggtcaagtagattctactaccactaaacagcaccgtattgaggctcattacaacaatatgcacacttccatcctataagataaggatacacatcatatcaatctggataactgcgtgaacaaatttataaccaaaggatattacattccgggacggaggtggtaataaatagtcacatacagaatccactgcctggccctgaaccttataaaacaccctgctgtactgccatgccaaagcgccattaactctctcaggctatctcaccataaacaggctgtacgatcaagcatccattccgatctctagaagaatgatgggagacagcacaggcagccttgccttgtaaaagagcgtacaagccaccggcggctcaggacatatcttgctgcccaactccaccgtgtacccggaacgacgagctgctcctgacggactgctactcctacaacaacatctgcgatcccatcccaccggcagcgct

SEQ ID NO: 34624 - DNA, 516 bp, Oryza sativa
gtaaccgcgcggcggccgctttggaactagtggctcccccgaattgtagggtatagaccttgtcgatcaactgaataatgtgtagaatattagaagcaaaattggttatgaggaatagtttgtttggcaattttgatgtgcattgcatacattgtcttgtgcatttcaatctgtcatccatatgtttgcctgtagaactgccagaatggtttttattttttaaagaaaagcaccatttggctaaaacatgattttcaaatgcaagtctactatcatttgtcttttttatcaatagcttgctaaattatcaaaactataacactagattggcatccttaatcaacttaaatgtctgttctgaaaatatcacaaggatggcttgacaagcaagtaaaactgtaacgccttgattaagatctctgacagtgtctgtgtctgaactctgcaaatattgcatacagcacaacttttcttttatggggatgctttaggcttttaccttaagtatatggacat

SEQ ID NO: 34625 - DNA, 657 bp, Oryza sativa
ccccaatggaaaaaaaaatgggttgaagaaggcaaaagaaaaaaaaaaaggtgccggtggggttaaggcccaaacccaagggccaataagaataccaggtcccttcggtaccattaaccctaagaggttcttcttttctggccggggggaagttttgtggtttgtggttcgggggtgggcctttttttttcctttttcggccctggggcttcctaaggtccccggctggtgaatcgccttcatcttcttccaatttgatcgaaacccaattggttaattggggaattaatttggtaaccttttttgaagccaattttgggttttggaattgaagggttaaaattgaataccttgcaggacaggaagggccattggctttgcagggaattttccttccttcctcacaaatggtttctggattttgggaaggaacaacggctaaattgccttttggccaacggaaccccttggttccttttggtttggcaaataacccaccggctttttttttaataattccccaagcttggaaaaaattttaagtaggttcccgtcgacgattgatttctcgggccggtttcttaatctgatggtgggcaccggcacccctggtgtcaaatcgctatggtgcttcgacctgatgcgccagcagctgtt

SEQ ID NO: 34626 - DNA, 567 bp, Oryza sativa
gtgttgaccaagaggtcttggtcatctatgctgcaattccaagccagtccttcctgtctaccgtatagacagatggtgtaacaatgtagtgctcactccctctattcttttctagttgtccaggctatccagtacacatctgtgacaagctgttacgctttttgaagtatgggctattcctgctctgatcttccctacatggatgtttttgaagaccgtctacagattcagataatatagtggtgcggccatctgtgtctcaggccttgagcttgatgtattttatgatgtccatgcaggtgatagggcaggtcatagattggtgatgagcattcatatatgtgcctgtggttctcatatattcggcactcaccacgggaaagtgctatgtaacgtcatgtatcgcggtccattcatacttatggtcacccaatcatctttgagttcgcattagcacaaatatttagtgtgttttcttaagtaaggagtaaatgatattccacagtttaatatgttgctcgagctaatggattcttttttaatacagtcagttctccagtcaggctt

SEQ ID NO: 34627 - DNA, 559 bp, Oryza sativa
  unsure (1)..(559): unsure at all n locations
tatcatcgccagagaggtatacaggattcttggtttcccacagtgcgatatctatccaacagtgcagcagctccagcttcctcttccangcatcaggtatgtcacgtatgatgagcatggttaacatcgaggatgttgtccatcgttcctcttgttatatggcattataatatctgaaggatgggttacatttaaatatgtcgtatgggcagaatgaacggtcaaaaggccctagcccttcgttcaatattgggataaaaaagctatgtgtagagttcagagggacttttcctgtgcganactatggcttatggttcatgttaggcatgtttctagaggttaatatcgctcgtttcccatgttttgtgcgtagtgttcgataaatatgtttatttcagtattagtttgtattcatattaaaatggagattccctgttcatatagtttaagcatgactcgtcgaacccataaatttatttgtttaatgaaggtagctagctattcgaatttcttagtcccaagccgggtagaatcatacgtctcaagatgcgagccttga

SEQ ID NO: 34628 - DNA, 504 bp, Oryza sativa
tattatgctcttgcgcatgctagtgagatattactctgaccaggactgggcatgaatactataaaatgtcctggatatttgtttagtatctacctcatacaatgtgcggtagaatacaaagaactgaggcggacgaccatcatcttaaggctgacactctgctcctgcctcactagtgactggagtgcccttgggcacaacaactcgccaacggggagcatcagggcttatatgcttcgtacgaaccacacctttacccaccgtcctgctacgattctgcatgttcactggagcatgagtgacttaaatgcatacattctcatacccttcagccaaaggttaatgatgggcaacctctggatgcatggccctattggggctcttatgctgggacatgaagaagggatcaacacctcatactgaacatagtgaacaatcagtccatgcaacggggaagtgcaatgtgacaaaggatcgcgccagtcctgaacaccacacaccttc

SEQ ID NO: 34629 - DNA, 546 bp, Oryza sativa
ccataggggcgtacttaaaaatattcagtacttagtgaagtctaaaataaaaataatgtcccgggcgaaaatgaaaaattcctagagtatgatgcctcgtgcaaagcaggtggacttggggagcgggacctgctgctacatccttcattatccatctatgactttacccttcaatctatcatctcactgagggaagtgtgcgaaagagtgggactgagcgagatgagtatgattcgcgaaacgaggtgtgcacatggagtcatgattaattgagtattaactatcatagatttcacaaatcaataaatacgcaatggtctggcatgcccactattgaaatatgtcgcaaagaacacaccgcatggttgtacgaaaagcggactcgcgaactacgacagacaatctctcctatctgcacctaacgaacactcaggcttttcagcctgacggaggcagcggacatggccatcttttcatgcatgtgtgaggcaccagaggtgatggcgaaccggagatcaacaacggcgggttactacgagtagctga

SEQ ID NO: 34630 - DNA, 619 bp, Oryza sativa
agttatcttaatcttttatgtttatttctaacaagtgtcatggaacaattagtgtaaaatttttgcaactaccgtgagtcctgttccattacaattgttgcatcatacttcctccgtttcataatgtaagactttctagcattgtctacattcatatagatgttaatgaatctagacatatatgtgtgtttagattcattaacatctatatgaatgtggacaaacctagaaagtcttacattatgaaacggagggagtaacttcttagtgttttttagagttttccttttgaattcgggcttaggatcgctttgcgttataatctgaagtatttagtcattgccgcaagtgatcgctgcgatgcaatgcgagcagagttgagcgaacagtctgtcatgtaagagtacctgtatctgagcacaaactaaccatgggcgcgtcatgcttatatctaggatgtactcaataatttacaaccccaagtgtatcgttttacggtctgatctcgtgcatatatcgtgcatatgctctctttttgcttctatgtaaactccttgtttcaataataataatacaaggataacgcagtaattaatttattgagattgctgtgggcgtt

SEQ ID NO: 34631 - DNA, 612 bp, Oryza sativa
ctgcagccctgtttgaaatgcatatgtacttgtaccattacagaaattcttaaaactgctgtcttgacagctacttatcaaacagccccacctgcatcatacgttcctagtggtgcctataactctgcctcagttattattttgtggcccactggtccaacaatttgaaaaaaattatattgaactaaatatattgaacagtagtatgacgtcctctttgcttgagttccatattacagctcacagtcctgagatttgtttcaccgattctttccatgcgatgtgcacatattcttattcaatttaaaaaatgaaagcagattatttttaacaagtaacctatcacgttagcttaacattgtatatttgtggtggaattatgtaatattccgatatcgcatttgaagttttgaacatgtgtgctcaaattgagggacacatgactgtagtgaaagcaaatataaatgtctgagcaatggactatactttgtattcattactacaagttatgtccttttgcaggttgctaatgtcctcttacattacttgtcaggataaatgagtttggtgggacaaaacatgacccactaataccaacgtatggcctctaaa

SEQ ID NO: 34632 - DNA, 501 bp, Oryza sativa
ggtttttcttgcccaagtgatgaaagaaacgtcctgacgtggaattcagtctcttggttgcacaactcatctggtgtcctaattaaaatagaaatgattatcaccatgaggttgagatcacgccctgaaggattggattgtacgttgttcgtgtcatttactcatttctgtgtatatatccacttctagatgcttcttctacttccctcatatataacgtgtaaatacatatatttcttttttttccaaaaagttaacccttcatatatagtgcaattaatgggaattttacgtttggttggtgacatgttttgccttttttttttttgtcttcctgcaacagtaaagcataccatgcttggttacactccaaaagattatggtaaacgttagccacgatcatcacgcacgctggactttgcactgtacagtttcgtcatgcatgggacagatttaatgatggatttgaacgtcaacctttgcactctcaccaacaatgga

SEQ ID NO: 34633 - DNA, 602 bp, Oryza sativa
aaatatttctttcacaattggtgccgcgtagcaaatacctctttcacccgtgtcttgcaaaaagacacccattaattcgcatgctacagcacctccactgccagcccctgcccggcatcgcacggcacggcgacggaaagtgtcggccatagacggcgtccaggctgccgtttccctccgtccctgacgccctgacactgctacagtggtctacagtactacatgttcccaacccaaaagtcaagctccgatccggcacttgcgaacgaagccttagactaactaatagtgccattagatatatatatctatatttagactaactaatagtgccattagatatatctaaattttagaggatactggaacttgaatgaggtcaaacaaagctgcagatcaagtgatatgaatttcctaagaattatttgtttttatgtctaataggaaaaggaattaaagaattccctggaaaggaaatgggaacgagggaccgaaattaaacttcttggtcgagcacgaggcgtggcccagagcaaagtgcgggcgcgaacgtgcacgcgcgagccgaagggcgaggcacggcccacgtaggcaaggtgcgc

SEQ ID NO: 34634 - DNA, 1373 bp, Oryza sativa
agggcctaagtgtgacatacaagtgcaacaagattttatacacataagtacataacacacttatacaagatttttccctgggggagaaaatgcaaccaaattttataaaacagagcataagacattagataaggacagcaataaaattaagctgacatttcatacttgacataagctcttcaaatttctaaaaacttaaaaacaaaatatctgtaatgcatgaagggcagtagtacatactctttaatgcatccagaacgagaaacgggctgagctccttcaaggaagtgaagctcatcctacaaaaggagctttgtgttagaccaatattgttctctcatgtgctagatgcaaacccatgaatttcctccttgagctagaaacaaacccacaaaagtttttctacctgttgaagtaaaatagactatgcacttaacatgagagaaatgacaaaagaaaattttgataattcagtactgcaggctgagtgaccatgcaccacaatggaaaataaaaactaaacttttgaatggagctggattctttcatgttaaaagacacagttgcagaaataaaaagtaaataaaggttgttacttgtaccacatctgcagttaaaacttaaaacccattaatcaaagcctggagtaattgaccagtacgaacggtcccataaaggttcctgctttactgtgtaagtgtcctttgatgttgcacaaaagcgagatcgggtaccaaagcagggactgaccttgcaagaaacgataaaaagatgtctaaagcgcatttgattactactacaaagaagttctctgatatctgaagagcttctgaaatctctgctccttaaaagcacagcacagtgtcaagaacaacacattcttccctccctcgttaaacacaaaatctagcaacatcaaaagcctcaaaccatggtggcagcccataacaccaacacggcaccacccatcgtgcaaagccctcatggccatgccgtctgcacgtccagtgtcgacgaagcaatggcggagatagacacgtccactgctatggctctccctgacaaggccactcaggtcagttgtccatgcccacgctcttcttttctccaacgaggagcccaaccaaacaacgacaaaggtagtacagccatggcgccacgcccaaagagggccaagcttgtctcgccagcctcggattgatggcgccgtgattcacctccgcctagaaacagtactacaagtactagaatagcactagctaccgcaattaacaacgccattactgtacacttcacagcatcctacttgcagtagcgggtagctccgtactcgcccgcttgggttttgaaaaatgcgcggcgaatcggatctc

SEQ ID NO: 34635 - DNA, 648 bp, Oryza sativa
ccaaatttagtttatatacgggttatatatagagagagaaaatgagaaatattgttagggagtaaggggaaccgccttcaatagttcagaggtgtaaaatgagctaaaaattatttaaggggttaagtgctctgttaaaatagtttgagtgagtaaagtagacttttttaatgtgtatttaccaattagctatttaatttagactttaatatggtactaaaataaataaaaataaaatcaaattttatataaggcctgaatcagaaaggatcaaaatggtaccttaatactcattcggtcgtgaatttcataaataattttatccctaattgaaatacttgatgtatcggatggtttgatagtgggatgatgactaatgtgttaatctaggtatgtgaagtggcactgattgtagccggactggcaaacccacgctacccaatcaataggtgtgtccgtccctcctgtatccttcttgagaagtctgcccctgcagctgtttccttcttgagaggacaggacgagagattcagattctttcggtgaatattcacatgacaagtgcctcaagagatctttacttatatactgcctccgtttgaaaagatctgaaaattctagctatatgtttagataagttacttacaa

SEQ ID NO: 34636 - DNA, 593 bp, Oryza sativa
ccgtgcgcgtggagatgagggctccggcgacgacctcgacggaggaggggtggacgaggtggacctcggccgcgcgaagctaacggcggcgacggcgtgagacggcggcgagcctatcggcggctagcggcggccggagtagcaaaagcggcggcggcgggtggttgcacggcgcggaggcgttggggagctcgggagaggtcggcgcaatggggaaaaagcgagagggggtgccggtgatgcttaaataggggatgggggaaccggacgtggccgggagcggcgggattctaccgccgacgtgggggagtggggaggagacaaagccgggattcggttttcgaatcccggccatctcgggcgcgggcgccagcgggagagggaggggaacgggcccggggaatgcggcgcacgcgcgggcgtggtccacgtggcccgggagagacgtaggcgtgggctcggcgtccgttccgccggtggcggcgcgagcgggatcggcgggaggagggaaacgggtccgacaggtgggccccacctgtcggcgaccccgagagggaggaggcgggcggccggctgtcgggcctgggcctcgg

SEQ ID NO: 34637 - DNA, 695 bp, Oryza sativa
ctgcagccctacattgaattatcttttattttaacctggggtaggctgggttacattctcataaaattaaaaaaatggtattccttgcatatgaaaaagacctcatttatgcattcttgagcaagataggttatgtgtgagtgtttagtgctcattcatattcatgcatatcacatccatcatatgtgctcaagttgactaagtgctagttggaaatttcaaaatatcctttttagccaaaagtgaaaattttgaaaagtatagcctttctatgagaatctaattggaaatgattttaaagtatgtttgaaatgtctcttaatacttttgtatttcaaagaagaactaagtttcaaagaaaatgaatttcaacccaaaatgtagttctaagtatcttgttttggcttttaacttcaaaattttgtacaattaattctaaaaggaattttaaagtgattttaaaagtaaaatgatagtgttggtcatttcaaacatttttggtattcaaagtttctctaaaaggccaaccaatcaaaagaaatttagattccaatcttgaccaaaatactatctagaccataaatgtccacctattagcacttagatgacttctcattgtaggggttgcataaatgcatcatactagctcaaatgagtacataactttcattcatattcatttcactccaaaacca

SEQ ID NO: 34638 - DNA, 694 bp, Oryza sativa
atcaacaatttgggtcaacaaggtaagtagatacgaacttcgtgaaatgttagaacagcaagataagcttgtaatagaaaaaatgtactaaaaggattaactaaattatgtcgatgcaatgctatgattcagacattgagttattagtagagatagagagggcaccatggtaaaaactagaagtgaaattactgacttgagataaagagatcaacacatcctacttgggaagatcaaacaatgacaaacggttggctggtaagctagctcaaggttgcagcgctctgaatcccatctccatcccacatgatgtcccttataattaaccttggtaacaaatggagtatggaacctctcgagttatctaaattttttatacaataaactcaagttgactgcctgactactacaataaactattgaacgtacaaacaaaatatatttcgtaagatccaaaacttaactgcatccaactgccaatggccaaaagcaccaaagaagcgttttcgtagtaaattagttggtatagacataccaagcaagtaagacactgtcctaaaaattaaaatgctaaatctcctgtaaaatatccctattcaataagatccatgcaaatctaaaatgcattaactccattctaacatctcttccaccacaattttttttccccaaatatcacattcaactgtctaaa

SEQ ID NO: 34639 - DNA, 508 bp, Oryza sativa
aaacagcacccccacccacgttccttgagctaaactccgggaagactgatgtgtgcaaagacagggcagtggtggtaccacagtaccactcgctttcatcgcaagtttgtaccagctccgcattgactgccgcgtcctgagacggcacgtacagttgccgagcgagcgtgacgggcctgcacgagatatatggcgatatggctatggccgcatcccgagcgcggagtacgtacgaaatgaaacagcaagggaataaattgagcagccggcagcgatggccggctttgacagggacgcgaccgaggtatgcgacgacgacgtacggctcgacgccctcccctcccccccgcgcagcggcaaccgcgagcggacaagcttccccggtgacacgtctacatcggtctccgtgccgggccggccccacacgtcagtcgtgataccgcggccgcgaccgcgatggatcgaaatgcccaatgccagcaatacttgcaacgcggggtttggattg

SEQ ID NO: 34640 - DNA, 849 bp, Oryza sativa
tattgtggttttttaccaacccacgaaagatggtttctccagtagtggtagtatcttgatttccagtttaattttcatatatactagcccgaaagtatgctagtgaaatattgttaagcatgacaactagaaatataggatgggagaatctctgccctaactaggatgtacataatcattacacagtttgcactatcatagaatccatcaaaaggccaaatactcctaacatgataaacaagaaaaaaaatcatggtacaacaacctaaaaacaaaaataaaagggtttctcccatacttatatctcttcatttttaatatagacctctttgtgaaaggaagtaccaaaactaatagagtatggtgtaagtatatttttgactttccatctttttttaaggtatatacctccagacttacactttgtggtatatatataccttgatgtacctcctaacaacaagagaagtcatgtcattgctaatcataaacttgtcttctgtttacttcaactgatttgtttttttacctttgaaataggagaggtatatacctctctaatgtggaagaaaacctaaaagatataccttgtggaccaaatgataggccattcgcatgagtatgatagttgcattaattgcatatgcaacaaggttgtattgtaggttcagtctgtaaacattcaaacttggaaggttcatcattctggcataaagacatggaggaaagaagggaagccatgcacatcacccttctatatattgtctacgttcaagtcctggacttgacatgggtactcgcattaacagttaattattctttcagtggtagacgacatacccattgaca

SEQ ID NO: 34641 - DNA, 1666 bp, Oryza sativa
  unsure (1)..(1666): unsure at all n locations
ttagtggagccggaagcatatgatctagctagttgtgcaaatggagcgtgcaagtcagagatagtgattaggagctcataactcattgacgaattcagtcgtcgagcgcccggcctcctgcaaatttgtcaatttttaaacgttctcactgtcaatcgattcaatttcctcctgtgcctcgtgctgatttttttttcaattaaatgttgtcactgttgattcatttcctcttcttccaaatgatctgagctgtactgctgtgcctagtggttacagtgacctgagtagcaccctaagatcccgagttcaaatctctataggagcgaatttcagatttaattatttgagggctaagtagtcctgagtttaaatcttcatatgaacgaatttcagattgggttatttgagatctaagttatctgtttgctagaaaaaatgatctgatcagcaggaaaccactgtgctgtactgctgtgactggtaaatttcacgagtgacggatcatttggcaaaaactgaaaccaactgatgaaggattacgcgagttctgaagatagaatgacgcaatgatcgatcgcgccgccatacaaggagaacacgaaactgatgaccttcacaaaacgcatactttagcaacctatggactggactttcacggtcaatctttgtccggtctgaactctgaagcagcagtattaggttaggtgagacgaaaacgacggaaacctctgcgtctcacacgccgtaaaaactcaaacggatacgtggatcgtgaaagggattggtaaggttttcgattaatcttaccataccaagcatggacggcggattcagtcattcagagattggatgcaattcttttgcttctgaattttattattaatttttttggacgccttcacctgcaaatagaagaagttcagacttcagagcatggggagaaaaatgttcttgcacatgggaaatgagatagttatgcgttgagctttaaatttatgactgatgggcaagttttttcttgcgattaatgaaatcatttaagttcaatttggagaatgtgatacgtttgcttaaatgatgcttatggatgaacggaagaaacgagtgatgataagttaatatatgtatggaaatgggggtatctgaattataaggtaagtatggttgtaagtgactaaantgatagtgtaacttatctgtaaggacatggattgtaagtatggtatatgatctagtacagggggttgatttacaggatcggaagttcgcaactgatggttgtgatgcatcaaacgggcttgggccatacaggtcgcaacagtagttgggcggaaattcattggcccacataggtgtcctcgctagcccgctctgctcggccgatggntacggccctgtcgccttcgttcggtataataggtgggccgcagcacaaggaattgagagaggatttccgttcttttgtgggcccaatcctgcagttagtcttacatgggccgtgaattgggatgtgggtaggctaggccgaccaaccgacccagccgacaaagtatggggcaaaagcccaaagctgcatgggttaacctacaaaatttagggttaattcgatcatgccataaatatgtcatttcagataaatgatattataattcatcattcgtagctg

SEQ ID NO: 34642 - DNA, 657 bp, Oryza sativa
cagaacttaaaagttgaaactggatggatagaaataatcaaaggacatattatgttttttttcccttctgtccaaacaagaccaaaaacacatatccctttattgaaggaaatgttccacattgttaatttgtcaaggagaacacaggcccacagcccacatatccaactaggggataaaccttttttctagagcgaaagtaaggagtctaatgtagcaaatcagaaaggtaaaaggccatcggactaccaagttggaagacaaatgagttactgaaagcatacggatgccaatatatattcaccataagaatatgtgcacaatcacataatcccttgtatgacagtaatatctacaattctttgtatgacagtaatatctacaattctttgtatgacagtaatatttacagattaggagacagcacagaaagtttgctacgtttatgtcacccaacaaacatgatcctaatatcctatccacaagaggttatgcaaccaacaacaatcatgatcatataattgttgtcgataaatcatataatttcacatattcaactctgcaatttaatcagctaccatctattttgattcaacctaaacatcaaccattttaaaataaaatgatcacctattttttttagaagaaactaattat

SEQ ID NO: 34643 - DNA, 682 bp, Oryza sativa
caccatgtacttcatattttacaactacagggatagaagattgagaggtatggactgtgttctagctgccatctatttttattttgaattatgagagaccaagccttctgttccaacgtacttaattcattctagataacaatcgcagggtctgtctaggaaggattatgagaaggaattggagcttgcggacagtgagaaaacaaaaaagcttgaacagaagttgtttcgtggtctttaagattcactagtcctcaaggaggtaggttctcatagtctttccacgtcaagatccagtttgtgttcttttcaccatttgatcttgactaaattacgttttaactttacatgctgctaacgggcaaaaatctgtaatggggctagttttgattcctagcactaatacacttccgatttacttgcaatgatgttcaggtgcaaacactaactcatctcatgtacacatatgcaatcgatgtattagtttagtgctacgcatcatatctgcttgtgctagtgtgtgcccttgctaactgtagatggacccattccttaactgagaattagggcctgcataagatattatccattggctaaaccttatgctcaagcttcagttttcataggtaattttctaaacttctaaacaagttttatgcacattacactgtattggctaaaa

SEQ ID NO: 34644 - DNA, 747 bp, Oryza sativa
catcgaaatttcacgaaattcgaccggttttcgtcggaactgtgaacctgcaccggagtaccaaagtggcaagacgtgatctgcaaaggcagaggatgctgccgtgtgaagtggccaagctagctttcctggtcaaaacaaaaaagtgaacaaaagctagttacaacacctgcatgtatatttataccataaaaatgggaaaacgagttgaacgagattgcacgcagttacaccggagaggaagaaaaggttgcaaaattgttgcacccaaatttggggggagtgacatgacacggcaggggaaattccgtgaaatgttacacagcaatgtgcacggcaaaatttttgaacaagttaaaccaccctctgcctacctagatttagggttatggaaaatttaattcattttccttcttgttttcttgtaccagttcctttcaagtttgtgtgtgatctcagagtttttttttttggttgttgaatgatcattggatatgagtcagcggtgagagcgaaaggttagttgggttcgccgcgtaaatcaggaaccatgtagctcaagactaggggaagatgttgaagaagaggtgattggaggtggacagatggaaaaactttgagcaaatgaggaaaaagcataaatactacactttggtcttgcatggtgaggtcatggcaatgtggcatacaacaaggatgacaaaaaaccaaagttgttagtactgaggagtgaggatgcgtccgttt

SEQ ID NO: 34645 - DNA, 878 bp, Oryza sativa
ctacacaaggaataaaccaaataacatatttgcaaacgaaacataatttgtaaataaaacattgatatacgtgtttttagcgacttaaaagcaaaggctgaaaaataaactttgatgaaaaaaatcaaaatcagctccaaatttaatgttaaaaatttaaattttagctaataagcataaacataagcgaaaagattacgcgcttggtaccatgatctaaacatcggaggtcaacatttaattttccgttttaagtttggtaagcattcttaatttccttaatttcttcagtgatgaagtgtacgtaggtactgtattgaagagagggaattagaatatccccatttaaaatacgggcccattattaattttgggctttgacagacggcttgcgatcgtgccatatatatgggttgttatacggatcgccataattaaggaggtttcgccaatttctactctctaattaatataataagacccctaattacacaatgaagtgcatgtttaatcagtgtaaatgatcttttcagcggtatgtaaattaaatgacaatcaagtcgatatcagtacgcactcttatctgtgtgactgtgtgcactgtgcaccgtgtttaatgaattaattcttggtttaacaataaatcatactatacctccatctcaaaaatataatgagttttgatcgtatatcttatgtccaaaatcataacttaagttgttatattaattttgagaaagaggtagtacaattttaacttctgtccaaaattttcatgtgcttttgtactgacttgcattgtctacgcatagattcatttcatattgatgtggtggcctaataggccaagtaaacatttaattttgagactctgaatg

SEQ ID NO: 34646 - DNA, 634 bp, Oryza sativa
ttttttttttttttgggggggggggaattgtgatgctctaaacgtgggtgattgactgatttgagatgcagttgggttcgaatgggtaaattttatggttggttcttgggccaattgattgtctccgtgtgatttggttctgaacttttggtgggattggcgattcccaggagttctttctttttctctctcagtagcattgttgcagggatgtagctgctcgtgcattattgaacagatcagatgtcgtgttttgtgattagatggaaaagttcgaggttgttttgctgtggagtgtatttggttgtagtgttgcgtactgttgtatgggtaggaccatcaggatctggaccacttgctgttcttattacttgggagattatgatatttgttgctatcaggtgtcagaattttaattatgaatgttggctgttgactactccagaatgttggctgtgcattatattgtggttgtttctgatcgagaccctgattagatttttatagtcttgacacatgttttataagtggggttagtggtgggggtggggatgatcttggtggtcaactttctttattataaaacgcacgcactgcttggaaacaccatacacgatgccttttcccatataaa

SEQ ID NO: 34647 - DNA, 556 bp, Oryza sativa
cggcgccattctagctaaatgtggattagagcttgagctagcttaattagctttggttaattggagtgatgggagtgtgtgtagatgaggctaattgcttgtgtctatttataatggctgtgattaggacttttgctagctaagagtgttctaagctgttgtagtgaagtttgagctggatcaaacatgaaaatggtgtgaatgatcagaaaagtttgtaattagcaatgcttaatttccactgtttttgttttgctgttatgtcttcctgtttttttttttctgtgcctgccctgaccaaatttattaagattgagagaaggtaaaacattttcaacaaacatactccctccgtttctaaatatttgataccattgactttttagcacatgtttaacctttcgtcatattcaaaaacttttgtgaaatatgtaaaactatatgtatacatataagtatatttaacaataaatcaaatgatagaaaaataattaataattactttaaatttttttaaataagacgaacattcaaacatatttaaaaaaagtcaatg

SEQ ID NO: 34648 - DNA, 535 bp, Oryza sativa
aaatggacaagaccacgggcaaatgagactttggaccgggataatataataaatcaagtttagggacctcgatacatgctttgtaagtttgtggatctaaatgaaacctgcttacaagtttaagaaccgcaagtgcaatttactttaaaaaaattaggtacattctattctgtcacttgggacataaaaaggtgctatgtctgaaacatcgatgcctataaaaggagcgttaattgtaaagctaggatagtcgatggtggagaagctaatgacaacgttaagctatgatgagcttttattagctatcagtaggtttttattaatttcagataatggattaattaaaaccacgtgacctctacgggttcaaaaccaaacaaaatgtaacttgacaaaacctagtattatatggacagtttttagtagccgatggccgtggtgtttgcattaaacctaagcgaacacctctgcacaatcgatgttcacgtggttaactattcaaatatgacctaaatcccgaaccaaccgttaccac

SEQ ID NO: 34649 - DNA, 608 bp, Oryza sativa
ttttggtcatgtaattaataacaaactaaaccaactaatgatttatatttttacaacgtcttaataataatcgcatcacaaaatccacatggtaattaccactagcttgttcgattaaaatccaaaaatgtatctggcgcataaaccaattgtgcaagggggaattgattttgccaacaccaaactctgaactcatgcattaattgcaagaggtgtgtaaatctgagtgtaatattatccaaggaattagaccatgcgttcttatccttattggaaggacatactgacggtgctatatgatcccttaaactatactgcatggaccatatgagatttaatttttaatacacttatgaatgaatgcatgcatgcaatcctatcatttcttctacatcatgcatgcatgcatgcatgcagtgttctttgctgtacatacacttgtacaagtacacgtctagtcatctatactactaactcaattgaaaagattatcatttcttctcctcacacctgctcctcccctcctctagaatggcatttctcctgcctctcttcctccagacacatgggggccatacatctcactcattgtgcccatggtctaaggt

SEQ ID NO: 34650 - DNA, 662 bp, Oryza sativa
ccgaaatgcatgcgcgctgcttttcttgtttgctcttcgattgcattcaatcggttgtctcacatttggagctaagatgatggattctgttcctgttttgtttgtttggttgttgtcaggagccagactaccaagggaatttggattgccaaggctgtaggcattgagccgtttactgttgtaatggatttggagggcacggacggcagggaaagaggagaggttgagtgttatgtgcttttattataataatgtttatacgaataaaaaaccttccataccatgtttccttttgtaagattctgagtacaactcttccatgccatttctaactgcgtaaaatatttgatgttttatcttgtggttaattagtagcagtagtcctgtgtacctgagtatttaggctgtggaaaacaaaaaggttgcttttctagtacttgctttatccacatgtggcgttgtctcccttaataagttttttgctaggaccttagggccttatttccaaaatagttgccatgtagtgggtgtcattagaactcggcctgcaatgagctgtaaatgctgttattgttgttgtagtacaattacttaatcaccctgtacagctgattcatgggagcatctattagaaatgcaaggaagtcatgcattcatactaa

SEQ ID NO: 34651 - DNA, 588 bp, Oryza sativa
gaatcgggatggccacccctaactatacatgactctttcggttctaatataagtgtaacctagaccctttgtagatcccatatcaaaatttttcaccctgacacatcgaatgtttgaatacatgcatgaagaattaaatataggctaaaaaataactaattgcacagattgcgactaatttacgagacgaatctctttaagcataagggctcctgatttaacgatatggtgctacagtaaatatttgctaatgatggattaattagacttaataaatttttctcacggtttaataacggattctgtaatttttttttattagcgtcctaacaccccatatgtaatacaagtacctgagaagacagactaactacgattcggcaaggaaacctatgccgaattgcatctgaatacacacattttaacagaaggcaaaatgtggagcaatgcaagcccacgggttaacgggcctgccaaaatacaaccaagttaccagaatgtgcatccaccagccaagcaaatccaacggctgacaaaatcgactgatggattaaaatttgggatcacctgtatattttatcgacaaaa

SEQ ID NO: 34652 - DNA, 1110 bp, Oryza sativa
attaatatagatacattggctcaatatgttcaatgaaatgtctcactttacccaaagttactgtgatttaatttctttgcattaagcagtatgaaactaccgcatcatatggactgaaactgacactgacaaacctttcaaatgtattgttctgttctatgttaacattaacagaggcatagagctttcccaagataaattgctgacttgagatgccttctagttagcagacgagttaattagtactataatactactaattatctacctgtacaatttcgttttcctggttacatggacatgtgtgccgttgcagttactgtaaaattgccgtcagtttcagcatgttgcagccttgcaggacaggaaattatcagaatcaacagagatcatgcaacatcttatgtctgctgctagccccaattaataatactgtacagtgatgttgtcacgctagcttgatctggacttctggaatgatcataattcaggattaacaggaacttggcggagaacaaagcaatgcattttctcaagcagagtaaaagtaatttctcacaacattggaaattccagattcattccgtcatctctccagcgctagcttacacatagccctatcatttttatacagcttatctaccattttcttaaaacaaattatttgctttacacggtataaaaaaagtacatattagggtggcatgattccaacaaacccttttttaaaactactttattccaccgcatcacttagaccactcttttttagctatatgttattttcaaaatatgtaataatttacgaaaataattcgctcaataatctaaagggaaactattttaatccctcgagaggatatcccctcgttcaaatttaacttctacatttcgtaatgaaaaaaaaacaaattgaaccgcagctagttaacgtatattcagagtcaaatttgtttttttcgttgcgagatgtgaaagttgaatttttacttgcatgtttatggagtgatatgttacatgttaatacattttctcgaattttttcaattttttttcataaccatttaagtgacatacaaacaacgagagtatatccactcgagggatcaa

SEQ ID NO: 34653 - DNA, 867 bp, Oryza sativa
ggataattttgttaaagaaaatatagtaataggtacttttcaacatagacataagacaatgcagaatttaggaaaatgcagctagagggaaacaaaacttcaacctgaacaaagatagaaaaaaaacataacggcacaatgctggaaaaggccagaaaacgaaatcctacctaatcatcttcttgttttctgcataacagtcattatggcatggtacgtatagaaaatcaaaactactattaaagagagcacttaagacatgtcgacttaagtattctggcatgtcatggcatgttcccacggcacgaacacgtcgacttatgtaggaaaatgcaagatgaatagatagaacacgtcgacttatgcaggaaaatgcaagatgaatagacagaatgacacaattttgcagaaaaaaaaaggcaagaaaatacaacaatagttagtattcgatcctgcaagtggtatcagagctcgttttcttctttagatttttaccgatctaaagtttttgcaatggctaataagtttataagtaagccccatgttttcgatggaacggatttttgttattggtgtagtaagatgcaatcttacattatgatcttaatatttggagaaaagtttctaatccttatgtaattcctaatcaaattaatactgttgttttaaaaaatgaatttgaaaataattgcaaagctcacaattttcttttgagtgggatgaatctgatagtaatgtaaattaatgtggatggatctaattgtgatagtgaagaaaagcttagttatgatcaattagaacatattgctttcaaatttgctgagaaacttaaaacatgttctaatatgcttgatgagagggattgca

SEQ ID NO: 34654 - DNA, 838 bp, Oryza sativa
aaagcttatgtatatgctttattgaattgttattcctcaaatagcttttatttgctcattgtgcaagagaataaaaaatatctatgaaagaaaaaaaaagaataccgaatccttggaaatagtcatgacgataaatacatattcgatgtgagcaaaaataatgagtgccgaatccttggaaacagtcttgacgacaaggacatacccggaataattgagagaaaaaaagtgagcaaaaaggctcaaaaaaaagtttaaaaattctcttgattgttttgtactaaagttaatttgagaaagagtgataaatgtaataggtatatatgtatagtgtttatttttcaatctatgtgcttgtgaatatattgcattataaatcatttgaaattatgaatccttattgctaatttaagcttaattgtaatatctttgattcatgtttatattatgatgcatgcttgctaactggctaattaatttatcttctttgtcttgcaacacacgatcatggattgcttttggtgcacttcaaagctctcgaaaaaaattagaaaatagaaaagaaaaaattggttatttcaagtgacaatcatgacatcattgcatttgtactttattgtttattattttttttcttttgcattcttgatgaaatcattgtcaaagggggagaaatatgcaaaatgaatgctttttgaaagggggagaattgaattgttttgattgtaaaaatagtcgattttgtgctttgattataaattgatgggagaaattctttcttttaaaaagggggagagtttttcttttcacttttgtgatttttgtttttatttttcaa

SEQ ID NO: 34655 - DNA, 865 bp, Oryza sativa
catatatatacacacatatatatacacacatatatatatacacatatatatatacacatatatatacacatatatacatatacatacatacatacatacatacattatacacatatatacatatacatatatacacatatatatatatatacatatatacatacatacatatgtatatacatacatacatacatatgtatatacatacatacatacatacatacatacatacatatatatatacatacatacatatacatatatatacatacatatatatacatatacatatatatacatatacatatatatatatatacatatacatatatatatatatatatatatatatatatatatatatatatatatatatatacgtatatatatatacatacatacatatatatatatatatatatatatatatatatatatatatatatatatatatatatatatatatatatatatatatatatacatacatatatatatatatatatacatacatactgtcggtgatatgggaccgggagtatcatgaccagaggcttgaggcagacacaatcgcccacgtggcctggcaccttcggggacgtcgggcccgagggtgaggtgtccgccctccttctgattccccccgagggggggtcgggttgcgcttgccccgaccccgagggccgaggcaccccgaccccttaaggaagtctgccccgcatatatgggataagtgagccaagctgtgctcacctaacagcatttattgcggtctgttcaagcgtgtcacgctgcatgcaacccagtcagcgcgttcctttatccggtctgtgaccagtcacagcccggtcagatcacgggttag

SEQ ID NO: 34656 - DNA, 579 bp, Oryza sativa
aacaatatagatctaagcggtcgtttgagtgattaaataagtgaacatatttagagtttttttttcttttgaaacgatgacatcatgaaattagaaccgtctgcgtcgagccatatagtagataagtttccctctagttaaaacaggttgtagtagtgtcattacttgcaagtaacaactattgaagaaggtagataaatcagggctagctttcttggttaaagagacaagtttcttatgactgaaaataaatgaaaaaaatatgttgagaagtcttcgcagttcacataatagaattaaccacaagctatcaaatctcactagatacggagatcgtttatgcttctggtgtaataataattgtaccctcatttccattgtgagtgaagaatcgtctttgtattaattagtttaccttaagaaacacttcaaaacatgtcttatattgtatttatatgagtcgataagttatgtatctacgtttctcagagcatatcttaacaccataccttcaaatttttattttagatgtcaaccaacatctaaaagggttattcggattaatgccattttaaacca

SEQ ID NO: 34657 - DNA, 547 bp, Oryza sativa
ggccagtatagtgtcattcccgtgaaggcagtcgaaggggttactggtatgccaacggccgtgcacgtcagtagtaaagccatgtggatgttgtcgttgtggcaatgccgtcgatctcatccattaatgttgtatgatttcatttgcaggattgtttttttagttctaccacccttactttcttctaaagggatggttttgttctgtaagcatgtgtttgttttcgggattaggtgggatgggataaaaccatccctgattttggggttgggatgattccatttacttgtttggtttgtaggataggacaatcctaatttttttgtttggttgaagggatgagcgagagatgggatgggcgccgtttgctatcaccatcagcgagaaagaggagagtgagcagagatgtgtgacgacagccttgtgggagctcagcgggtgggcggatgagtgcgacgatggctagcggcgagaaggagtggcgcaagattgcgagcaggcggacagacagaggaggagcacggatgggcgagcaggggtgcagttg

SEQ ID NO: 34658 - DNA, 659 bp, Oryza sativa
  unsure (1)..(659): unsure at all n locations
tggacgatatattcgcctacctacctatcatatgtctgtgtgggaacaatcttaacagatcattttaactttatcggctgcttctcgctacaagatatccgccggtcatcaactacttctgcgttactagatgtatgaccttctacatctaccactctgagaactcagacagcggcttgatgatctaaacattatgatggtttccatatggagggctgcgttagctaagatgcatctactacatcggactctagaaccatgatctctagcctgcttcttagatgagcacaataacggtgccatcggggtttcagccggtgagttatctccaccttgcatcggctcctaaggatgacatatacctattatggggatttgaccgatgaccctaaagggggcactgtctaatctaagcttgtggatcgtatgacatcggacatcatgcgatttgagcttcaaccttcggatcgacgctcatatatcatatcattatccgccgactgggtcatactgcattatactgcaatttgatcacactgtcatcatgatgcgattgcctttatatcattatctacattggacatatagccgattgctcgaaccctatcgctatgcgatggtattgacctcngctattatcagttatcgggttgaactac

SEQ ID NO: 34659 - DNA, 646 bp, Oryza sativa
ctgttttaaactcatagaattatcccgaatccatccgtgtcagtttcgttgcaatctgagcaaccgttgacgcgaccctaattttacccctagggttcgtcgttcaccgaaattccaaaaatccctaaaattaaatctttaaaatcctttccacccatcgttgcactttatgataccatttgttatgtttaactttgtttttctattatttattgtgatggtgattgttgcataaatagaaaacgctaacattggtcctacgactacatcgagcccgaaggttgcaagacatgcaccctcccttgaacaatttaatcccagtagttagtgagttattttggtaccgtacttgtcctttggagtatgatagactgcacgaatgcttctaaattatattgctattattgcattatattttctgttgctattatggacacattaaagagccttagagtctaaaacgcttaggataaaatttgaggagcacttaacaaactgttaattatttagcatgctattggtttaatatggatattattatcgcatatgaaaacatgcttatggaattgttaatagctatatgctaagaactgttgacaccgcttgtgagtgggtggtacacatgatagagttcatgtgtttggtt

SEQ ID NO: 34660 - DNA, 853 bp, Oryza sativa
aaccatatatcaattgtatttatcgacctttaccaaccatatatcaatttttattgggtgtagctatatttatggtgctatattttttataaaaaaatagtcggcatgtatttacattgtaagtccctaaattacatatgtaattttagtgtatttacaatgtaagtcttaaaattacatatgtaatgtaaatttgaaaattacatactaattacatatataagtgaggtgtaaatgaggtgtaactactgcgtaagtggctgaaaaaaagtcgactgtagcatatggcgccatatttctagcaactccgtataatatatagctcatgcatggaacccaatatatcttactactcatctgtgttgacagtacgtatttgccaaagtatcttttgtcggacctgttttatcatgtgtttactagctgtttaattctttgacgggcacaaaactttaaaaacggaccatttaatatgcacaattaaaattgttttaacccgttgcaacgcacgagcatttatgctagtaatatataaaaatttaattcttgcttataaactaaacggcgggattttattttattatctaacaaactgatcgatccattcatcaagttttatctgtatttcatataagaagcaatccataattatgatattagattcccttctatcaactgagcatattgaaaaactaatgcgaccatgcctacgacggatataaccattgatcatatcatatacccacaggtggtctcgttttataacaagtgccaaattaatctaatcaagaatacgacactacctcataatgtatgcgtttatatgttcatgaccaatccacttatttggggc

SEQ ID NO: 34661 - DNA, 539 bp, Oryza sativa
actatagggcgaattcgagctcggtaccccgtcggtggtgagaggcggcacgaggggaggggttgttgcagtggtgaaaaaagaaggaagaagggagaaaagaataaaaaaaatccatgttatcgttcacgtggcgtgccacgtaggcaagaccagggtcaaacgcggctttggacgagaataatacaataaaccaagtttagagaactcgatgtgcgctttacaagttcatggaactaagtaaaacctcccgacaagtttaaggaccgctggtgtattttactcttggttattcattcaacgcttctagaagtacgatattttccgtattggttatttgttccaccaatgttcagttttcagtcggcacaaagcgaaaggaataagaaaccaaacatagcagtgacactgtttgagcccgtgacatcacagactttggattaatgtcaatttatcatcgttagtttctgacaatcactctgatgagataagcctctaaacttaaaaagaaaaattctaaccccaagtatccgacagct

SEQ ID NO: 34662 - DNA, 624 bp, Oryza sativa
tcgccttagcattgtgaatgtcatttgtttttttagggttggtgaatggtgatttggtgttagggttaccgtatggttgatgcgcatctatcatgaaatgggctattacactacgttttgatcaagataacattaacatctctaattattgtggtcggtgaaacttcccggcttcccgctagattaccattattattgggtagcacaatagcgaattagactcagtttattatgggtagccttcgagagttccattaactctttaaggcgttttacgctgtaaagtgtttatacagattaccgctcatacacacagacctggattgtagatttaccatattccagagcagatggcttcattgtcaacagcaatgttttgctaaagaaaattttagaaccctatgttctttgtagtaactaatttagaaatttttgttttgtacctaattagttctgtaattttcctgatcaaaataattgtagacttcatgtttccagtcattaacatgataagccagtttatttggtcaaaaaaaattcaatcctttcttttcaagaaaagagagatatttaaagatctggcccacttttttggcattctttggaacagttgctgcacttttt

SEQ ID NO: 34663 - DNA, 642 bp, Oryza sativa
aactattataggccgcatgcaagtttttctcaccgtattttaggaaaaagtacaccgaagatccctcaacttgtcatcgaattacaaaatcgtcctccaaccacgaaaccggatacaacgcatcctccaacttacaaaaccatacaaactaggtccctcggcagttttatccccggttttgtccgacatggcggctggctcagcgtgggacctacatgtcaagatgccatgtcagcaccctctctcttccctttcctctccctccttctcaatctcacttttctccttatgtgtaagcagcaagctggccgatgggtggggaaaggtcgccggggtgaggcaggagaggaggaggcggcgggtgatgaggtgttgatgaaaaacacgagccctgggaggtctgcttaactccagtgcagatccaaaactcgccttcgggtatgctagcgtgccaattgatttgatcctgccatccacaagaaataaagacaaaaaaactgtgggtaaatccataaatgatagtccatcggctaggtgcccatgacatatcaatttatctttgagcccatgttaaatatgtatcgatccgcaggttttaaatagatattaagaacttaatctattcaatcggctgtagatatt

SEQ ID NO: 34664 - DNA, 714 bp, Oryza sativa
tggccgcgccatttataccagtccaggagttgtcagtaacttaagaccttactggcctggttaaaggagccgcttaattagcaaggcgtccgtgcatatttcaactgaagtgctgctctaatgatttccagaaataacgagacaaataatacaagtttaccggcctagctaggctttggtaataagcatcacttgtatatgctacagtacacaagagtataagcatatgataaacctagataagcacactaattaaaatttaaacatatctttctttccgcccgtactgatgaagcacatgaattttttttcacctattattccattcctttttatacaaaaaaaaatggaagtgaacgtgttcaccaatgctacgatgattgatgagtccccaagaacaaaactgagcagcatataaagctaaatcagcaacagtgcatgtaccaccactgtatattactagcttctgatatgcatggcagcagcagcagcagcatgccagcatcacatagagagctgtaatccaggggacacaagcaacctacaactagctagacttcgcgagcaactccatcccgagctaagcagcaatcgcacgaacgaacacgtacaaagccatgaaccgtatgaacaatcagagagaacataagagaaatcaatcagcacgaaataatagcaatggtacacgcaccaacaccaccagccccctcgggg

SEQ ID NO: 34665 - DNA, 600 bp, Oryza sativa
tacccctactttatcaaatcccaatgcaactattccttactagttactttatctactcccaatactattatttttctactttcacaaattctgacgcattgattactctaaaaatgaacttatttttaggagaaatggaaggagctaaaaatgaacttattatgggacggagaaagtataacaacaatatcatctttaggtggtgtattgataattcataccaccttcaaatgggtgccttttatatgtacagccaaaccttaaaaacttttgtaactaatatacaaaatgctattaatatttattatgtaaaaatgtcattaggaaaagccaaactaatgttcccttggaacaagcaaacaatacacaataaagaaaaggaaaaattccccatttcatccgtcaactatgtccttggtctgattttggtcgctcaactctcaaaaccatccacatttcatccctgtgctaaaccgggacaattttcagtgatgtggcacctatgtggagtctacataggcaaataatgaaaaatttcaccataataatcaaaagtaaacaatagaaaaagaaaatactagaacccatatatttgttttt

SEQ ID NO: 34666 - DNA, 567 bp, Oryza sativa
catgcaaagttaaaatattgcaatagtaaaataaaaaaattatgcgtcaccaagcttgtgtgatcaatctctcgagtggatggcggcattggcctggttgcttgtccatgtcccatgttttttttaataggcttaagaaatttaaacctagaaacatgatcccagatataatattatcttggggccaataaagtaaacacaaagaacacaaaaagattagaaccaacttacctcgagttgtctcccacggcattagtttaattaagcaagtagctcagtataaaatataaagaattaaaactggacaagaaagaggctttcaagtattgggcatctcttttgttagacctcattatcgtaatttcagcctttcagtccctttagagtcccttaactcacttgccctataggagtaggatgtagcagcaatagatctcaaaattaatactactacctccattttttaaatagatgacgctgttaactttttctcacatgtttgactattcgtcttattcaaaaattttgtgcaaatgtgtaagatataaatcacacttaaagtactat

SEQ ID NO: 34667 - DNA, 582 bp, Oryza sativa
aatgaagtcaaaacgcagataaccatatctatgctgaaatgaaaagcaaacctgtaatgggcagaagaccctggcttgacatgcataggatgatgaagaccagcagctgatagtgccggtacaggaccgaggtaactgggaggtcaagaaacagcaagctttagaacaaaaattcctttgggggcaagagtgggacacattaatcagccaagaaaactcacccaaatggtggaaaactccccagccaacttccaacaggtatcggcataggtggtgtaacagcaggcattgctgcgagagaggatgaattccgtatgataaaactcccacatttcgaaaaccaagagaaccaaatttgcaaacgaatatagcaaaattcttaccagatttttcatgctttatctcattcttaggtttctgttgctgcaatgccggctgtggccgtcgttctgatggggacttttcgtcaccaaggctgggcttctccaaatccaattgcagcgtgagtttctttggagcaacctcatccgctggcatcctctgcaccatcttatcatcctccaaattgatctccagccctct

SEQ ID NO: 34668 - DNA, 546 bp, Oryza sativa
ttctgaataaggttttcccaaacccaaacctgacctaattcagtttttttgacaaggcttgaatcttataagtttatcaatggacctgacatcttcgccgcgaggcgaggggggtgtgggcggtggaatccggtggaatctgggcgaggcgccacccgtgcccccttctatgacccccgccgcgcgctgcctcgttgcgttgctccattccgcccgcgcccccgtgctcgtgccagtgtggtgtgcggtgtgccacccgcccccctttcccaatccctccggtctcccctggaaaaacattttttatcttcccaaccactaacacagcaccggaggccattaacgcgctccgccgccttcaccgatcctgggatactggtcctcctgcaaacgcgtgcgccgcagcggtcacggcggtaagttcctcagttgtccccttcttcgcacgaatcctatatcgatctgctgcgtggggttcggaggtatctgctatccgatcgcgtgctcgtgagatttgccttcgcttttgattgggagtaatcccag

SEQ ID NO: 34669 - DNA, 553 bp, Oryza sativa
ccaaacattatgccaaaagtcaatatcgtcatttattacaaaatggaggtagtacttcctgtgtgctctgttataacaaaggattgccatggaagagataaggtttactatacaattgaatgggcatcaccaatgttaaaaattcactattgccatttaatctgttagcctaccaataaatcattcttgtcactgtattattaaaaaaattacccgagcaactgttacccaatctattccacaaaaagattacctgatctagctgtttagtgtaactgcagtaggagccaccacatacttgaaggatcacctgctaaaaatcatctctctcactacggtgtgaagctagtggaggaaataggaatactgacaatcttttaccattgatttttatttgtgtgcatgcatatgtggtgggtttttttgggtgcggggtgggaggggtaaaaaccagccacttaccactggactactttaattatgcatctgtttcgccttaagtggaaagtatgtggtcatgtgatcgagatttttgatcggttagatctttggg

SEQ ID NO: 34670 - DNA, 996 bp, Oryza sativa
ccatagcaaagtggaacccacatgtcaatgacccaactgcatgtcttaggatctgcttccgtgtgcttcatttcattgcgattttgctgctgtttcggacatttttgtttggcatcgttgtttttatttgtgattacccacttttctcggttccaatcatggaacggagatgtgacgaaaggcgcatcgaataaagaaatgagagtgattcgggcttgatcatcatccacttgattttgtgagcatcatgatacaaattattaaatgaaatgatgtattttgtacgaaaaactttaaaatataagataaatctatttctgagtttaaaacaattcaaacttcgagttatgaaattagtttttttattcgtgtccgaaaaccccttccgatatccggtcaaacgtctgatgtgacacccaaaaattttcttttccccaactaaactaaataaggtcttattttgtttgggctatttattgatttgggccgagtttgtttgttcgttttggacttttttgtgtgggccatgtgttctgcatttgcccaagtcaaagccatgaaaagatccaaaagagatggtggttttgatgaaacaagcagagtaagaaaacgagattgatcaaaaaaacaatcacacacaaaaaaagataaatcagaaacacagcatgagcgaaatacactactagaaaaataattttttatggtgttggtcaataattttcgctggcggaaaaataccaaaaccgccagcatggtcgtaacgagggggtgaggggtaccatgttatatcggccgccaacgaagatatgttcattttcactggcggtcacttagatgagccgctaacaaaaatggataatttttgctggcagttgggtaaatagtccggtagcaagttacaattatttttgctggcggcccacttaatcaaccgccagccaaaattgatttacactggcgctcttaaaaaaattcgcacataaaaaaatcaccggg

SEQ ID NO: 34671 - DNA, 658 bp, Oryza sativa
ttcattttcttgccgaaacacttccaattttcagcgacctattagatgaccaattttggaacacattgccaatgcaattttttaccaccaaccctccccctggtcacccagatttcagaagcaaattaactaaaaagcttgctgtgaagtaaatattgccaatgtttttccagcaaactaattatatgccaaaactgacaaaccaaattttggtagttctgtttggtaactgcagctggcattatttcagaaattctatagttcacaagcgtttgttctatggtagcatttccaaattatctttgttgcttgactcttgaaggctatgtctgcatatggccctcttccacatataattggttctgaagagtacattcatgataacagctgtgatgtcggacaaaaccggggataaaactgccgagggacctagtttgtatggttttgtaagttggaggatgcgttgtatccggtttcgtggttggaggacgattttgtaattcgatgacaagttgagggatcttcggtgtactttttcctaaaatacggtgagaaaaacttgcatgcggcctataatagttgggcctcaacgggaatgcgggctacgtgcggcccatattagttggaccgagagctagaatgcggcccatattaagtg

SEQ ID NO: 34672 - DNA, 1372 bp, Oryza sativa
taaaaggcaaaaaaaaagtggtgaaaaataaagctagatccgattcctttaaaaacagaagaataaattctgattcctataaaggcgaaaaaatctgaaaaaacatctaaaaaaattcgtccgatttcctaagaaagtggcgaaaaaatggttcgtaaaaaataaaaagctggttcgtacaaaataaaaaatacacgcgagaaaaaaatggaaagggcgaaacaaattccgatttctaatcagtatatatctcttctctatctataatctaatctaactatttaaaaagagaaaatgcacgagaaaaataaaaacggttcaaaataatgcgtgagaaaaaacgcaaaaaaatgctaaaaagggtttttccatcttccattaaaaaaacgtgcgagaaatactatttccatcatcggtaaattttttcaaaaaagcatgcaaggaaaaaaatgtaagaaaaatgcgccatttctaaaaatgatttgaaaaaccgcgcaaaaaaaacaccgtctattaaaaattaatcgctttagaaaaactgtcagaaaaaaacgcttaattgatggacgcttgagtcgataggatccatcgattttttgcatctattacacggcttttatttcggttttatattctcatgtattgggaaaaaaagcaaaaaaaagatctattaacaaaaaagcaaaaaaccgccgtgagataagaaaagccaacaaaagggagaaaaactattggtatgttgtcgtcaagtaaaaaaaatcaaagaaaacatgctatcaagaaactgttagaaagaaatgcgtcgtttataaaaaaaaagccgctcattcaaatacaatcattatcattgacatgaatatgcatgaagaacgtatatgatcattagaatttattcacccgttgcaacgaacgggcatttttgctagtagattaaaatataagtaatttggggtcctaattttttgggccctgttccagcttgaacacccttatcgacggcccggaataaaattaaagataaagagaacaacaatgttattaaacttacattgaacatcgcaagcacaaataggtgcaacaagcacactcagcacaagaatacggagtaccactcccttaaaaataaaaaaaatacagatattagcaccgacagtacaattcgagcataccatacccttgccttacttaaatttgaaactgcaattaatatatttaagtcgcatatatcactaacgaattttaccggccttctttgtactggtgagcttagcaaggtcctcagtgagccctttttcttgaggcacttgcttgtgaagtgcctcctgagatgagatgtaccggtagtcgattttgccgtatatactttggagca

SEQ ID NO: 34673 - DNA, 770 bp, Oryza sativa
aaacattcactcgaggaattacaatactttccctccagtactgctggtagtggaaagccatcacgggccacgggatcggacgcacaaaaagaaacaaagaacgattattctctatatatatgcttgttaaccaagccgaattaagtggcaaattaaaggggacacacacccacacacaagcttatactagcttgccaaaggattgaaacatactgtcagatgcagcaaattaaacaacaactgacagtgtattggtagatgtgattatgatatatagtactccactacaatataaaaacgtacggattaacgtggagcatgtataactgatgttggtttgccaggtagctggagtagtagtactagtagtatttgggcacattttcactgcctcacgtatataaagaacgtacaggtacgtatttatcttaagagaaaacgatcgacactaaatattaatcaaaatctaacaaggaaaactatatatcaccatatatataccatgtggtaggagtaatatatacatatatattagcagaaatgtaaaagtttctacattatttcctccattaattcattttctgcaatctcaatcattttgtgccgttgtgcaggtgatggtccagggcatatatttaggttgcaagcaccagctagctgcagagagatcgatgcattgggggatcggagatcatcgggatccatatggcccgagccagtctcgaatgcatgcagttcagccgttgaagctactgtgctttattaccgtg

SEQ ID NO: 34674 - DNA, 1684 bp, Oryza sativa
ccagtaattatgatgtgattttggcctcattaaaagctggtcgtattttcttctttcaaaaaaaaaaagctggccatatttttctgctacgtcggttctgaaaggcacttgtgctgagagcttaatttgggggcactttgtatgcttatcatgataatgtctctgcagtaggtcccttttcctcttaggtgtttcttgtcaaacttcattagttaccaaggcactcaattagttgagataagctcatttcaagttgtaatcctaccttctagaaagagaagaacagaactgaagtcagaaatatttttgtcttttttttaaggaacaaccctgtatgcagtaatcatcctaatactgtatttgacagaattaaatgaaagatgaaaattagatcaaaatggaatgccttttccatcctcttccaccactcttagaatcaaatatttctgtttgcctgtcaaatgcaaatgcagttttgcagggagtgcatatggttgctttctacccagatacagaaataaattgatgctgacttgccagagtgtaagcagaaaaggaagagctgatgctctcagcatgtgctggattgtccaagtaatgatgttctctgaagttaggccagaaggaggttccaaactaattactttgcattaagttagaacttcacatgtgccatgtgataatttttcccccctaaaggaatatatgtcaaatattacatacatctgacatttttctttaaaagaaaaattctgaggtcaataagttactggtcaatccagagaatagatcatcaccatgggccaatgactcaattctaggggatcccaattgaaaacgagtcagattttgtgagtgcatcattcaaaacacctaatcctacaattccatgattggtgttggatgggtcctctaggaacatgagtgtggctctatgccatccatcgtcctgaatttctcaaaatatttcccttaaaaaaataaacaaaatatcatgagtcggtatatgagtttgcactagaacacaacactaatgctccaaaaaaagaatccttcattcgacgactcatatataaaaagtgcgccctctggtgaaaaaagggctaattgtttggcttatgcttatgcttataacccaaaattaaattttagaacttaattttgaatttgatttcttggtttttttcattctactttattttacaacatttgctcttgagtcgctaatgatacatttataaaagttttactcacaattttttttggtaataagtgttttggataagtatatgaatacgctaaacaatggggctttatgtaacgttttgagcaagagactccgacaaattttaaaacttccagccaaatatttatgactagaaagagtatcacgtttatttccgatcatgacgttcatggagctattttttaccattgggtttactttccacgagaaccgataaaaaatcgcgaaatttggaggtttcgacgcacgacgaaagtagatggagagaaaatttcaaacggtacaggaattcaaaatttaaatagaaaattaaatcaaaaatttgtcgagaactgtcatactactccaaggatcgggggagccaacactaaattggaaaaggcgaacccctgtgctatcacattcatcaaaattagcaatcagtagtaattaatacaa

SEQ ID NO: 34675 - DNA, 1055 bp, Oryza sativa
  unsure (1)..(1055): unsure at all n locations
tatcatctaatccacttaatttgctattacatcatgatcctgctaaataatctgttacatgcaccccccttggttgtttttctgtacatggacctgaaatcttgccctatgttcatatgttggattcaaggttgcagcagactatgtttgtctttgatcataaaaatgtaaatagtggtaattcccctgtctggagaaaagagactgctgatcttatcagttctaaatgtgtaacagcatttagtagaagctttagttttatttttctcaaatggaatcttaggggttaagcagacattgtttaaagctcaggggggttatctggactttcgccttaactctactttagttggtgcctatgttgttatcctatcttttgtcgatgatactttatgtacttatctttctctttgttgtgctgcctgatccatcataatttatacatgttcaaatttgttcatagttgaaatttgtgtggtcaatgacttgctactaattcatgagttgttactatcagattggctaggcagacggttaggtccacggcttcttggtaggggcaacgatggctccatggtactcacatctcctctgatattacccttctcctttcaattttgtggatttgcttagttccttatttatttctatattctaatgcgcagagggtcatgagggatttgtataggatgcttgacgaaataaattctgaagaagtacctgttgatttgaaggtcccaaactttttgatgaattcatctgggacatgaagaataatgattatgatttaaagtcatttgcttttaggctgaaggcaacaataaggttctttcccttgtttgagtactggccatattttctatttctgtccaagcatgtgaatngcaaaagttctcactaggttatgttggtggtgacttgtgcttgagaatgaacgtcatgatttctttgagtgtggttttactttggaattcaactgaaagcttgtgtcacttcttgggaatattaatttataacagntatgttatttgtgttggatggtgatggacacgcta

SEQ ID NO: 34676 - DNA, 524 bp, Oryza sativa
aaaagattcacaccctcagttcatgtcgaatgcatagaaatatagcttaatattgcatcatcaggaaggaccacaaaatattgtagaacataatatatactccctatgtccacaaatacaagggattttagagtactagctgtctaatcaatcacctctcattcaaatttcttcccatcttactcccacccaccccacccaaccctcattgaacatgagcatcctagtcttttatcttcatccttgatctctccaaaaacagagggagtatgctctttcacctctccaagatagcatagccatatagaaactatgatatgtttaatccaggtagaattatatagatgcttaaatatccatatgcacctggaaacagctctcctgctgtatatagctgttcagtcccatttttgcatgggaagatagtaatgacaaaaatgttgcatgtgtatgccactaaatgttttgcagatttgctcagattcctttgaattactttaccttcagggaaaacaatttcagaa

SEQ ID NO: 34677 - DNA, 543 bp, Oryza sativa
agcatgccttgtatgacatactcttcatctaaccatttctaatattataatattggactttaggacaagaacgaatcatgccatttaaaaggataccacattatctaaaaaaaaaaacaagggtatcaatatcactgagttttttttttattttgggcaagcaatttttccagtgctcaccagttacttcatgttcctggcatctcacaaattacctccagcatttgtgaatcataatacggtagatttgcagcagataattggaaataaagatgtacagccaattactgatattaaccagtgccattttcacagggcaggcagttatgtcaaattgtcaagtgcttttaccctcattcattctagaatcataggtaaatagtatcaactaattgcatatttgcattaggtgaccattgactactgagatcctgatagcaataaaaaggaatagaggatgatgattgtgagttagtagtatccctcagcacaatcatgatacagttgcaaacattgatttaattaggataggtttttggatca

SEQ ID NO: 34678 - DNA, 533 bp, Oryza sativa
gctacagtaaatatttgttaatgacggattaattaggcttaataaattcatatcgcaatttacaggtggattttataatttgttttgttattaggctacgttaaatacttaaacgtatatccgatgtgacacggcaaaaatttttaccgctagctagctggatctaaacacagcgttaaccatataaattgcacaaaactcctaccccccccccccccccccgcgttctactaattgcagtcgcatccaaaggtttgaaacccctcgcgccaaatgcgaaaaaggcaccccgcatatccccacgtgcgctttctcctcctctccgcttgagccctagctcctccctgggctccctcccccgcgcgaattgaaaaccctagcttcgatctctctcatccacttcgacgcggaggccaacgatcgtaaacagcttggtgagcaggggctagctagctacgacgaccaaccttggatgtacgagagcgcgcgcgtggtctcagatcgtcgattgagggcctcgatcgtgatggcta

SEQ ID NO: 34679 - DNA, 571 bp, Oryza sativa
tcctatggtcctccctcttctcctgctcccgcatagcctcgtgctgcgcaccagcggtggcggtggtggtgccactgtcggtagcggccgacaccgacgcctttgcatccgatcttgatgccggaagcgtctctggcctcgaggacggctcagccaagtctggcttcgccgggctcgctggccggacatcgtcgtcgtacttgacgagccgtggccgcttcctctttggcgctgcaataagcaggcaaaagatgagatgaggctcccagaaacccaaaattggcaaagaagaaatcgttgcaagtagggaagtgaaagaggctcaaacctattgtagcaacggatgtcgaatcggatggccgtgcaaccgaggacgacggggccggcgaggagttcccggactggcctccggggcgtccctgacctccagcttgtggttgctctccactggcttggaaggacacgggaactgcctcgtgagtccggaataacttcggcgacctcgatctcctcctgaatgaaagacggcgacttcgaaatcttcggccggggaggctgcggtggcgctgtc

SEQ ID NO: 34680 - DNA, 692 bp, Oryza sativa
ctttagccagcaaatacatttcgtgggggtggcagccaccaaaccgcctagatatgtccacaaaattaataataaaattattgtaaatccatctcttactactagatatttataccaagtgagttcacatattacacaaaatcatccatctctacattcaattttttatgtatacatcgttaaatatacttttatgtatacatataattttatatatttcatagcaaatacgcaactactccccacacagaccgccctacccataccgaatacatatcatacgtataccctcgagggtgtcagagagagggccccacaatgtgggtggctccatctccttccccaatcctgcgcgttcgacgtctccctccccactgcagaacactccccgccgcagctgtacgcaccctctttcccatggcgccgccgacatgtccttctgaatcttctccggcagccgtcacccaatgtacatccagggtttcacagtagggatcttcggctactggcgctgtgctcttgccacgagcagagtgtggggagacaggcagaaggggctagatgggctcgagggagagggatacctaccatggccaatctggttgggaaagaaagggagctagttgtccgtatgctgttatggtgagtatggtgaaagtttgtcgggccagctcggcgtgagcggcgaaaag

SEQ ID NO: 34681 - DNA, 578 bp, Oryza sativa
gaaacaaactgacagaaagatgacagtgatgaatgttgccaagaatgctcgtgtttggcaaaagaaggaagaagagaaaataagtccagtgaaactgtctcgttctataaacttgtcatccaagtcccttttgagcataaagatgagagcagtcaagaaagaaaaacctgctccctagtgaagagcaacaagaaggtgtatggagcagaaaatgctgttgctgacgttaaggagaaaaacctgaagtcagcttcaccaaaagtgagaaaagtagaagttagcaagaaagaaagccgttctcagaaaggtactacattttgtttgcccccctgtcaacaccatgttcaaagatttgcttaatttacattcaacattactacagatttcacatgataatctgtctgtttatgtcatgattgacaataaggtttaccttcttttctccccatcctaattcagtaatcttgcatccaacattactacagacaatttatgcagaaaacacttgtttctcaagcaaacattgacatgtgctcattcaaatttagcagaaaattcttgcactccaagaactgaaa

SEQ ID NO: 34682 - DNA, 544 bp, Oryza sativa
  unsure (1)..(544): unsure at all n locations
ttagtttcagtagtttgcagtttagtatcttcatgttatcctgtagttgaaagttcagttctcagcagagcatttggtactgaattgcaacttgaatggaggttgtctgaattgaaaagccaagatttgagctatttctatggtgaaacatgatcttgttgtcaaatgcttatctttgatctgctcctgctctttactagcttgtcaaaactatttctcttttcattctttgcttggcctttgcctgtcttatctcaagatattcaccagtttcagttctgaactgtggacagcagcttacaactcaaataattaggcccttgttttgtttctcaggttgtgttgcagttcagctttactttcagtaattgcagtctggtaccttcatgtaatcatgtagttgcagttcagttttcagtagaacatcaagtgattgcaactttactgaattacaacctgaactgtgagcatctgaactgaaactcaagattntagcccatgctttggttgatctgctactagtctccttatacttgatattttc

SEQ ID NO: 34683 - DNA, 533 bp, Oryza sativa
ttcaccgttctaatttggttctaccacagtctaatggcttggaatttattcttcgattaatgtgataatttatatcttttagaataaatatggcacattcttttcgagttgtcttaataataaagatttctacgttttttttatgtctctgatgatttttctaaagctatcttaataatatatatatagataaatgtacatatttggcaaagaatatttacatatttattattggtattatatttttattccaaattttatttttaagtttattttggaacctatattttcaaaggaaaactttttaattgtatcgcttaaggtgtgcacctggctagctgctgtgcacatgccatcgttccttctgtttgttgacgtgcatcgtccaattcttgctcatcgtgcagccgcgcggctcgacctgctgctgtggatttccgttgctactatacattatagcctaactattctagaacctaacttaagtttagaaaatcggacaaaactattttgagtccgtttgcatgtaaaga

SEQ ID NO: 34684 - DNA, 644 bp, Oryza sativa
cgatgcgtgcagagctgcagtccaacaaccatacacctcatgtgccgtgacccgagcgagtggctcgttcataccaccacaaaatatcatctcctacatagccttgccgaatcgagcctaggttagtcgtagcagcagcatgccagtattgtagaagtatttctcatcgaagcgctgacgcggcgatgagaagaaacgaacgatcatttcgcgtttcgccgatgggaacggcacttcaggcgtgctacgcagatcttgggcagcgtccacgtcctcccccaattcatttccgccccccaagaaacccgcaccgcgcgtcacgtctctcctctccccgccgcggcatgtgcgtctccccagatccgcgcatgcgcattccatccgcgacaagtgcccatgcctccgccgcgacaccgggacaccgggcccccgccgcccgcgaccgtgagggagcgctcgtcggtagccggcaacctgccggtgcgcgtggcttgcgtgcgggtcgtcaaaaccgcgcgtgggggatatgcatgggccgcggcccggtgcggtgccgccgcgccgtctcggtcgcggatgcatggggcatgcagttcttcgatcggacaccgtgggagggtgggagcaactcggatctggggagg

SEQ ID NO: 34685 - DNA, 656 bp, Oryza sativa
attcttgcttcagtacgactgtgcttgccgcgtccgccgcattggcggcgaggtgaaacaaacaccccaatggaagccgtgaaccttattcagtcaacaaattatgtgagatcagaactggcttacctgattcgggagatatgagctgatctcaggaaacagggcaataactatttagaaagtgttgcaatgccagaatactgtctgtcacttactagctaataggggtcggactgtgtgtcgatctgagctttggccagacaacacttgttacctcataacacaccttgggtgtgaggattctttgattgattaatgaaacttacctttattcccggaaaaaaaaaacaaacgccccaatggaaacatgttccgttgctaacgcgtgaatagacatgtgttcccaacttttaagtttttcaggtaggacctgctctatatgggtcggcgccatatatagccttttgatcgataaccacaaaatctgtgaatgtcaggcagattaattatttatccgatataaagtccaacaaaatgtagtactgatttttatggagtgagtgaaattataaatggctttcgatgtgtaagcactatgacagtgagtgtcttcaattggctgacactgcgtctaaataaacataaccttagagagt

SEQ ID NO: 34686 - DNA, 631 bp, Oryza sativa
tggtttgtaaaacttcattactacatgatcttaatttataagatgtacatgatctaatcttttcataagttgctacatctggccccgttcgatctccagttttggagatagatttttatggcacgcaaaacgagaaacctcattagcacatgattaattaagtattaactattataaatctgaaaaaaggatttatttgcttttttaaacaacttctttatagaaaattttttaaaataacataccatttaacaatttgaaaaacgtgctaacagaaaacgagaaagttgaagaatagaacagggccttttatctccatttgttttctttttttcttatttgtggattacaaatggtactatactctctattagattaaatggtcaatattgcataaccctgatttttcatcatgcatgttttgtgatgttgatattattccttctccagaagttagaccccatggcatgttacgtgtcttactaaaatcctcttcttttctaatactccaatatttatgattgccttacagataaccatggttggctacaatgacaaaatgagaactcttttggagactgttattgggaaaattgctgagtttgaagttaaggctgtccgtttttctgtg

SEQ ID NO: 34687 - DNA, 626 bp, Oryza sativa
aatatagctcattttgaagttattccagttgctgtagattcttgaagttatgaactttattccaggaatataaaacttgacactcactgtacaaataatgtctctaaaatttatctaagataggttatacataaaacatgtacaaacttataaaatacatagaaaattcatttcaactcattttgaaacaaaatcaaattctacagattcatcatcatacagtctctgattaagtgaaataaaagtaattacttactttgcatcaaatgcctctaaaactattatctctataatgattagttttagataagctaaactttagaaattcatgtagaacccaatttagcttcaatttgaataaacttaagttatgtaggatcactaaaacatgtatttccatgttatgaaataagattatatacttgctgtgtagtaaaagtctctaaatattcatataaggatttactaacatagagcagccattaatttgtaaaacttgtagaaaatttatttttagtccaaatgaaatgaacaaagtttctatagaaccagcaaatagttatcttcaacatagtaaaataaaaattgtcaccttttgtagagaacattgatcaaaaccttaactt

SEQ ID NO: 34688 - DNA, 507 bp, Oryza sativa
gatcaatgtaaaactagagatattttaccgtctttaagggagtattatatatagtttttaacatttaccccaaggtatgtactcccttcgtttaaaaaaaaagacaacctagtattagaatgtgacatattctaatacaacgaatctagacatagagtatgtccagattcattgtactaggatgtgtcacgtcgtaggacgaggttgagtcttttgggacggatggagtatacatgtactcctacaagacatgattcatgcacgcgtctaatttaagcagcattatatctaaagtaagtttcttttatctagtactttatatacaaatcttgagtactactgcaatatctttaagtaaattcaactccatcgatctgttcctagctaaaagaaagtcattttaggttattttgcatagattaatgtttgagaagagaatagacttagcgctccttttttttttttgaaaacatagtgcttcttattaaatgatgttttatggggagt

SEQ ID NO: 34689 - DNA, 614 bp, Oryza sativa
  unsure (1)..(614): unsure at all n locations
ttctagtcctacgcatcctgcgtttagatagagaattacctgatggtgtgaagctaggaagccagtacatccgcagaaagaagaagcnccgccgcgccaacaagcggtttggccgcgcgctctgctcccgcatacgcagctcgggcgaagagagcaaatgacgccgtcgcctcctgcttcagccggccgcagcacgcagtcgtcgtcctctggggagcgcgatgattggcgcccgccgcgcgatccggacccggtggccgtgagcccagagaaagccggtgcatgaagctgctgcttcttcctcccccgtcggctgtcgcaccggggacaaggctaatcttggaggacagtgttgagcctgacgtggttcagatagcagccacgtaatgtccaaaaggattagacgggtcaggcttagtaagatcagaccataatgtatggttaagtcgtatttttgaacgaatcagcacgtattttttgaacaaattggcactagacggtgcccatttctttgaatatagtgtaaaaagtttaatgtattgtttagacattttatagcgtggcagatccagtgatgttggcctgtgcaccactgaagcttgcatgcctgcagg

SEQ ID NO: 34690 - DNA, 828 bp, Oryza sativa
ggccgtaacaacaagcggctgggagaaggacacatcgctagtccgaggctagtacttcctccgtattattttaatatatgacgccgttgacttttcgaccaacatttgaccattcgtttaattcaaattttttatgcaaatatgaaaatatttatatcatgcttaaagaacatttgatgatgaatcaaatcataataaaataaataataattacataatttttttattaagacgaatggtcaaacgttataaaaaagttaacgacgttgtacattaaaattaaaatatggaggtagtattaagctccgagctagctgctgaatgcagtgcgtgcagagagtctctgcactccgatccactgaactcatcacatgaaactgtttcacgtgtgtggctcggtttggaattattgaaccgattattaccgtatactatgcccctccatactataaaaaaaaccagcttagaattagatggggtttactccctctctattcatgctgagtaattttacagttgttgagaaggtaccatggggtactaaaaatttcgtgtaaaattcggtaccttatacgagataccaaattcataatagaaaaggtgatatctcatattagcttttaaaggacggtaaaattggtcattcatatgcatgccataaagcccggaaaaggaacggtgtcttttcttctcctctttggtcttgctgccatgcacaaatgcattgatcaaacgcatgaaaggagaaagtaacataggccttatttagttgggaaaaatttttaggtttggttatcacatcggatatacggacacacatttgaagaa

SEQ ID NO: 34691 - DNA, 711 bp, Oryza sativa
gttttatattagaaatgtttgattcgaaaaaataagccagatcatcatataatatgaaatggaggaatttgaaaacttcaactcatcggtgccttcctcggtcaattatggtgcagtggttagctggtactagtacgtatcatgatgttgatcgtgtacctcgtattatccttgaccaagtgaatattgatgtgccatccaatgtacctgtccaagaatatggatccattcaaaaggacataaaagaatatagagtgttgccgttccccggcattttcatcggaaggaggactgtaattacccaccgtacccttcaatcgcgaaaacaaccttacacataaatttcttcttaaagatatttagatggtatacatgaaaatcacgtgtgtagatttatctcagaaagtacttttacaaattgtgattttattaggtttctaaaaaaaatgcaatacgaagtattatcgggaacagtattttttagactatgtcagaattgctttttgtttgatgggagggagtcaccgctagaaaatcgatttttcatggcggttatctattttttttctctgacggctataagcgaaaaccggcagcgaaaatttaacgagggatgaggtgctaagaactgccagcgaaaaaattcattttcgttagcggtcgggataagagaaccgcttgtaaaaatagaggtctttttaaagcgggcct

SEQ ID NO: 34692 - DNA, 512 bp, Oryza sativa
caaatgacatgttattccaggaaaacctgcttgacctgcctttcgtctgtactacaactgtctcgctgttgcttttctaagctaaactgttgacatgcttaacaggtgtaccttagaatcgaacctgtcgacctgagattggggtgactctgctgacaccttgcaactggcttcttcaagtactacccggattggtgcactgggttgaaccttcaactaaaacagcgacgaagtgagccaaaactcatcttcgagacctaccccccttacatggagtagtcttactttctcctgactaggaacaattggactattgtccttgaaaaataaccaacacttctcttgcttacaaaagccctcactttgaaaactgaaacttcaccgattcatcaaaatagagtaatgacggcgcactttcatcccagcaagatttggaacttaatctcagttgctgatgggagattcacataaaagtgactctcatttagctcatgaacacactgactcttgac

SEQ ID NO: 34693 - DNA, 508 bp, Oryza sativa
gaacaaacaaaataagttgaaatgttgaatcatacgtacgcaacaatgttattgaccaaaatgcacttaattgccaagttcatgtaccggtctgcatatttttcaatttgttacactaaatcacatccacctgccaagttcctacactacgtattaatttactctttttgaaaacatgaaacaaataatctattccattaatccgataaataaataagttgaaaagaacatcgccgttactagggatgaaaacggacggaaattcccgatcgaccgggcgccgtttccgtttaaggggtacagtttccgactgtaccgtttttggctatttttaaattttgttttttctaatttctttctacatcgtattaatgtcgatactgagtagtttaaatgatagatatggtcaattaccggctgatcgagcatcgtttccgaagagattctaccgatttcgaccctttttacccgtagacgctaccatatcttcccctcttgagccaaccat

SEQ ID NO: 34694 - DNA, 630 bp, Oryza sativa
gctcacggctgtggaatttactggctgaggtatccacttcagtactaccccatctgaaaagttttccatacattgattgaatggacagaaatgcaagaggtaggggcctgggagaatcaccaataaagcctgtcaatccaacgtttacaaggacagtttggctgttttcgccgaatcatgaggcagggtactccagcatcctatggtgaacagtgagtaacccataagaagaggattgggatcaggtgcagtcactaactttggcagtagcaactaatccaaccatccaactagtaaggaacgttcagacttaattgcctccttcctcatttagcatttgaacatgaaatactagcacaattatttttcatttgacaagaaatttagtactacttatttagatgtttaaaagaagcttggcatttattttaagggcttgaagtagagctcatattttgatgtaactcctttaaccttttttttatgtgactcatgctctgttcaactaagaagcattaatcctattggtttttcttacagtttctttttttcctgaatggaacattttttttaaaagttatcaatagaagcttcacactgatttacggaagattttggagtagtagttta

SEQ ID NO: 34695 - DNA, 543 bp, Oryza sativa
caaaaatggactgttgccagcagcccatgtacataaccgccaacgaaaatatgttttttggctggcggttaagttccgaatgtgaaaacgtttattttctctaccctttggtttcagggggttaacctaactgccagcaaaaatcagcaaagactgattttggccgacagaaaaaaccattttttagtagtgagtaaggctggcaaaaatcaaagactgattttggccgacagaaaaaccattttttagtagtgagtaaggcttcgtttgagaggcaggttgcatgttctcgtataactagaacaaccattagagcatgattattagccattataaacttaaaaagtagagttctttgattttttttaaaaaatatgtaaatatttttttttcacaaaacacaatgtttaactatttggaaagtatgataacggaaaataagaaaattgtcattattgctgaaaagaactcaaactaattccccttatacatttttcatttcaacagaaagcacatactaatacaactactcatcagtttttg

SEQ ID NO: 34696 - DNA, 530 bp, Oryza sativa
aagaaagcagctgccatgccaatgtttctattaagctttaccatactaaaacttgcagaatagtgacgaataaaaaaagggcatgtgcacttttttaggcataaaattgttcacctgctgttgacacattcaatttctgctcctcccttgtatgagaaatcacatttgaagctgtcaccgcccaagagatcagtttagtcaatgggcaaaaaataaagtaaaaaaactggaagtcatttgtttgccaagagaacaatgacaaccttttccagcattattcttgagtttaactggtggttccttgatgtctgaaacttccttgattttaggttctccaagcttttgaggagaccttcctaactggttttttgtatacacatcatctcttgattttctttctttgtacttggatagacaaaacatcaccattagcacgagaaccaccgcggataccaccccaacaagaatgtatccaacaaatttcattgcagaaacattgttttttcttgatggggcattccctgctggtg

SEQ ID NO: 34697 - DNA, 999 bp, Oryza sativa
  unsure (1)..(999): unsure at all n locations
aaaaaccgtttgacaaagaaatgccgaagggcgagaggagacatttttcaaatagggctttcttaaagcttgtccttagggtttgaccgtttggtttcacctacagtcaagttggctctgataccactttgtcacgcccagaaatttagcccaaatttccagactattttgtgtattaaatccctgtccaggaccagccagggtacacaaaacgacaagtaataaacagttccaaacgtaaataaagcgtaaaatacttacagaagaggcacttagtcctcacaccgaaacaaaagcagcagcagcggaaaaaggcgatcctagcggggcttcagctccactccacaggcaaaactcaactggggtctgagccttggtcctctaacttcgtcttcagctcagaagcactacgcttctgaaaaagggggaataatagcaagattgagtacaaccaccgtactcagcaagccacaccaacgatgcagacgtgcaaggggatccaaggatggtttgtggctatttgcataaaggcggttgtaaaacattttattgagcaaaacagtaaaactgttgagtaattaaagtaaattagatctccactgatcaacgctacaccacgttgaacaggcccaaccaacccacctgtactacagtgcattgggtcgatttattaggggtgagactaatcacggtgaatctggtcgatcgcccataaccgcgggcacggctattcgaatagttttactctggccagaggtgcacaactgtacccacaagacacaacccaccgacatgtcaccgcgtcatcatgtgcccatgatgcacacgtcaccatgtcgagtgattgtgacgagacccttcgcataacccttccctaaacatccacaccacgctaagggttcacccccacccctcaaaaggcagtgggcggtcccctcttgcgccgcggtgaatccggcagctggacaaccggacaccccggncgaaccaacttcatta

SEQ ID NO: 34698 - DNA, 914 bp, Oryza sativa
gatcggatgtcggaaaatgttttcagacacgaatgaaaaaactaatttcataacttgtctagaaaccgcgagacaaatttattaagcctaattaatccaccagtagcacacgtgagttactgtaacacttatggctaatcatgactaattaggtttaaaagattcgtctcgtgatttccatgcaaactgtgcaattagttttcgttttatctatagttaatgctacatgtatgtgtccaaagattcaatgtgatattttttgaaaaaaaaggggaactaaacaaggccttacttagcttcccaaggtaagcagcttgtgcgctactccctctataaaaaaaaacccaatctagaaggagatacatcccctcctaagagcaagtttaatagtatagccaactaatagttccaaataatctataatcaattttatagccaatatatataatagttacctataaacatatactatactattgatacatgatcccacctgtaatacatatattgcgtccattctatgctgcagcgggctataaattatagcctactgctcttcactttcttctttttatctatatatggggttagagttggcttatagattggtattgtatctattttaatacaacaaatttggataaagaactggccagaattccaaatttattattctatatgagaggctacatgttggtttattttaaaggacggagggattatatatggagtacatacgtatccatcttggtcgccgatatcgcgcgcgcctcatcttttgcaacttccaagtggtaagcaacagaaaccgaggccgagccagtgcagagggatcggggatcgccatggttgccgtgggatacatccggggagccatcgcctccgtggccgtcggcgcggcggtgagcctgctt

SEQ ID NO: 34699 - DNA, 1412 bp, Oryza sativa
ctgattcaaaacgatcatctgggatacattattgaggaacccaagctgcaggtaagctctctcacattcccaaattccatttttctctttttcaagttctctgcaaaccctaatatttaatcccctctctctctctcaccggtactgcaggtggcatcaacagtggatatggaggcaactccgtacttgctcttggttacagtacccatcctggtgcacacacgcgcactagctttctctccggcgttgagtgattgtagatgtagtatgtggcgatgcccctgttcctgaccattctgaaagctatcgctctgaggaagcattgctactgttaggtggtgtgaggaagcaagaagaataattttgataagaatcattgctactgcttagtggtgttacaaagcaacaattggcagtaccaactaccaagcaataacaacaaatctgacgcacatttgatttgcacatattttcagaaatattcagaatgtttgccattctgaattttgagcggactgcacatttttctttcttcttacatggtaaaaatgttcacccagattgaattgaatgtaatatctctcaaattcttgaaatctgaatgcaaaaggttatgatggcttgctgatatgaatgtaaaaaaatttgctggtttttccatcgaagtctctgtgtgaaaattatcaataccaggtttaattatgtgaacatgcatagtaaaattttcagtgcttgctgaagcatatcaataatgagaaatgcacttgtacatatataaggagatacattaaaatcaagcaagctgtcctgatcaactaatagttttcctgctactgcagatgcctcccatattctcttgctaccatcttcattcaactattcttcagcacctgaccaagtagtatctctagaaatagtaaatcaagttagaccatggaagccaagaacattgcatagctcctataccattcccttgaaaaaaaagaatataacaatatccagtatccagtacatgtgtatgcttgtaagaaaaaatatcatataggagaagacataaggtcttgttcaaggattacctcataggaaggacatgaagctccttcccaatcaccgttttcacctatggcaagaggaaatgcaggagaacgaacaagttcaacaaagagaatcgcaagagtcatggattagtgcgctcggaggacacacgatctgatagatgaggggataggaaaaccaatcgtgaggggggtttttgcaaaatgccagggcaagaggcgggcgctttttttgcaaaattacctcacctgaacactagcctttggatctagattggaggggcctgattgtgtgtgtgcatgagtgcaccagattcgtgaattttttttaaaaataatattattttaatggaaaat

SEQ ID NO: 34700 - DNA, 710 bp, Oryza sativa
ctgtaaattccaaagaaataaatcaactcgattgcattccaactgggacaaaaactatgtatgccgatgctcacctacaactgaaaacatgaacaagcttaaatcaggcgttgtctggtacaaatctgggcctgaaaatccacctagagatggcgttggtcgtagcactgtcggatgatttaggggcagttcagtttcggagaagtgatgtaaaaattctcatcacctgagtactgacgagtgacgacgaggttcagtctgtttggttgttcagtttcagataaatgctgatttgctgccgcgacgacatagcactacgtgcttgcagcgtgaggtgagatcactatatcaagctggctgttcattcttgtgaaaactgtgcagcatttgtgtacaatcactgccatttctccatgatttcaagtaggagaggacagtcatcgtgcattcgtcgtcagaaccacaaacagaagcttagtcagtacaatcactgttgctatgtaaactgaagattctcaattatgtagcattgtaggtactagatcagtagatgattgccattactcccgacaagtccttgatgtaagctgttactaggtcagtatatacagatcaccaaatcacaatgctaatttccatttcaacgtttcttctacttgaattattcatcatcttacatcaaaaggtaaagcttttgtgtgttcgtgaaa

SEQ ID NO: 34701 - DNA, 655 bp, Oryza sativa
gctcggtacccaacgtggaaaactctcctaaaacaggagagaaaaaaaccacggttgccagtcagtaaagatctttactatattatgtgagattacaatactgaacagcggcttacaggaagtatatatataggtgaaaccctaaaaggataacgttctgtatcgcttcgctccggcccaagcctctagcgacgggcctccgcttcgctccatccgaagttggtgtttatatgtgtgtaaatgaatttgtatcacaactcaccagcgaggacccctgtgcgcagcatgaggcccatagcaccactacaccttcgccgccattgtcgtcatggcgagaaaagcccagacctccgctgtcgtacgtcgccgcgtgaagcccagacgtcccatctgccgctgtcgtcgtttcctgaagctccactgcagtgtcgtcgtcgcgctagatttggccatcgctatcgcaccgaagccaccgactgctgcttgctagattcggcgttgtgcgcgcgaagacgccgcggacgcttagctaggatgttgattcgctgagttccggtcacgcggcctgcctttccgcacgaagcacgcaacaggtcagcaggtattgtcttcgatggaatcagataactttgtacagtctgcagttgtgccactg

SEQ ID NO: 34702 - DNA, 607 bp, Oryza sativa
tataaaatttgctttaaatccaacgtgaatttaagatctagagttgtgctaaacaaaatgtatcgccataacgcaaacccatcgcaactaataaatggtacattttcttcttcttcttcttttttagaatggaagtggtgactcattttagtcttcttttcttttacattcatcacacaaaagatatatattgttctttgacagatgacgtcatttaaccttttaacatgtgtatcattcaaaaattcgtgcatatatatataaaagtaagtgatgtttatagtaactttatcgataaaccaagtcgcaacaaaataaataataattatgtgatttttcaaataagaacaatgatcaccagaatcaatgccgtcatctattaaaatcagaggtagtttatctgagataggtaaatagaagaataaattaatttctttgttagaaaactcaattagttttttttttttttgcgtttttctgccattggtggggcaccttcttctcaaattggccttccattatgtacccaactcgatcttattctgttcgacgacaccatcgagccgtagcgacaggtcgacgtagcatcaaccaaaccttatcgatc

SEQ ID NO: 34703 - DNA, 629 bp, Oryza sativa
tgtgatctaagtcttccttctcttcttattagctcacttgatatatcaagttttttcactccctccgtttcataatgtaatactttaaagcattgctcatatacatatagactatgtgtttaaattcattaacatctatatgtatatgagcaatgctaaaatgtcttacattgtgaaacggaggaagtacatgacatagcgttaaaattatgggttgtatttttggtttaaatgtactatctatcttaaaatatatcaatttttatacacaaatcctaacaatggttcttatttttgctagaccggctaaagaccaagctagccaaatttcattaagattaggattatttacaaagagataggtccttatcatggtgcaggtgaaaaaaatggttcttatttttgctagaccggctaaagaccaagctagccaaatttcatgattttacaaagagataggtccttatcacggtgtaggtggaggtggggaaaaaaacaagattaggataaagagacatccctccaaactttttttttaagaaaacattgtgaacatatatattggaaattgatcacgagacaccagagttgaaaccgtacactttttaccattatcctatcaaatgcat

SEQ ID NO: 34704 - DNA, 669 bp, Oryza sativa
agtatttcctccgtttcagaatgtaagtctttctagcattgttcacattcatataaatattaatgaatctaaatatatatgtgtgtctagattcattaatatctatataaatgtgagcaatgctagaaagtcttatattatgaaacggtgggagtatttgcttttaccaattcctttgaaattcttatgggatgagctattgtagtgcaattttgagggtaaataagcatgaggtcttacctcatattttcttcttctgatgtctttgcgttcctacgttttttatgtattcccgctagttttatgaaactttcatgtgttttgaaattttataggaatccattgagcattacgttttattcatgcttttttctacctctgtgtttttatagtcccgtgtccgtagctaatcaatggctaatccacacggtcggtgaacgttcaagctgtccataatctatcctgcaggggcgagccacaaaattccatctgtttcaaatgccaggatttgaaggatcgagggtctcaagggaatagagatgtcgtgatcaagtggtcagctcaggactcaaccaagttgcttgccgttgctcttgatgcaccaggagaggcagtccacgagagtagacggcttaaaccacgacgcatgcttgatcaactgggaatgtt

SEQ ID NO: 34705 - DNA, 628 bp, Oryza sativa
tggcattgccacactatatttttataatcacctcaagtatacaaataagatgtccaaagcactctggtgctgaaatgaactttctaataatatacgtcatccatttcagtacagaggcaatataatgaacccacattagcatttataatgtattacagtattagtataacagttttcagtcacaaatggcattgctggtacctttgatcctttaatggcatgtgaatttcacataagtcattttaaggcccaactgttttttttctcttaatgccctttcacatatggactttgacatctttgcagatttatcaagtaaatggttagttccaaacgttattatgcaactcataaacttttcaaggaatgggccgcttattagctagatattgtgacagcacctatcaggagatagtagtgttgaattgatgttgtacatgtgattcagccattcgtgtgttttcctggccatgctatatttggtttaatcttctcatccagagatactcagtatgatttggaaaatttattttgagatgtgttgcatgtatttttacagctattgatggtacccaaaaatgaaaaagaagcatgctgctgtctgggacttagaagtattttttacttg

SEQ ID NO: 34706 - DNA, 542 bp, Oryza sativa
gtattttacaaaaccattcacaaacttttgagtaggagatgaatttagtacttacaacttttgaatcatgttttttttctcgagtaaataagaaactattggtagttaattatcatacagtccatctatatacataccgtgtagtatggctgcaaataaaaaaatgcgagtgcaagatacttaaaattcttttgattaaatcatctcatgaaggcgcatgatataataataaagggagggaagcatatgcatgggaaaaaaagaagaaagagaaaaatgaaaaaagggaggggaggcgtacgaacccgcgcacgtaggtgcgcaactatgctgaggtgggaccctgtaatatttagtttgttctaagatcaatttaatataacggtttataatattggacctaccgatttacgtggcagcttgagagcattttaaggaattttaaatgactaattagaatattaactgcgcaatatatatgtattggacatatggtaatatttgttccagcttcatccatgtttatatatggagatgattaa

SEQ ID NO: 34707 - DNA, 2498 bp, Oryza sativa
  unsure (1)..(2498): unsure at all n locations
taaggagcttgtagtacttgtggccagcttaagatgcacatctgaatatgtcatgctaagatattttttattatgataatatcatgaccaaattgtattgttgcagacaatgttactgatttgtaaaaaaaaaaaaaagtgcttgccacgtagtgtatgtatgggcaatgtttttccgaactaatcaacgtcactttcgctgttccttgttgacaaaatagcttaaaaggcttaaaagtcaggactgatctgtctagacaaaaagcacgacgctatcgaattaatatgcaataaaaataactgtactaatttcgatcaagtaaaaatactgtatagagtattattagcttatcaacggctgccacgtatcgtgggttacatctatttttaaatatatgatgttgatgaactttagatatgttgatgtttgaccatttattttggtaaaataattattttttatattatttatttatgacttgttttgttgttaaaagtactttacatgcatatgacttatgtttttctatacttatgaataaaatgaataattaaactacgcgttgtgagcctatgctatgtgtttctaaaataaaatgttataccttaaaggcggaatttttttccccaagcaggaacgtctgaattctatccaaatttcagtttcctcccaaactcaagcctcctctcacctgtaaacttcggacctgttcagattatagctaaaataaaccttaccaaattttgctacagctaaaattttggcaagttggcaatattgccaaaattttagcagaatttcttatatatttactaaatttggcaacaaactaaacgtagatatttttttacaacttaaaaaatgatatgattgaaaataacattaatataaagagccccttcagtttcagttctttcatataataatgaacttccctttcacgcagtcgattacgtggcacataacgatatacgtctcttcatgtgatcgatctggcatcgatctcgatcctcgatcttgattgtcgatgcgatctgggtcaagttgtcttgtacctgaagataagtcgataatgtcgccattgttgccgctgtgcttgagacagtaccttcattcagcctcttctagatcagcctgccgcccccctgcaaatcagaaacctccaagcatccatgatacagattgatcaatttattaagcgtggaccctgcagagacagatcgatcgatctccagactccagagagtgaatgaaacgagtgaattgaatcatgaatcatatatccagctgatcgatcgatataatgaaggtgagtgtgttgcatacgtttgtgcgatacggccatgaactgacagacagcatggctgaaagcctgaaaacaatgtgtgcgacatgtatcttccctgtctggacaaaattgggagatggtagcatgtaactacgtatgaactggtgagacgaacgcatcgcctgtactgtaatgcgcagtacagtggttagagcgactctggacagcgataggtggcatctgaattctcaccgcgcacgaatatccccttgctgcagccacacaaagaaagagtgactcatcgtttacccaaaagctggatataaatcataacggtttattagcgattcaaaaataatttatgagtaaaatttttatatatgtgttcttaccaacttagaaagttaatgctgaaaaagaaactacgttacaaatatcttacaatcaacgataggattaaaatttaaaattttacttcggcatatttattttaaaattttaatgctaaaaatgaaactactttgtgttacaaatatcttaaaatcaactttaaattaaaatttagaatttaactttagtagtatttttttaggcaaccaatggggcgctcccgaaacaaagccgtgttaatgggctcccgcatggcgtgaaactgaccgagccggtgggctcacgaagcccgataatcccagcccatactcacgctcccggccggcccatccatggcctagtaagagcgttgtatagtactttgtgggcctcatcttcttagtgggcctcggattcgtcgtctccgcttctgggccggcggcggtgtgggcctcgtcgtctcgtccccacaccaaaaaaaaanaaanaaaaaaaaaaaaaaaaaanaaaaaaaaaaaaaaaaaaannaaaaaaaaaaaaaaaaaaaaaaaaaaaaaaaaaaaaaaaaaaaaaaaaaaaaaaaaaaaaaaaaaaaaaaaaaaaaaaaaaaaaaaaaaaaaaaaaaaaaaaaaaaaaaaaaaaaaaaaaaacaaaaaaaaaaaaaaaaaaaaaaaaaaaaaaaaaaaaaaaaaaaaaaaaaaaaaaaaaaaaaaaaaaaaaaaaaaaaaaaaaaaaaaaaaaaacaaaaaaaaaaaaaaaaaaaaaaaaaaaaaaaaaaaaaaaaaaaaaaaaaaaaaaaaaaaaaaaaaaaaaaaaaaaaaaaaaaaaaaacaaaaaaaa

SEQ ID NO: 34708 - DNA, 1090 bp, Oryza sativa
tttgacccccaagacgccggcggccgcttggagcagcaatccagcaggtgatcgccccttcgtttcgcgaagggggagcggatctgggcctggccgacggcgccggcgccggaacaggagcggagctgagcgtcgaggctcctaggccgcttcgcccgcctaggggcgtccgctgtctgcgctcgggtggccgtttttcgcttccccatcaaactgacccgccgccggcggcagaggggatcggccggagcccggaaagggaatgggttaatttggtgtgttgtttcgggcgacagcgacgcaacacggcgcagcgtgacgaatcagtacccgtacgcaaccaatttatgcccacaccttttagcctagtactccgattcgtcgtatagtactccgattcgggccttgatccagcgggctggctatctcggggagaggaagtcggacttagcgcctagcggggctatgaccaggccagcacgggccggtccgatgtaagccgtaccatcctgacacttgggccaaaatcaagattcgtttggttgggccggtatttcgacccatttcgctcagcccctgcgacgccgcgcgccccgtcctactgcaaaacgcgtccgctcctagctgcgatgcaagccaaccagcgagcgtagtacgcccgtatgcgaggagaggacggcgaaggttgcggcgaccaacaaggtccagtttagttcttaattttttcttcaaacttttaactttgtcatcacatcaaaacttttttacacacataaatttctaacatttttctttaaacttttaattttagttaaactttcaattttaacgtggaactaaacacagcccaactccccaaacctaaaaacccaaacccaacccaagtacccaaccaccccgaggttgacaaacaaaccattgcacgcgaccccgcccggaccgatggaaaaccacccgccacccgatcgaaccacggcatatcctcgcgcccgcggctcacgcacgcacgcacccacacacgtgtggccgatggtcaaccaaaccatccctggctgctctcgcacgcgaaccacacgagtcatccatccaa

SEQ ID NO: 34709 - DNA, 1027 bp, Oryza sativa
aatgttcgttgctgttgctggcttgctgcatagtgccttgcttgttggttgctcgctaagttgctatttgccggttgaatgaaaatatgaaattggatgagccggctagcggcctggtgctcggagaagatgagacgtccagactcgagacgaattgagcaagtcaaagatacgaaaagatgagacgtccagactcggggctcggagtcgagaatatgaagcaccacgcacccgaagtcaccgcgcggagacacgcgctgactcaaacgggcttctgacactctagccccacgcgaatacacgagccttctttggttgggatgatttttttaggccctgaaaatttggaggtcctgcacggtcgcacgggccgcacgccgttgtgcacggctctgcatggtagtagtaactagtaagggcttgtttagataaaaaaaattagctaaaaacgttacatcaaatgtttggacacatgcatagagcattaaatatgggaaaagaaaaaaaaacaattacacagtttgcatgtaaattacgagacgaatcttttaagcctaattacgtcataatttgacaatgtgatgctacagtaaacatttactaatgatggattaattaggattaataaattcttatcgcggtttacaggtggaatctataatttgttttgttattagtctatatttaatactttaaatatgcacttaaaaataattttggccaaagaactaagcacggcctatgtcgtaaaataaatcaacgtaggtactattctgattcgctgtattgccagctagcattgttaccaccgttatggacttattatggtaaatttggttaggggcatttgcaaatttgccaccggttttttgaatattgcaaggataccactcgaatgacagttctagtggcatttttgcaattttctagtggcagttttgcaataataattcaaagtagtggtaaatttgcaattgcccctgttcggaagcatcacagccgcatgtcctaagattgattaggcatg

SEQ ID NO: 34710 - DNA, 580 bp, Oryza sativa
ccattcggctcgcgtggacaattggtcatgctcaaacacacgccctgttaaatctcagcatttgggatgtgacctgatgcagcaccagaccatgtaggcacaaagttcttttctcaccagtgctacataccgttcaccgacgaaattgatgttcacgtttcagccaagactctgtaagtactctgaaaacagctaaaatgtcgcccgtgcgatcgtatacgaacggtcggatcggggcagattttcctacatcgcgtgccgacggaaatggcttgataatagttccacaacctcccctttgccagtacaattctcaatatataaaagaaagccatcggcgaatacgttcgtggctcgcattgttgacacggtggtagcccatggcgatcgatcgaccagaaagcttaaataacacctagcagagacagtgttctccctctcgtctctcgtcgatggcaagagacttttttcttttttgcgatcgatccagcagcatttacattggcctctctcttcccgttgtttattcatggcaagatatggatggacagtgacgcggtaccaagaatgttaaagcctg

SEQ ID NO: 34711 - DNA, 1658 bp, Oryza sativa
ctagtgttttttcagtagttcctctgaattctctctttgtacagcttaaaaaaatagtaggggtaaatcttttgaacgatgctttcaaaagatttttcttttaaaactaaaggtttatgttatccaagacgtagcagaatataaggaatggttaaatattaaaccaacgtggcaagataaattttgatatgtatccaatctaaactgcttgaaagattctaaaagaaattgcataaaatatctaaaaaaaaaaggccaaaatgtctttcttttatgatgattttctcgggttttccacttaatattgatattagggggcctcattatccattaacaagataaagaaacaaaccttagtttttatttgcctacatgatccatagagagagtaactagaagcattaattcatgctcgtagcagtcatcacggttgttgtcctcccatctcgtcatggcaccggagacgaagccatcagcaggcacaccttggggttgcatcgtaggcaagtattgcagtccacaaacctccaccgaggtttatggggtcctatcaagcagtagcagcattgtggcgacgggttgctcctgttcggtggacaacctgcttccacgcacaagatcgagaaattttcatccgacgtcatgtgctgcgggtgccagagtcggtgaccacggcggcggctacatcagaaaactacactgttggtgtggccattttgcagagttgtttcctgtgctgaactgatgagaatgacttgctgctatacttttagtgacataaataatccattcatgacgcattcattgatcactatgtaaccctaaatttttaacttagatctagagtgagaaaaatattctaaatttcaatcgaaagctgggttcccatacgacagtaatttagatggtaaaatgtgtgtgtttgtttacatagtgcaggcgttgcaagggatccaaagagcacagccaagaagatggtcatcatgtacacccgcatgctgctcctcgatcatgttggagcttcatttcttgttcgatctaacgagtgatctgttctgtcagactgtgactatgagggatagatgatgaaatcccgatctggacaagtactatgttatgtttgtcgaaagccaggaagttatcaggtattatgaatactattgtcattccattccttaccaaacgagagctatatgttgactaatttggacggcgtatatatatactccctccttccctaaatatttgacgtcgttgacttttttaaatatgtttgaccgttcgtcttatttaaaaacttttatcaaatgtgtaaaaactatatgtatgtataaaattatatttaacaataaatcaaatgatagaaaaagaattaataattacttaaatcttttgaataagacgaacggtcaaacatttttaaaaaagtcagtggtgtcaaacattttgggatggagggagtatatatgtagtcccttaatcaattataatgttgatctgggtagggggccaatggagtcctggttgatctgcttatttcttcccgtgtgcattttgcaaaccttaatgtacccacctgcaactgcttaatactagtaacatatctgcaaatgcagatgttgtagttgcttctttttccaagaacatgcatgggcaat

SEQ ID NO: 34712 - DNA, 648 bp, Oryza sativa
caaatccaattgcagcgtgagtttctttggagcaacctcatccgctggcatcctctgcaccatcttatcatcctccaaattgatctccagccctctccgtggcctctctgcgtctttcttttcggaatttcctctcgcagcctaaaatcaaaccaaaacacaaataaaatggtcaatcagtgtccaaaaatccaatgctctagcaggtgaactaaaaaaaattggtgaaactgaagttcacaccatgtccatctcagaatccaatcccttcttatccacatcagggtcggaagcaccatctctatcaggagacttcccaggaggaggagcctggaaccaaaaaaaattaaaaacaaaagaagtcagaaaaggagcaaaaaaagataagaaaaggggagaaaaaaccaagcaacaattgcggcaaaaattgtcgctttcaatcattgcccaacaaattccgcaagaccaattcaaccacacacacaaggaagcatatacccaccatgagatcaatgcaaaacttttcttgccgagctccatcagatgccagctcactgaaaaaaaaatatcgttcacacaaattgtgaatatactaatcacttaatcagatcggcacaatccaaaaacaataatggttatcgcaacacc

SEQ ID NO: 34713 - DNA, 1018 bp, Oryza sativa
atgtatgtataaaattatatttaacaataaatcaaatgatagaaaaagaattaataattacttaaatcttttgaataagacgaacggtcaaacatttttaaaaaagtcagtggtgtcaaacattttgggatggagggagtatatatgtagtcccttaatcaattataatgttgatctgggtagggggccaatggagtcctggttgatctgcttatttcttcccgtgtgcattttgcaaaccttaatgtacccacctgcaactgcttaatactagtaacatatctgcaaatgcagatgttgtagttgcttctttttccaagaacatgcatgggcaatcgcattacaacgagagggagaatttactatttgccattctcccaaaatgtgcacccgatcccatatctcatttgtccgaatggaggatgaggctgacatgtgagttcagtggcaaatgtgcatgaaaatttgagagagcggtatttgtgcatatgcattttgggaggatgataaatagtaaattctcctacaagaagccgaaacaaccgattctacaatgcagtttcatttggaagttcatcttttggacaatttgtcctgtgaatactgtgccatactgccattgaatgtgtctacacttgtagaaaatgccattttgccatggtcattgacaaaactgttgagatcttgtagtttacagacttttttttttaaaaaaaactctgcatatgtggtctctttcctatcttaaagcagagagctctcttttttcacacggcagttttcttagttcagattcatgacgtttccctctaaatatcttcccaatttttcttacaggatgtgttgaacaaaggcctccatccaagcgtaggcaaggtgtacacttaggtggtgtttgaatcttctgaagatgaagatgaaaattaagtgtttcacgcaaaacgagatggtaataacgtgtgattaattgagttttaattattacaaacttgaaaaatggattaatctgatattttag

SEQ ID NO: 34714 - DNA, 654 bp, Oryza sativa
gagtggcgcacagacccgcgtgtacttttccctgttcgccagccagtgaaacgtgggcccaacgtacggcggggcccggtcgccgattaattttcattgatttattatattaattatatgtttttccacggggaagacggggggtgggggtgtctggttcgttcggtagtggaaaaagcgtgtggtggaatggtaggggggggaccacatgcaactcacgtgagccccggatgttgacaagtaggcacgtggttgtaggcctcgcgacccctctcacatgggattgtctgcgctcagccgggggtaaaaaactgcacccatctttgattatttaccgtttatggtttttttaacaagcgtgtaaattatggcattttaagatttttattaaaatgttttaaattagtactatatggtagtacagtgaccactccgcatgtggtggggaatgagtgagcaggaaaaatggaatggccactgccaaattatggccattggattcatcacagttgactgctagaatggcaaatactgcctactactcctacatcaaggcatggatgaacatacattgaattttacaagtgtttgattgatgccaatcttgcaaccgtatcagcactgcatcctcttttttattccgaattatcaaca

SEQ ID NO: 34715 - DNA, 1016 bp, Oryza sativa
ttactgttgttattatttgtatttgcaaatttcaggagatcaaaaatctggaagtatcatgtgaggctagtatgacaaacttgataatgatctctctctggtatgactgaatgggcaagtagtatataattgtattcttttgttttgaaatgttggtattcagggggtaacatggtgagcatatttaataccgcatagttgtgggcagcatatataatatatacaccaggtcatctttggaagtacgtttgtataattaatttaatggcgttgttaggcagctaaacccaaacgagtagtgacaagccattctagagctagtagcgcacccttccctccttcctgccacgctactcctattaatttatactctatatttatatgaataatatcatgtccttttcaaaccattatatccacgataatacgcctacgatagtcattaacacgtacttacttgtaaagtaatcgccatgatactgatataataacaaaatgccaacaagaacaattgtttaattctgaggatatatcttggcatataaaattgtgccacagattataaaattgtttggctgtggggctacacaatagcccatattagtacaatatatacaaatggttcagatgtgtgttcatggctataattgcactagtcaaacaaagcttcacaagccatgcacttgccctagataaataattggcctcaccaccaatattgtatctagtggtaaacataataataatatcatgcatcatgcaaagttaaaatattgcaatagtaaaataaaaaaattatgcgtcaccaagcttgtgtgatcaatctctcgagtggatggcggcattggcctggttgcttgtccatgtcccatgttttttttaataggcttaagaaatttaaacctagaaacatgatcccagatataatattatcttggggccaataaagtaaacacaaagaacacaaaaagattagaaccaacttacctcgagttgtctcccacggcattagttta

SEQ ID NO: 34716 - DNA, 733 bp, Oryza sativa
agctcggtaccctaaaaacataaaccaaaggttggttaaaaattcacatggtttaggttaggttcacacccagctcattaccattggtactaacccattgcaatatatggacattttctcttttattataaagttagagcctactaaatcgaaaaacttaacatacaaagatatcacatcatcatccaataacaattattacatttaaacatgtaagcatgttatattatctataattttataatttattaatttttatagcttttcaaatgtaagcatgttaaattatcatctcacataattcacataatatttcaatatgtatcattattttttataatattttatatacttatataaggtcatcctaactcctaactaagttaatgggctctctctctctctcttctctcattaatccatatcacatcaattatttttgtccttagatgattattcatggttcaaattatctcccttaatttcttctcttattaagtcatatcacctcaattgttttagcccttagatgattaatctatgatccaaacttttacataaaaccacaacaacttttacatttgaatcattattatttaaatttaaaatatcataaaccacatctacttacataagtttatattgtctatcccagacttttcccataaggttaagggttgatttcctataaaaacttggttatggtggccctcaccgaagttagtatacatgg

SEQ ID NO: 34717 - DNA, 1185 bp, Oryza sativa
ttacaatgtattttcttgtaagttacagtgtaatttttaaatcttcgcatgtaagttttaaaatttatattggatttggtctttttcttgaagatatggtcatttagtgtctattatggtgtttcttaattgcttttttgctttttactgtgtccattgaattttaattcaaagattaaaaatatatgtaatataatcataaaaatctttcgaaagatgtatatgtactccctttaaacaaaccaaacaaccatattttaccaaaattttgtcaagccaaataaaatcgcttaccaatgttttggtcacgttttcccaccgaaaccggttgaaaacaacacaaaattgtcaagccaatgtcttgacgtgggacgaaagcagttctcgatgaaatttcaagtggttttcaagaaattcaaattttaaatattaaattcaaccaaaattgattaaagaatgacgaaaatcactgtacagctagaagttgggatccgtcagtccattggaaaggtaaaccctctctttctctcatgagtcatcaatcaaaacacaccaaaatatctatgctggtgcgctgtacatatcaatatctatcctaatgcattgtacatgtcaatggaaaagtattttcatccctcaaatgaatattcctcgtttcttacatatcatctaaacaaccataaaaaagttgaaaaaaatataagatagattaatatgaaatatatcactacataaacatgtaatttcaaattctcgacttctacaagctgtaacaaatatagctgcaaatatacattaatcattttcattttactttgttattttgctacaacttgtagaagttgaatttgattttgtatgtttgtggaatgatatatctcatgttgtcaaagttattcaaatttttagtgactatttaaatgatataaaaaataaggagatatttcctggagtgattgaaaatccatctccataacaatgctctcgctatcaatcatcatatggaattatcatgaacggatcgactcttatatggcttgtcgtcaagttcaaaaagaggaaaaataatagaggccatcgccgtcccctgacggcgactatccttgggatttctcacgcgtggtgcacgagcttctaatagttcaaattgaaaatatcacaacgatacgtggatgcatcacacgg

SEQ ID NO: 34718 - DNA, 604 bp, Oryza sativa
tgaaatggaatattttttccttttttttttttttacaattgggaacgttgacactttatcaaccggccgacatatctgggtcgggcaatatacaggatagcatctataactttcaagccatgcattgaaactactccctccgtcatatttatttttcactcatcttgcacgtacatatacacaaaaaaaaactagaatacccctaatttatcatattccaataaaattatttctctttttatccactcctaatacatttaccacgtattccatctgtcctaaaataagtaatgttttgcactatttacgtccaatgtttgaccgtttatcttatttaaattttttatgattagtattttttttgttattagaatataaaacataaatagtattttatatgtgactaattttttaaaaaaaatcataaaattttcaaataagacggacggtcaaacgttggacacggatatccatgggttgcacttattttgggacgaatgtagcactttataaacattgatataataattgctaaaaaagatatttaggccccctttgattctaggataggaaaaacataggaatagaaaaaaaatagaagaat

SEQ ID NO: 34719 - DNA, 2061 bp, Oryza sativa
cttagtagaaatatattactgaatcaagaaaatctggtgctgtgttctgtgccaactcccaagttaattgtcttagcaaaggtaattgtaataatcaactaattgtaaaatcaaggagttgatttagattttgtgatgaaaatattggtggtttgataatgttattttcgacgtctacttcattttgagggtaatctttaattccgcaaaagatttttggatttttggttttccctatcattcacctcccctatgataggtttgtttgatcttttatgatcctacactaatttcacaagtgcaactctgaacatgctgtgagctgcattttgacgatccttgatgactagaggattggtaaagattgaaggcataagttaaaattatccaaaccaataatatagattactgatgggaaattcagttgctggtaaaattattaaatttaccctgtatttgttaatctccatattttttctctactactataatttacagagaatggataacaagaacttatccaagtactgactttcgtagtcaattttgtttcccttttgttgatggcccgctgagctccaccactttgtgatattggtccatgaactccttaatttagtaaattttcatattggtggtttctttaactggatgtgcactgggggaaaaaaggcaaaagcaaagttgcatcatacacctactactacaaggataatgttaatttttttatcctgaactacaatagttccagtcagtacaacagtcaacgttcttcatatctaccatgtttgattcagctaatacagtatttgtgacaattttgtcagtaactgtcacactaaagtatgtccacattaacaataaatgctgctgcagtttacatgactttcttgagtgtgtcatagtacaaattttaaacctaacagatgataggtgcaagaaaacaaacatgattacaagaaacacttgcttcagtgctatcccacataagataccactcaatttctagaagcagtgttggctagcattgaggagctcatttgcacaagcaaagaatatcccatatatattgccacattatgagaccagaggtggggccagaataaaaactttgacttggcattccactgattcccttccatttccatggggtccatgagatctccagaattgctgatggagcaaaagcttctctccacgggagaaagtgaagaggcaactactggaacaacaggtcagtttctcttctcgatttccttctcataatctcttaagatacttaaaccatcctattcagggcgcacatcgtttcatcatctttattttatatttctttgttttgttttctgtccatttggctcgcgtggtacaatggtgatgctctaacagacgccctgttaaatctcagcattttggatgtgacctgctgcagcaccagaccatgtaggcacaaagttcatttctcaccagtgctacataccgttcaccgacggaattgatgtttacatttcagccaagactctggaactactctgaaaacagctgaaatctcggccgttcgatcgtattcgaacggtcggatcggggcagattttcctacatcgcgtgccgacggaaatggcttgataatagttcctcaacctcccctttgccagtacaattctcaatatataaaagaaagccatcggcgaatacgctcgtggctcgcattgttgacacggtggtaggccatggcgatcgatcgaccagaaagcttaaataagacctaacagagccagtgttctccctctcgtctctcttcgattgcaagaaacttttttcttttttgcgatcgatccagcagcatttacattggcctctctcttcccgttgtttattcatgggaagatatggatggacagtgacgcggtaccaagaatgttaaagcctgtgattaagatgcaagggagggaggagggcaacgtgattgcgagaaaggaatagtaaagcagaggattaagaggcagaaaggcttagcttcacccagcctcgaagcaacactgcaactctcctcctctcttc

SEQ ID NO: 34720 - DNA, 592 bp, Oryza sativa
ccacccgcagccgctgcggctgaagcagtgacaacgacggcggcgactgtgacgacgacgatgacgaactcttccgggccggcgtccgagcgacgagcacggcgctccgagacgtaaccgacggcggcgcggcgagcagcaaagaggtgtcggtgtacataagaagacgacgagcggtgttagcagcttcgccgtggtagggaacagagcgagagagtcgttttcatttcagtttctttcgcattttcgccaacgttttgagccacggaaatggcgtgcataagccgatgagctcctcctctctctcgcttagctcggatgtgtctcaccgacactgcgagctaggaagcgagtttttttttttttcctttggttgtcactctcctttacttttcgaaaaaggaacggcacatgtaacgctcggttggtgatcgccggggtcaatgggccacgcgtgccagtggctttgtacatacaaaaagcaagaacatatcaagaaaaaaaggaaaagaaaagaagacgacgagaaaaagtcaagttgggcatattgtagaagcagtatcaatgtatcatcagtgttggggtagtaagc

SEQ ID NO: 34721 - DNA, 1724 bp, Oryza sativa
gtcggtcttcttcaacccaggccaaaaagaagagcagaaaatgtccaatgccaacgtgattgttcttataaaactacagggattcacaatgtcacagagattaggatacatgaattcctcttcccacaaaattcaacactaacaatggcaatatttactttaacggcgtttttctgtcacctatcaatgccatcctgaaatttcaagaacatgatacaacgctagaacctaaggctgatggttactggttcagaagaaaagcaagaggcgacacagtataaatgcttgacactccacatccagagtacatatgaaggattgaatcttgagttcttgacattgcacagtaccagaaagtattcaagaagaaacaaaccgtgtatccatgtaaaaggctttgagttgatagaagttcctctcgaaagcatcttggtcttttgacattaattctcaagataacacttgctcatatatagcccctgaaagatttaaaagtagtcaccacaacaaaattacatacaaattgatggctaggccctactgaacacctgcaaaagacataaaaaatagttggatcataacaaagatctgacaagaagtcccaaaattgatggaagaacagcaatgagcaacaaaatcttatcaaaagagtaaaaagggaagcctgacatttgctatcaagggtagaaattaggcaaaattggttctgaagcactagaagttttagttttttttgttttaaaatccaagttcatgcttttaattttctagcgatgaaacataagctttgagtggtatgatccagttttgcctaaaaattaccgtgttaattggataaaaagaagttatccacattgttgattgtgctgggtccaaattaaagcgttataatttggaacagagcatcttcagcatatgtaatagacttgttacagttatacaagggttgtacttgtctatttcgaaatacaaaatggaagtatgttgctatataagtatttcattacatttcctgttggttgagactgtgtatgcaatgtattggattgcatgtgcaaggagcagtttattaactagtcgagtttcgaccttcacagctactttctccgtttcacaatgtaagtcattctagccatatatgtctagattaattaacatcaatatgaatgtgggaaatactaaaatgacttacattgtgaaacggagggagtataaacaattgtcgaaccaaaaaaaaaagctataagcctataaacaatggtccaaaatgaacatttcagatgatcattcactggtgtgatactaaataagtgcaagggtataatttctccaaaacaaaagcgcggcaaaacttacgtgtggttttcagctccgcgactgcattagatgtcttctcaaatgatggtgtagtctaggaaacattggcaggagtacctgaaaccaagaaaagaaaataggagtatcaacatagtatgatatacagcgaatttactgagcagagaaggaaaatccagcattttctatgaacacccccccccccaaaaaaaaaaaaggacctaatacaacggcagcctaacattgtgacattgggtattgtaaatgtgaacagtttgtagcaatcacagtacactttaggcctcaaccctgagttccctaaacccctaaaacagtggcacaatccagcaaattagacatatagaaagcgcatttgacacaattaatcc

SEQ ID NO: 34722 - DNA, 3398 bp, Oryza sativa
cgcaagctttgtggctcacctcctccatctccacctccacctccacctccatcgttggcaatggcagcggatgctctcctccgagctcccacccccccgattttttgactgctctgctttctttcttgggggaggagaggagcatatgctgcggagtcgtctggaccgcccgatgcgggatcaacggcgcgataaaagtgagggagttgcgaaacgacgtatttagagggaatacgttttcagaatcgtatggcggattttcctgagaaagcagttgacggcgttttcacagtctgaaggcggagtttttgggacgatgagcaaacagaaaatgaacaaaagaaaacgttttatattggaggtgcggggaatcgaaccccgtgcctctcgcatgcgaagcgagcgctctaccatatgagctacacccccgttttgatttgaatcataattaaacccttaagtagtaatacaaaaggtcctgggaaattctgactattacttcggcgctaattgaatgagtttgattttgagaagcaacttgtgagaatctgaagaaaacccaacttttaaattctataacttcttaaaatctaactgaaaatttgaactgtttagaagagtttatggcaatcggagattttaggagaaactatatctaccagaaccttgatagacccttacgcagctgccttagcgttagagctattatgtggtcatgaccaataaatccacacagatagatatgttcacatactactctgtagagatatgcagccagcttttatcagctagattgagctgtgttctcaattaagttttcagttttgggacaggttggggagcagctagcttgaacagttgggcgccgaaattaattcaaccggaatacgtacacatcagaaaaggcaccagtatgtacgccgaaattaattcaatgggaatactagaacatgcacgcggagtacagagttactgtaatactgtcaggctaggtagcagctaaattttcacccaaaaaccgcgtgatgaaggttgtatttagatacaaagtttagatccaaacttcagtcatttttcatcacgtcaacccatcatacatacataacttttcagtcacatcatctctaattttaactaaaatacaaactttacgctgaactaaacacagccgaaattaagtagatgtactcgtgtcgtcgtacgcagtagtactagcagggtatactaggacatacatgcaaaagtacagagttctatagtttgcaacgcctaacgactagtatttagctagcatctgtaacaacgacgattttttttttaaaaaaaagctttgcctcatatatatcttctattatatacttaaagtccattaaacttcctacaaacgctctcaagccgtcacgtggtgttcctataaatgctcttaagccgccacgtggctctattaaatctaaccgtctattttcacttaaattggtaggcctgatattttagaccattagattaaatttaaatcccaccccacccctaccccaccacctcctacgtaagtacgtacgtccgtcaatctgtccatctaccccataccctcctctcctattctctattcctattttacaacaaataatttcagataaaaggaatcaacagttagataagttcaagttaattgctataatttttaatccatatatctacttgattccatggttttgattggtttgagtttagaatttatttgctccaaaggtctttacgacacaaatatatacaatcaacttaaaaaaaagtcctaaataaaacttttaagagaaaggtcaaaatcataaaaaaaattatcctaaatattacgtatttatgtatatatgggaaaaacttacgtatgtacaactgaagaaacgaatgaagcttacctactattcgcgtaagaagaaagaaaaaactacccacagaattaccataaaatcaataagcaaaaaaaacatacgtacttagtaccattgtaaaaaaatgatgatatttaaaatatatttactattatttaatgataaaatatattactctataaatttacataaatatcaccgtcgattttcatttaaattggtagacccgattaatattttagaacattagattagatgtctaaaagcccattaaacatctaaaaaatgctcctaattagccatagccatgtgatgctataataaattagtgaaattcttaaaaattctaaaataacaaaacatatttttattaaatttggtggacccattatttacaaccattagattaattttcaagaaaaaattcctctcctaaacctgggcccacctaagactgtatgtataagttactttttttttttacaaaaacgaacgtacgtatgtacgcctcctcttccttcaattcatttctccacttttcacctattccttctcctattttcatgccttattagttagataagcaataagtttgtgttaaacaattaagcttctaaatcacacaactaatttctgatccgcgtaaatctttagattatttataactaaatttacagttgaagaccatatttcactactatttacctttgaaaaaaaatgccattttggtttagatttcctgacttttgcgtgcccttcaagcaattataaaaacatataaaataataataataataatatagattttatcatcatacataacttcataataattaaattaggtctacaatcataaaagtaaaatgaatattctatgagtaatgtttcaaaaatatgtttgttagaaagcaaaacctatgcaaaacataagcaactataacatctaactcacacaactaatatttcataaacttatgtctttagattatttgattattttacatttaaagacataggaatgctttaaaaagctactcccccattataacattagaataagttaaaataacattactagattgtagtgttcgtatttttaatatctactgtgaatatactggaaaagacaagtaaaaaggatatattttaatcaatcaataaattgtttttcaatttttagttaaaaaactaattgcaactaaaacactacaacccggtaaaaataattattaaaattatatccacgcgcaatctcttcccttcaactctctcttcctcttaaatcataatgttaacttatttgaatttttgctttatttataattaaatagataatttaagatccatgatacccatatttcactatataaaaatgaaaatacgtgatttaaacatagacaccgttcctttgcatggtaaccaaatagaaaaaagacagaccataatacaaaatgaaaataagtattatattatcgtaaatcattgtacatcctctgagcgcacttaaggcgt

SEQ ID NO: 34723 - DNA, 4637 bp, Oryza sativa
cactaaaattagaccaaccattgcatattccattttcataacaattttaaaatgcttagacattaatggccttacatctatccatatcatagcattatgactttctccacatattattacatatataaaccgcactaaggttcacagtatatagttctttgaaaagttatatttgttactattaaatttaaaattttggattcatgttaactaggtatattcttttgaaaaagatagtttagatcacacaaatcagaaggaagcgaggtatatgacatgtctttattaatttatatgtaagtatgtaacaacttacatcaacttaaacctactagaaggagaactacttgatggtacaaataaaacatatttattaacaatatagttctttagaatttgtaaaaaaaagcatgtaaacattctattaaaaaaatggccaaacaccttagttctaatttacacttgatttgttagacatgttttccaaacaaactgaatcgaacttccttctatataatcaagagatcatagataattattaatacagatgtattaaatatgatatatttttaaacctaacaaatatcttagaaaaattatcaaagcaaaataccaaagaacagcggaggcttcacctgatgtgtcttattcaaataaaaaaagtacttttaaacataataggtgtcagccgattgatattatatttatatagatatttcaaatgcaatgtacaatcagggttggaaattttggccatttcagacccctccgatactatattatttcggccaaatttttgtattttttcatgaattttggtaatatttgttcaaattcaactaacttttgttcgaaatttcggaccgaaattttggtgatgccctatgaaatcggctaaaccgaaaagtttaatcatgtgtacaatacatgcccgcgcgaatgcgcgggctactttcctagttgatagagcaggagaataacaacgacaatttgaggatatctgaacatctactactctctttatttcaaaataagttaatttgtaatccgtgatgtttgttaaaaattagttgtgcagtttggcggtttgatgcccctctctgcattaaagaacttataattgctgattgtaatctccctggttgagaaataaattcaccctttccccgcaaaaaaaaataacttgtaatttataatacaaatgtagagagtagataaaaagaggagtagttatattgagatttaataaattaaaggtattagtcctttttatctttttacatgtacgtacacgcaaaatgggtaaaacaaaatttgttccgagacgtagggattatacctatctcagtcgcagtgcacggaaaagatgcggaagcacgtcacacacatcacttgtagctgcagtagtacatgtcatgcttttaatttgcatgtactggatcgatcaggattcagaagagagagagctagcgacaagttgtgcgtgtaaccaactcgatctgtcccaacccaaccaccagcgaggcagcgacggccgggacacgaccgattgaccaaatgttaattagtgcagattttaaagccggctggttaaccgtttatgtcatgtcatggcgcgaatgcgtcctcatcgaaatttaattaatagcgacggttcgttcgttcgcttgcctttttcccaactcctaactccgatcccccccacaggcacagttcgtcatcagttcgtggttgattgcttccgtacgtccctgatgatcgatggtcgaaccagcctccatcagtagtccaaccgtctcggcgatgtgcatatgctgtaactgtggagacgtgttgattgaacgatgcagatttagagcctatttaggccctgtttagatggaactaaaacattttattccctattagatcggatgtttgaatactaattataaatattaaacgtagactattgataaaacccattctataaccttggactaattcgtgagacgaatctattgagcctaattaatccatgattagcctatgtgatgctactgtaatatatgctaattatggattaattagtcttaaaaaatttgtcatgcgaattagctcttatttatataattagctttataagtagtctatgtttaatactccaaattcatccgatatgatagaaactaaattttagtccctagatccaaacacccccgtcgtgaaaagaaaatttttgggtgtcacatcggatatttgaccggaagtcggaagaggttttcggacacgaatggaaaaaaatttcataattcgcctggaaaccgcgagacgaatcttttgagcctaattaatctgtcattagcacatgtggttactgtagcactatgactaatcatggattagttaggctcaaaagattcgtctcacaatttccatgcaaactgtgtaattaattttttattttatctatatttaatactccatatatatttataaagattcgatgtgatgttttggagaaaagaaaattaaaaactaaacaaggcctaatccaaggaaaccaagttaccaagttggaccactaagggcttgttcactttgctaccattttcaactttaccaaattttggcattgctaaattttgttaaggttatcaaaattttagcaaggttaccaaattttagcaagatttcatatgtatttactaaaatttagcagcaaattaaacgtagctaaaattttggtaactttatcataaaataatataattgaaaatagcatcaatgtgaaccgaccctaatattatccgcggctactacacccgaaaacgaatgtagcggcaacagctgaaaacggccacagccacgcggctccagcggccagcgtttccgatcagcccccaaaacgagtcgtggagttggaaagggtaagaaatacatcacgcacccatattttcgtcccaattaagagggcgccattcctcgatcgatagatccggcccccttattcctcacgtacgcgatcctaattagctacacacgattcctggcgcttttatacacggaccagagtgtactaagatcatcacattttggaccatcaaatctgggatcgtacgcacgcagctagtggcgatgatctatctatctgagaaaacggtgccatccctgcatatatgcaaccccattgtggaataagcaaacggatgaaaaataatttctgaataaaaattttatatacgtgtttttaacgttctaaaagcaaatgttgaaaaataaactacgatgaaaaacctcaaaattaacttctaatttaaagttaaaatttttagatttagctaatgtgtataagcatgtgaaaaaaaatgtgacaaattggcaccgcccggcaacgccaccatggttggctcgcacggtcgccggccgggccacttgtgtgtaggcccccggccgggctataactttcctacctggctacctgcctagtggcccgtccgtccgtctaatatagtagctggattatattggttttgagatctcgatcaatcagcttccagttccagctcgttttatggacttgcacactgtgcaatgccttgagatattgattgggttggttgatcgcaaatcgttcgtttacttcgtttctgtagcttcttcatcagggcgcattcagcatgtctaatcacataagtatctttcttttgaaggagattttgttaagaaactcaattaattcaagtcacgaactgtatatgctcactagtagtacgaaaaatatttgttgttacggtcaaaacaggttttttttctggtctactgttccgctagagtcaaaggtcacggccaatagacttcaacagaggtagtggccaaacaactattttctgccaactctgcttcagaaatctcgagacggcccatcacctcttctacgaattcccgatcacgagaacaatttgggacactatagcgacaaggctaggcattcctcagttgcgaccgatgaactggccccacacatcatcccttgagaactggtggatccagaccatccacaccatggctaaggaaaaaagaaaatggtgttaaatcactcctcattatactcacttgggaaatatggaaagaaaataatagcatggctttccgcaacatcgaagcactaccacaagtaaccattaatcggacgattgacgaagtatagctatggcgcgcaagtggagcaagggccatccaatccctgcttctggacacctgtgaaactacaaatagcaatatgtaaatcatgacatgtacccctaacccctttcccctagcgatcccccatccctctaaaaaaagaggcgaacattagggaatgatctaatattaaataattataaggggttatacttcgaacccagattgtctagctcaccatcttgtgaagttagatggaagacccctaggcatttctcaccctcctcgttttccttttgttttcttttataatctcctggctttagagctattatacagtgtttccccctccttaattaatataaatacaccttgtgggtttaaaaaaaggtcactaaaaatgcaccacgtttctctgactccatggtactctcttttttcatattataaggtgtttggtttttttatcaagt

SEQ ID NO: 34724 - DNA, 586 bp, Oryza sativa
ttcgatcgtgtgttgttacacggtcgctctggtgcctgtatataagtgaaagaaagaatcactgcaagatagcattagtttcatgaacttcagcctttctgtgttcagaatggttgcaatatgcagtttccttttttttcgtaaagaatctaaacgatatggagctgccatttttcagttccacaggatgaaaatatcagcttacagattaatgaattcttgttatgtgaagtgtgaatgttatgtcggagatgtattctcccctcttaattgcggtggacatctgtacactgtttcagaccttgtatgttcatctgaatcgtggattctttgctttggcctgaaaaataaggaaatggaatactactgttctgaacctccttattcttggtctttcttaaggaaagcaggagctctgcagtgcattaaatatagtactctagaaaataagtagggttacaacatttgcgtaatggaaaaaaactggaagaaacagaaaataaaatgaatagaattatggattcttttcataataaaaatatgctttcgttgagagtcgaactcaagacctcccgcttactaaacg

SEQ ID NO: 34725 - DNA, 716 bp, Oryza sativa
attcctgcagccctgtttggtacagctccaactcctaatttagctccaggagttgagtctagagcggagttgtggagctgtctaaacccagttccacaactctagtttattttgtgagagagctccacccagctccattcccattattggtagagctgaaactgtttagctgagctccagctcctggagaggtggagctggagctggagctatgccaaacaggcccgaagcagcgggtaccagctagcctgagttatttgtgctacactcaaaacgagatagtacgtcattagtgacttagcgagtgattagttgaatataatcgattacaaacttataaatagatttatttgatttttttaaaaaaaaattataccgactacgtccaaaaatgtaaaaatttgcaaggttagatacgagtatcaagaaaacaatgtggaattaaatgagacaatattgtgattgatagagaataataagtagaggaagacattcagccccatcgtttcgcttatatatacttatacttataagcaaaatttaaatactaaaacttaattaattttgtggtttcttttatcttagtttatattataacatttaattttgattgctaagggaaagtatatgaaaattgtaagcacaaattattatttgttttgctaataagccatatgtacaagtataatcataaacgaaacgatatggatgtttga

SEQ ID NO: 34726 - DNA, 664 bp, Oryza sativa
cactgtagcgacttcccatccacgaggcttgcgccgaccgcttcgcccgggacacgatccacggcttcttcgcgcacccgcggcacccgctaaccgcggttgtggcctcggcgaaccccgggtggtgcgacctgtgccaggggcggatccagcccggccgcctcgtgtaccgctgcgcggagtgcgcgttcgacgtgcacccgctgtgcacgctgctgccgatgaccatccacccggccgccgggtgccacgggcacgtcctcaacttggtcccggcgcgcggggagtgcgcggcgtgccaccgggactgctccatctggcattaccggtgcggcctatgtctgttcatgctccacatcggctgcgtttcgccggccggcgccggcggtgctccagctggtgcgaggggttggcctgccaccggtggcggcggcggctgggccggcggtagcagtcccatcgtgaggtttctgatcatgttcgcccggcaactggcggtgaatttaattgtcaatgatattacggacatcctaaatgcgctatagtaagatgtgtgtgtgtgtttatataggtgattattgtgagcaactgatagcaccgggatggttgcataagttgcaagtaagtgggagtggattgaggggacatctttttcttctaaatt

SEQ ID NO: 34727 - DNA, 541 bp, Oryza sativa
attaccaaggcgacgactctcgatccaacacaacctgaaaacatttacgtattagaactaatttaattaggagatatagtccaatcatatcacaagtatagaaggtatgcacttacaaggagtagcattttagaagaccagtgtccaacttccggatcctgaaaaggtcgaagaggtcatcaaatcctatagttatataggcaggcgacgataggaatggctggtggtcatgatgtccaactatggatgactccctcattttccgcttggcattgcttagctccatgtattgcttatgtagctctcggcaagcaatacccatcacggctaacacattgtcctccaccaatggcatgcctagctcaaattgggccggcgccctcacgaccttccccgctttgctcaccggcatcgacgtcacagccttgcccctttttggctccggcgccaactccccgaccttccccttgccgcgttcacgcttctggcccttgacaagtggtggggagctattggtctttcttgtggtctttattggagc

SEQ ID NO: 34728 - DNA, 632 bp, Oryza sativa
atggaagcttgcggcagccgggcaccagccgcccgagcaccttcgccttcctcgccagagctggggctttcggccctttaccggacgacgaggatgggtggcgagacggcgggaagatggcctcgcggaggcgcgcgcggcgcgcggcctggatgcggcgacggtgggacgcgaggatggcgcggctccagcgcgtccgcccgcgcgccgagacggcgagcgcgcggtcggccgcctcgcgcacggcccggctgcgcggcggggccgccgccgaggaggagggcgacccggaacgcacgaggcggatggcgtcgaggagcttcgacgagtagatctcgtgcgcccgccgcgtccgccacttggaaggctgcgcctcggacccctccgactcccccgtcgcgccacgcttcctcttccgctcactattccccctctcctccaccgccgccgccgagcccgaggtggacgccattgcctcgcgcagcaaagaattcttgccacaaacccaacttacagcacagagaccaccaaaaaacagcaggatcaggatatctgtgacctcccaagattccctcctcctcatggagcatacacctggttgctgtgcagaggaggagaggggtggtgagggg

SEQ ID NO: 34729 - DNA, 507 bp, Oryza sativa
atggcacgacacggcagggaccggagcatctcgcaggtcgccgggtcgcttcatacaggagacgagaaggacagagaggcgcacaggggcgcgcgcccatgatacaaaatacaaatcgcgcatactaccactgtacaccatcagtacatacatacatacggtttgtcacgtagcccgggcaggcacggcacagcctagcattgcagcggcacaccgcacacacaaccccccacacctgaatgcggatggcgacggggccagccagccaatcatgcccgccacatcaccaccgtccatccatccccctgcccaaccccgtacggaccacgtggacgcctccccccgtcggcccggaggaggagccctggcttacaggtgggccctgcccttcattatgagacagctaggcattagcctatggcgtccgaccgaccgaaccaccaccggtgggctcgcccgcccgcacgcctgccgcgctcgcgcgacggagcaccagcgctgctcccg

SEQ ID NO: 34730 - DNA, 718 bp, Oryza sativa
tcctgcaccccgaactatgtttggtgatgattgatagaggatagaaaaactatatttgggtacagaatcgaaaatacggccaagacccaacttgtataaaagtcaatgtatggcgtgcatgagggaatgatggcaagcctgggattctcattcatttgacctttcattcaattttgtaaaatcacatatataatatattatcccgatgtacatgcataataaaataatagttaatataagcattattctctagagttgttcttaatttgtgccaaactgaaattcagcatccacttcttcctttcatgtttataaattattttaggattatcctaagtcaaacttcttcaagtttgattgaatataatttttatatatttgttttgtgttaaaaatgttgctatattattctataaacttgatcgtttgacttagtataaatccaaaatgacttatatgaaactggggaatagtatctagtactccatatatgggagacagacaaagtacaactgcaagtaggcagactttctatatccatgaatagattagctattgattagctaatgcagtttacattaatagattaatgcttctctgtatccatgactcaggtcaaatataatggccaatcaataaatgaattggacattattggctcacctgatcgttcgctagttcttcctggttttgtctgtgtatatatgcatagtgtctg

SEQ ID NO: 34731 - DNA, 929 bp, Oryza sativa
ttttctgttacttcactagtagtaaattattacggtggattatttgcttctctctgaaatatgtctccttttcctaaaaaaataaattcttctactacattatttgaaccacatgttctaagttatctattaagtttatttctaaaaatatttttttaggatttacaaaaatatttaatttattcctacagttaagtagatatctgctataataatttattgaataatttgtttcaaagtttaaagtacaagacctggtttgatgcccatcactttttagataaagggaacttttattgatattagaggattactgaacactctgatggacatcactactgcttcagagtttcaacctgaagaaaagtcaccgagaataaattcgctaagcacgattcccctgcattattgtgcagtaataatgttgcattccattccaattcccttgcataattgcagcactttttctctggagaatatatggctctacacaaacacaacaggattcctacaatccggtgagacggcttcagggccgtacacaaacctttcacagtagtttctctgaaggaggcatcagatgtgaatcttttgtgaacaaatccttctccttgaatgctctagaaaaaaaaacatatttttctttctttgcatttatgttctgcttgaattactaatttggactgattcaattcaggagacattcagacgtgccaggttaacatggatggcgagtggcgacatgcaaatataggacactgttcatgtttttatcatttaggaaaaataagctaatcacatgaaaaacaatgaattatactccctccgctatctagatttattaacatcaatataaatatgagaaatgctaaaataacttacattgtgaaatggaggaagtagttgcaagaaacattttttttacctca

SEQ ID NO: 34732 - DNA, 2472 bp, Oryza sativa
tatcgggacggagggagtaggctcttattttaggttgagctgaaactgtttggctgggctctagctccaaaagagattgagctagagctggagctgcgtcaaacatgctctaaagccataaccaaaaactaggttgaagattttctttttgtttctgatgtgaggtagatgtatgactccactcttaaatttagaactttaaatccacgggcttgtaaatcgtataagccagaaactaacttaaaagtctaaactaataagagtataagagtaaacgcccttagcatctaaagttaaattgcctattggctattgttatccaagttcgtgtggacataaattctgtttctgtttgatttcagacagtgtagcattttgggtttagctaaggctgtgtttagtttacgtcaaaattggaagtttggttgaaattgaaacgatatgatggaaaaattagaagtttatgtgtataggaaagttttgatgtgatagaaaatttggaagtttgaagaaatattttggaactacggcgcaagttctgttcactgccatctcccactgggtggaaattcagagatctctggaattttttcatggtcgcatctattccggaattgatacttgagagggacacgcaatgcaaaacatggtcaaaagtgctaataaaagtgataggaaaatcccctcctttcactttcaaaaaggcttcttttgagttctctgaacttctcaggaaaccgaatgattgacacagtagtcccccccttttgtttatgtatcagaaaaaaaaaatcatcttgacctcgcatgaacaactgaaggtactgaacaggtcattgacatgccatagcacgattgcttctgcctattggataatacactactgcaccagcaaagcagcaagtgtaaaatctttttctgaaagtggcagctctgaaaactctgaaactgtgtgccgtaattcttgcatgcacacggagattgaccatctttataaatcctagttaaaaaagtattccagttccagcttgaattagagatggcaacgggtgcataccatcgggttctcttgccccatacccacacccacgatgtctaaatactcccacttaaatacccacacccgtcgcgggtacaaaattgtccccatacccacacccatgcggataacgggtatccaacgggtacccataatcatataattgacttgtaatatttatagttttgtactataattagctatattagagttgtaaaccatcaatattttctctagcaacaatgctattaatatcagtgttcaaaggcgagtaaaaaaattatacaaccacattacataatcaagaaatcaaataataatttcatataactagactaagcgatgctttaagatgtgaaaaatgttttatgctatgatttagtagtcattgagagttataatgctcatagttttagactcaatcaacgggttttttctacccacgggttggtgggtacgggtgggtaaagaacagacccatacccatgtacccaatgggtaagagttttcgtccgttaatagacctatgggtataagagttagaacacgattgtcttctaatagagtaaaaacccgtcgggtctcgggttatgggtaccattgccatctctaagcttgatgcagtttatgcaactgcagcgtagactgtggagcaagcccttgtaattaatttgccatctcaacgtgtttagcacatctttggcatcgaccaccgtttcattccatcgcccaaaaccatgacctggtggtgattagcagaaaatgagttgactagttcgttctgagatttctgatagaccttcctgctggcacaagcccagagcaaaactcaatatttagtcaccatgaaatctgaaaatatcttccaaaggaaatatctgaaaactagaaatcatcatcaaatggttagtatatatattttggattgaattatgacagggatgtgcctggtaaaacatattactcctgataaggaagaacatgcaaacaaacgagaaagcctcacactgtccaattcagacttgagactgtccgacaatttcttactcccctcgtctcaaaatataagtattttttaatttcgacatagtcttcgatatgctattttgaccaataatatttataaaagtaatatattttaaataaaaaagttgtatattacgatagtttatttaatgataaatccagtagcatcaaatttacattgattgattttttttatatatatttgctattaatagtcaaaatttaaaaagtttgacttgacattattctaaaaatgcttatatgttgggatggagggaatagctatttacttttttttttcttaaacagaacattcaaattaaatactctatccgtcccataatatagcaacatagtacaggatgatgtttagatccgttatattatgaaatgtcaatattatagga

SEQ ID NO: 34733 - DNA, 1688 bp, Oryza sativa
tttataaacttatttaaacttagatacgcttgactagaaaaaaaagtaatatgaaatggagaaaatatttattagagaagtaattcccacgttacaagcaagacttttttctctctctttctggctttctccatgtgacatttaccatggataataaatacagaatggctatgaatcaagttttgcttctgttttcttcaagggattatattccaaggagcatgtatgctttgcgtgcctgcagagcaaatgtgtcaaagccccgagaagcaccacaacttctctttctccagcctgaccaccaatgtcggctgatccatatccatcatatccaatctgcgagtatactacattactactccctccatcccatttgaaaagacagtcatgatttttcatgtacacatttaaccgtccattttatttaaaaagtttttttaaaaaagttaaaaaaacataagatacgtaaaaagtattattcatattttatcatctcataataataaaagtattaatttaaaaaaattaaataagtcgacgattaaagttgggcacgaaaatttattcttgcatttaaaatggaacgagggagaagtagactagtagtagcagagtaatgtaaacatgcatatgcatggttgcatggttggttgttggtgccttgtactgcctgccggtgtgaggtttgcatctgccatccggtgacagaaaactcctttctatcggcattgccctcctgccagtttgattcatcttcttcccaagcgacatatcaccaaactattggttcatcatgcatggttggtgatgcacacctgatcacaagcctgtttcttgctgcatccaaccaacattgatagatacggtgtacatgttcttcttctatccactaacagatttcttttttaaaaaataacccattatatatattgtctaatatatttacttttttggtgcccgtttatcgtttctgaattctgcatgacagttgggtgtccgccatcactatcatcttttatattagtatagatgattttcgattatctacctatatctttttatgtttgttcatggtttcacatcaagaattcaggattgatttggtcttgactcttgagtaagaggcaagcaactctgaagtatgcagtagaatgcatcattcagcaatgcagtgacaaaaggagactgtaaaagctcctgcgtggctagtggatgaatggatgtatcaaccagtaggaagaaaaagatgaaagcagctttcctttgggtagaagaacagaacctgacttggattgcaagcctttcatccagcatatatgcagtgcagattggtgtcggtgatcggttcctgcatgataatctgccgactgaagcttcatctgatgatctgcatgccaaccggtttctgaaaacatgatctgctctctccgttccagaatataaatatttttgttatgtatataaagtcggtgattgattcttacatgatctatcaaccgatgttcatccgcatgccgatcaatttcttaaaacataatgctctcttctttaaaatataaatatttctgactatgtatctgaacaagtacgattgaacgtattcttgagaggaacataccatttatacatttttatacaattaatacaaaatgtatggtgatgtatatacatgatggggtaggggtgca

SEQ ID NO: 34734 - DNA, 1440 bp, Oryza sativa
tagatagaaattactctatgattgctggtttactaactgaagttgcagcttccattatgggctaaagatgcttcctgatacaatatgatcccaatatccccatgctatctcatgataagatgcaacttttaacagaataatgccctaatccacatctctaagctaccttaagctcaccagcaggcatattctctgggcatgtccagtggagactttcttgctaatcaactaggcattatttgttacttctggttcagatgtcaattttttcatggtacatttttttcttactctttgcgtattttgtactagctatacagttcttctacggctttctggtacaccgacaacgaagttttcttgacttcttttaggggaaagaagaaaattttcttgcttgggaagaacagtgctgttctacagtgcagaataggccccaattcacagcagaaaaccaaacaaggcaatgtactgatcaacagtagcaaagatccaagaaaagcggacgttgactcttgtcaaaagttgtgaaaagctggctaatattaatcctattaatttgtacaaaattctgttagattatacttatacttatttgtaaagcttattagtaactaaaaaaattcatacataattttcttatatacatgtacttagcaattcaaaagcaaatattgtaaaataaacaaagataaagaaaacaacaaaatcaacttagaataaagttttaaaatttaaattttggctataactataatcataagtaaaacgatggggcaacatttcacttgaagctaatcttcagatcaagattttacatgcaggtaatcttcagattcagacaaaaaatcagtcctggcctgaaaagcctccaatcgaaattattcatgcccattactcattattcttccaatttggtcctataaatacctaagctccaaagaatatttggtgttagttattaattaaaaatgtcatctagttcagaggtcaggtttgttgcaactatatgtttagctttcatgacagcgacttgagacctattgggtacagtatggtgagtcagtgcagcactggcttacaccacaatgcaaagcttaggtagctaaagctgggcataacagcaaaagaaaacctctttaaattaattagctccgataatggcgaccaaaatcggtgttttgtggcccatgattaacgaaatgatggaggttggagaccgacgggaaagcttctttggaatcgtttttactttaatttcagaacctgtggtttgggtgggggcagcagaaagtctttaatactactccatccgtcccataatataatagattttaagtttttacttgtaatatttgatcactcgtcttattaaaaaaaattgtgcaaatataaaaaacgaaaagttgtgcttaaagtacattggataggggtgcagga

SEQ ID NO: 34735 - DNA, 576 bp, Oryza sativa
attcgtattaggatacgtctcatccacctaaaatcccttatattttaggacgtagtgagaagaatatacgtactatcatacatgccgcatatggaaaggaaaagaaattaacacagaatggagctgaacgataaacatcagactaaccgaaatggtgagatagcaattaagcgatcgagcaaacaagttcagatttcagaatgatatctaggaagcatgcacgcatgcatgtaaaacaaagctctgttatgcattgctccaacagaaccccatgcatgcatatatgcattcttacagaaatcaagagtctatctaatttaagggaccatgaccaaccggtaatatattggttgacgacctaggtaagctaagtagagctagacagcttgtgggtagagccaatattcgagcatacttaatgaaaataactacctaagcaagccactgtctcactagctagcttataagattcttgcgcaccagactccttaccgtggacattgcacaccgagtagcacgaggggtcagtctcctggacgaaaacacagtagggctaagaggcagctgatgagcgcc

SEQ ID NO: 34736 - DNA, 631 bp, Oryza sativa
atagattcacgggttgacctattttcatcctaagctgcatcgatccctccaatgccccaccatcacgcttataccagttgggtaaaaaaaaaacacaacaggctgaacagcttacgtgttgggcctagtttagggtcaatatacagaatccattatatgccattgagtttgtctcatttctatgattagctattgactttgtcacgttctacaatataccatcgacttttgcttaacttctacgatttaccatcaccatccggtcagtctccgttagtaatatactacattttgtttcaaataaccaaaataactttaggacacaaatatccaaaattagaataaaaactgtaaaatcgttatttttgcatacctttttagaggcatacgggtgatcgacccaattgcatggaaaaaatgaccacatgcaaaaatccttttttatagtgccacctaggctcgcacaataaaatttaaatagtttttatgactcgtgaacaaaatttttatagcaaacgtgtcacaaaataaagattggttgggcctttttttaagaataaggaaaacttcagacttcaaggggtccgttgggaccaatgaattaatttagatgaaaatttaaagataggat

SEQ ID NO: 34737 - DNA, 628 bp, Oryza sativa
  unsure (1)..(628): unsure at all n locations
aattctcaagcacagaagctaattgaggctattccgtttccatttcttcatgctagtgcagagataatgaaccaccgaaaagaatacaaattgtctcgtagaagtaaaaagtacgagctgctacattttgagagaaaaacaaggtacaactgaaaatttggaggatttttatttgcaaattcacaaaaagcaagctaactaagcagaactgagaagagggatttgtgggagtagttgaggtcaggaataaagccctgttccggcccatcccctgcttcgccggtccaggtcggctcaatctcctaaggtggcccaccactctcgcgtaagatgggcccacactgacagaccaactagacccgaataaatcgccttctctcccacgccacgccgncaaggcgccaacgccttccaccagccacgattcccagtttcctaccaaaaacttgtttctcctccacgtcggtcgagtccgagtccaccgctccggccgccgtcttcatgggccgcttctcctccaccgncgnagcgtcatccatgtccggcgccaacggaggangaggaggagggagcgtgtttccaagcccttccccgccgacgccgtngaaccaccaacacgcgcttccgt

SEQ ID NO: 34738 - DNA, 593 bp, Oryza sativa
ggttgttcggtttgtcccgacccgccggggttactttttccggtgcgcgctcacgggtcaggacttacacgagtacttgcacccgtacattagcagtacatgtgacgtgtggactttgtggtgaaacgttcggggcacccggtcgcgggagcacggagtcgtcagcgcccggggtagactagtcacttgcgtgtattgatcgagtgagacgtgttttggacatggacgatggtgaactagtactatggaaagaaacgattcgatgtagcttaggctcgagcctaatttcctcgtacctgcaaaagtacatatatagacgagttgctagaaagaaaaaaaaaaaaaacagtgctggctcagcttgcagaatccagattctagaacagtacgtggcacgaatctcgacggcgttaagtgttaaccacgtgacggcgattaataaatactttttttgtgacaggtggggccgaggctgaagagcgacagggagcggttctcgccgaacaacatcctcctcatgatcgccggcggcgggctgctgtggctgggctgggccgggttcaacggcggcgcgccgtacgccccaaacatca

SEQ ID NO: 34739 - DNA, 550 bp, Oryza sativa
ttcctccctcaccatctcccctctctctcctctcctctctccagcggcctgcaggggccgggggttatggccgcatggtgaggttactatggggcgcgggacgacgcgaaattggacttggacggcgcgccctagcccacgtttaacggtggagccgccagcttaagtgaccttgcctgcaccgtagggattgcttcagtggcgacctgcatctgcagaacccgttcaggtctgcggcggctgctgtaggaacggcgaaaggagaggaaagggggaggagactcgctaaccttgtaggtgctatcaggtcaagcggttatgctcggtgcacggtgcgcgacgggcgcccttgatcgacgccgatcagaacaaggcgagtgacccgaggatggaaatgtaactgtatatgcgactggaggaatgggtgtggccgggtggctccgatctatgcctgggccaagttaagtgggcttggtcagcccgcgtggacgacctgagtggatgtttgcgtataagctcaatttggggccccttaattgtcgcactgtcc

SEQ ID NO: 34740 - DNA, 656 bp, Oryza sativa
  unsure (1)..(656): unsure at all n locations
tctcgttaaacgaactgcgtttttgctagaaagtcgccgcgtgtggagaaaatgttgggtgacccgacgacctcacgctccgtccgatccgagaggctgagatctggacggcgaggggctcccccaccgtcggatcgcgggtgaacgggcaccgttgaaggtctaaagcccccagccagaggcggtttcgtcgtcgcgtgtgcggtggaattttttgcggtggcggagtggcgaggccaagaaacggggagaaatcgcacaaaaccacggcgttttccgcatggaccggcacgcggtgcgaaccacatgcactgccgcgccacgcctttcggacgacacacgaccgtgcccccatcgcgccgggctttccgtggaccgcgcccacccgtgccggccttacgcgcgggtgaggctcacgtagcacgggttcacaccaccgaacaacaacccaccccttctgcgctcttcattccatacgcattcctaatttcggcttggnctcggcacgcccacggaccatgggcgcaaacggcgcgttgttcacgccccttttatcgccctggtgtgccaacgcgaccgccaagctcgggcggcgtgcccgttgtcgtaccgattcccgcagaggccgagcacgcgccgtggacacctctccgtgg

SEQ ID NO: 34741 - DNA, 686 bp, Oryza sativa
gttcattcctgttttggtataatattacatacaaatctggaagtgtgaagtttaggtagctgattgatcgtgatcttatttccgctagtttgaattgcacagttataatttagttatctctaccattcccagtgcgctgtgttggctttcttttcctattattgctcccttctatgctatgctaaccacttggtaggtttttaataactgagttgtgaagtgaagtgaaggagtagaccatattctttcatgattaccaccttggcatcaatgagttgataaaattttttgttatcattcgtaagacaatattaaactgttatgggtaaattccaaatagactcccatatataatggagaaattttaatgaccccaaggattattatcaattcctttctgtggacatcaatctaatttctggcagaggtattttatggtgcatggatatctatgtaccatgtgctagggatccaaaacaattgcaaatttttggaatcacattatgtggtttttatcattatattaatgctcaatggcatgataaatcaatcaagtagtccgaacagcccttaagctagtacatctaatactaataaaatacacagtgaacatgaattttgagcatagcaattttgctatgtcctcaatttattggtaaaaaatagttatatttcttgctggaatt

SEQ ID NO: 34742 - DNA, 662 bp, Oryza sativa
caaaattatatctgtataacatcatagtaatgccgaccatgtacgcatccacatggccatacagcaacatcagaaacagaatttaattaattatttgactaaacccagaatcatttgctgctgcatcgaatcgttcctctcgtcatcgccgacgcaaacatgcgctagctgatcagagcgaatggcaccacgtccatgccgcctgtttgttagctacactgcaacatacactaatacgctaagatatatagattgattctgttcatggtcaactctatgctaagtgtactagtttaattggtacagtactaagtaaacactgaatccactactctactattataaaattgaagatgttttgccggtattttagtacgttatccgtgtatgagtctgtttttaagttcgtttgcttttggaaatatatatctgtatttgagtcggcttttaagatcgttcagttttggtaatacagaatgaatcatataagaaatctgtttaaaaaaactcgcatgctaacttgagacgatcggactcctaactgtagcccatgattttctaaaaatatatatatctaatcgaactcccatagtgaatttcatcataactaaaccatataacaatagtaagattaaaatagacttcacccattgcaacgcacg

SEQ ID NO: 34743 - DNA, 655 bp, Oryza sativa
  unsure (1)..(655): unsure at all n locations
aaaattttcgttctttgtgtgagagtctaagtcgtgccaagatctcatctcaaatgacattgttccctctcatcgaaatcaaaatcctccacctcaaattcctcttccgattcaagtctccaaatcaaattccgaaattcagtcgcatcctttgaatcctcgctaaacactcgctcccaattgcgaaaaataccaaaccctatcttgagctttccttgattcctccctgaaccctcgagttcgaatatcgaatctgaatccaaatccaaactccaattctctccaaatcagccttctctgtgaaagtctattttacctccctctggctcagtgggccgactcttcttccccagcccatctcctctcagcccgcttcacctnctgcccgcacgtgcgctgcatgcgccgagagagagagagaggcatcgcctctcttcttactctctctttcctcgctctctctctctgcttcctttctccctctcctcagcgccgatttcccgccgacgccgttcgaaatccggctgcacccccgcgtagcgcgcgctcgctcgagaggtggccgaccggccgaacgccgncgccatcagcccttgcgccgncgacgccacgagctgccgtcttgccccgcttcatgacaaacgaccgccgccgt

SEQ ID NO: 34744 - DNA, 578 bp, Oryza sativa
cttttctggccgtttcacctgctgtcagaagatgtctttcatttgttctttttcttcaggggttaggttaagtgggaagagatcgatacagtatatggttatatatatggctaatgggatggccatgcttgcgtacgttacgtgcctgcgtgcacagatgcgctgtaaggttcctgaccaaactgtacattggggaagaaaaggattaaagcgaaagagatgaacagatatggtttacagagaaacggacggcttcatgcgtccagctgcagatcgagtagtggtggcctcgtggggatacctactgcctacccatgagtccatgacagaaaactctgctcgatctgttcttttctccgggtattttttttccctacttacacacgggaaacagatcgaaaaggcactttcagttgatcatttcgatgtaaagcctgaaaatcatctacctgaaagttgagtgacaaaaagaagcaccacctgtcaacagttgaggagggggactacagctccactacgagccgtccatgcagctgaggcatgcaagcctgctgcttcttagtttcctgcatttttct

SEQ ID NO: 34745 - DNA, 604 bp, Oryza sativa
cctccggtctcccccgccctcttcgctttgggctgaggccgccgtgctcgcccagtccttttcactctgcccaaggtggcggaaacccaaattgatggagcgatgaagatgcagatggagttgttggtggggatgtggaacttgtcggcgacccacgacatctccggcgcgcgctgccgcgtccttggccacgcaccggaggcggttgtggaggtggacggtgtcggcctggaggtggacgtagtggagcacgtcggtgacgtcggcggcaaccttgaggcgagactgccacgacgcgagcagggtgaaggacgggttgttcgggttgcggtggagcgcgaagagcggcgacgcgtcgaggaggagctcgtaggcgaggaagagcgagccgttgggcgacgcggagacgccgaggaggcgcgcgatggcggcgtggtggcagtggccgaggacggcgaggcgggcggtgacgtgcgcctggtcgcgcgcggagcgggcggcggtgtaggatcgaatcacaagaactaagccaaccagagggggggtgaatggttggtatacccaaaaaccgaaaacttttagcggaaataaaagttaccctcaa

SEQ ID NO: 34746 - DNA, 612 bp, Oryza sativa
tcatgtaggcggcatgaccaaaaactacgccaacaatggtaaccactaagtagccatggggataaggccttttgattgcccatgcgcctgtgcggcacggaatgatagttattgaaatataatgcttatcaattaaaaacactagtaatatgcccgtgctaacgctacggggtgacaattgataactcaaattgaaaaagatataacgtcatagtgacatttgatattttaaaggcattacatttccccatagaaggggtgggattaaggttcaagcaaaaaattacataaagagttaagccagtgataatcacgtggtaccgcacgtgtttcttctggtatgctatacaaaatcaaatgacagtagtcagtaggattcgaatttgtaatttcttcttctaaacaatgaatgttaaaaatcatagtatttatgtaagatgacaatgttatacatgcccattcggagatgaacaagcaacataaattcttacagagtactaaatgattttatttacacactatcgctcacgccatgtaaaaagccaacaggatggtaagatcacccaaatccacatatcacatacactttaatcaatgatggggctgcaggaa

SEQ ID NO: 34747 - DNA, 666 bp, Oryza sativa
  unsure (1)..(666): unsure at all n locations
ggcgttggggctccggtggcgctacggcgacgtcgacgacggcaacttcgcggtgcgcggccgcgcggtgccgctcctcgtggcgctcctcttcgtcctcgtctgcttcgtcgccgtctccctctacctcgactgggcgtgccactgccaccgctacgaccgggacacgacgccgatgcccgccaccaccagctccggcttctcctcgtcgcacgctgcggcgaccgcgccaggttcagcctcatcggtgaccggcctcgacgacgcgacgatagcgagcatgcccgtggcgctgtaccggcccgtggcgtcgactgcaggtgatggcnacgacgtcggcgccgcgcagtgctcgatatgcctcggggagttcgaagagggcgagaaggtgaaggcgctgccgctgtgcgggcacgggttccacccggagtgcgtggacgcgtggctccgctcgcggccgagctgccctctgtgcaggagctcgcttctcccggccgcggccaccaccaaaccggacgtcgccgggagcgatgctgtctgatcatatgcacgcacagggctcgctcggtcgtcgcatgtaaactgcgccgtgcgcccgtacgtgcacattccattgcattgcacccgccggtgcctgggctactggtccgaaggttcaggcggtgg

SEQ ID NO: 34748 - DNA, 648 bp, Oryza sativa
aaaatttggcaacaaactaaatgtagtcactttttttttaactttgccaaaaagttaagtttaaaaatggtagcaaagtgaccaagccttaatattaataccatctcgccaatttgaaagagagggagcagcttaaatactttctccgttccaaaatataagtacttttagacttcgacccggttttcgagatgctactttgaccaacaatatttacaaaattttaaaatgtttaaataaaaaattgcatattatgatagtttgtttaatgataaatctagtaacatcaaatttacattattaatcttttttatttctttgctattaatactcagaatttaaaaagtttgatttggtactattctaaaaatgtttatattttgggacgcagggagtaggagactggcttgcccgaaaggccggaaccttcaacacagggtaagaattctttttgcatgaagcgttgacaaaaaagtagtgtatcgtagtatatgtgtggttcgactgaatgagttgggcctaataccattttcaggtcttgggtgtcacgcttgtcctaagaatttaattttttgaatgccaaaatgcgcttcacgtaacaattttttggatgtagaaaagaatattttttaatggtgacgatggaga

SEQ ID NO: 34749 - DNA, 568 bp, Oryza sativa
aattttttgcggtggcggagtggcgaggccaagaaacggggagaaatcgcacaaaaccacggcgttttccgcatggcccgccacgcggcgcgaaccacatccactgccgcgccacgcctctcggccgccacacgaccgtgcccccatcgcgccgggcttcccgtggaccgcgcccacccgcgccggcctcacgcgcggctgaggctcacgtagcacgggtccacaccaccgaacaacaacccacccctcctgcgctctccatcccatccgcatccctaatttcgcctcggcctcgccacgccgccgcaccatggccgcagccgccgcgtcgtccacgcccctcttctcgccctgctgcgccgccgcgaccgccaagctcggggcggcgtgcccgtcgtcgtacggatcccggcggaggccgtgcacgcgccgtggacgcctctcggtggtggccgtgcagacgggcccgcagaagccatcgccgtcgtcgtcgtcccagcggggacggaatcggagacgctgcagaacctgctgaagagggagtacaagtatgggttcgtgtctgatt

SEQ ID NO: 34750 - DNA, 577 bp, Oryza sativa
tagagttctggtgacatgtgagtaattgttcacccagtagagctgcagcagcttgcaatagcaccttcatttcgcgccaggaggtagccctgaagctcttcacagctttgcttagagattccactgtttcatccgtttaaatagttgtgacaactaagacaaaaagcaacaatgttgagatgaactgtgtttggttctataatatgtttagcacattctttgaacagtatacacagtgatcttgtgttttctaattgaacagactcaatgcattttcattttacatcttggggcagttctgcagaaaaatagcattgaatctgttcatgtaatactgcaaaagagtaaaatatttacatggaagttattgaggtaattctgcaagccaaaaaaaaaaacaattaactggcttatgtgtgagcttttggaagatatgtaggatagatgtactgaaaacccaaaaacacagagttgtctcccttccctgccaagagcacctaagcaccacccaaacccttccgagtttggtttcatatgccaatctactatccatgccagtcatagatgcagaaaaata

SEQ ID NO: 34751 - DNA, 637 bp, Oryza sativa
tatgcaagtttttaaaagagatttcttatatgtctccttctccttctccttgtgtatttataaaagcgaatgaactcaaaaaccgattcaaacacggatttgtatttccaaatgcaaattatgaacttaaaaactaactcaaatatggatgacgtaccaaagtaacagcaaaaacatattcaatttttataatagcagagatatgccctcgttttccatagtacgattcctaaattggtaaaatgtatgtttttttaccaaaattttctataagaaattatattaaaaattcatatcaatccatttaaaaaaattttaggtaacgtttaattaattatgtgtttaataacttgaagttagcatagctcaactgattagattacatttggttaaaccagaacacccggttcaaatactagatttgaaacgagtgttcggttttacggttaattattcttttaaaggtatgttatgcctgtgtgtaccatagtggtacagaaaatgcactgtggctaacccacttatgggtaagctaaacacacctggtgaaccatggagcaatcgtgggcggcacgcacggttgatactctgcacaagacaaaaccaccgaaaaaaaatctctccgatcccgatacta

SEQ ID NO: 34752 - DNA, 595 bp, Oryza sativa
accaacaaataaatgattctacaaattgtcttagacgaatgcaagttctacaaaatattaccatacaagtgttgttatccccttttggcactacctttaggttttcatccatagatctacgttatgtctccccaaaagatctttttgcccttttaaaggcctccattaagataattatgtagaatctccatatgaaaatatgcacatatttttgctattcaattatttatgatattcttaagggtaatttgggaatttattattatggaatttaccaaattctaggggtaaaacgatcctcttagacgacctaacaaagatctatggatggtagttgcaaaaagaaaagaatgcttgtacaatggtattttattgaacttgtgttcattgatggcagttttaagaactggtcgcttatcaatgtcaaaatttagaatttgcctgaaatgttccattagaaaagaagcactaggaaactactcttaaatacttataatggctttgtggaagtctccacggttaatttgatgtccactccctccgtcctcaaatgtaagtattttttaaaagtattttaacaataaagaaaataatt

SEQ ID NO: 34753 - DNA, 667 bp, Oryza sativa
tctccccttcttctcttcctactacagtataccacacaatttttttttaaaaaaacaaagagttacaaaaatttatgtatagaaatactatatacaaaaaatttgaatcgggtatgtaaacttttgacttataaactttgggtctataaattttagatgtataaactttagatgtatataaatactatatatagaaaatatttgaatttaaattcaaatttgaatcggatataattcaaatttaaatttgaatcgggtatgtaaacttttgacttataaactttaggtctataaactttaggtgtataaactttagatgcataaaaatactatatatagaaaatatttgaattcaaattcaaatttgaatcagatataattcaaattcaaatttgaatcgggtatgtaaacttttaacttataaactttggatctataaactttaggtctataaactttagatgtacagaaatactatatataaaaaatattgaattcaaattcaaatttgaatcggatatataaacttttggtctctaaccttatatgtgcaaactttgggtctctaaactttagatgtgtaaacttgaggtgtataaactttaggtacataaatttactaaaataggaaagtaatgcggtgccaaaaaaggaaaccagtagaggg

SEQ ID NO: 34754 - DNA, 601 bp, Oryza sativa
tcattattatgtttgtaaatatagataactcaagttggtgaaaccaatgaatctatctcaaaggaaataaaactcatctcttcctaatgtcgggcgtacctgtgcacgtctcctgtaagcaagatcaggatacatatatctaatctatctttactgatccatatgtaaatatatgtataacaaattacattaatatgaaccaattaaaaggagggctagcttgatggtccattattaaaaataatattttttaagatttgttaaaaaaatcccaaaacattcaatctaaaaagaaaaaagcaccttatttttaatttgaactattagacatgttttctaaacaaactaagtctacctcatttttaaatgatgaagaagaaaataataattacttatagagatgaattaaatattacgtagtatgaagataacaaatacctaatgaaaaatatttgagcaaagccagcaaataaatttatgaagaaaatgtacttctgatccttataagtttttcaaatacgggcttatgatatacttgcccgcgtgaatacgtgagctaccatccttgttgattttaaaagttcaaaccatctttttgtga

SEQ ID NO: 34755 - DNA, 554 bp, Oryza sativa
catatataaacagaatctctctctctctatatatatatatcacagggtgcgcacagcacacgtataactgtacagtgtacacaacactgtacagtacaaccacaactgggagatgtactgtatgcattgcattatgtacgtactctctacgtgcaatctctacgtggttttcataagtacgtatgtatggcgcgcacgtatatacataacgtacacctccggatgcgccggccggcaaccacgtgaatgggccgggtggcccgccagtgtagctgctgccaattgccatcaacctcacaccccctccgctccacttcactgactaacattcagctcccctcccggctgcccgtcgctctcccccgcccccgctccctttccaacgtcccatctcgatccaccccgtcgagcaccgcccagatctctcttcctttttttaccgcgcacccccccccccctcgccgggtgcgcctctactcaccgcccgccgacgatcgatcgcgcgcgagagagagagagctagcttagtttcttgatgctaattaagcttggtc

SEQ ID NO: 34756 - DNA, 584 bp, Oryza sativa
gatccccatatgaggcaacatctacataatggttgtgcgacggttctatattgtggttgtacaaccatagcagctgcagctgccatcaatatagatcttctttatatttttactgtatcagtgggctgcaaattagcgatattgaacatatccataaactacaaggaagaaagaaaaggtggtagtggatatgttgagaagaaatgtataaaataataattgtgattgtgaacgtttagctgataatatatgttgtggagaaaataaaagaaagtcgtcaccctattaattgaactatctctaaaccacacaaaatggaaagtgactatagtactagaaattttacagtgcccgccctagtaagctgggaaattttgttttaccggtgaagtgagactgggccggtcaagagtgagcactaggacattttacatatgcacagtggatgcattcatgtgtcttgcatgctttggactagtatgcatcacactcttgctagctggatggaacttttgcatgaaagcacccttcacctacttttcgttgcatgcacgtgttgcatttcatgacctgagaaattaagg

SEQ ID NO: 34757 - DNA, 586 bp, Oryza sativa
acaaataaatataggctattacaagaccacgaagggtccaaatgacatagagaacaacaaaacgaaaaaggaacacacaatatagagtaatagcccatacccataccaaatatagcccaatcctccttagcctattaaatatgaggtgactaacctcactactactagtcccaacccacaaaacataaaacacactattctcccccttttggcatcaagcaccaaaaaggtcttcactcttgtggaggagaaggaggacgcgccgaagtggaaggatgagaagcatcacggtggcgatgatagacaaaagcttgggtactctccaaggtttggactcgagaatccaatacacccaccctagtatgcaatcttcccaccgaagtattcaagttgcaaacatcggtgcgcaagccacgaacatcctcatgcaatgcttcatgcccggtggataagcgttgaatgctttcacttaaggtattaatagccccaaggacctggttgaagaagtcattgggttgcatttcaaagtaggcatattgtggatggaaaaaaaaacacttggatcatacccttgaagaggaggggg

SEQ ID NO: 34758 - DNA, 584 bp, Oryza sativa
ctttcaaaccgggactaaagatgtttttagtcccttccttaatagtggaggatgtcctcatcattcccaccccctcccttccttaatagtggaggatgtcctcatcattcccacccccttcctccttttaagctaagcaagacgcttcccacctccctctcttccgcccgactttagctttcaaagcgggactaaagatgtttttagtcccttccttaatagtcccctcccttccgcccgactttagctttcaaagcggaactaaaattgtttttagtcccttctttaatagtccttccttaatagtggaggatgtcctcatcattctcaccccccttcctccccctcccttccgcccgactttagctttcaaagcgcttaatagtccttccttaatagtggaggatgtcctcatcattcccacccccccttcctccccctcccttccggccaactttagctttcaaagcgggactaaagatgttttttagtcccttccttaatagcccttccttaatagtgtaggatgtcctcatcattccaccccccttcctccttccaagctaagcaagacgcttcccacc

SEQ ID NO: 34759 - DNA, 678 bp, Oryza sativa
gcatatcgaaaggtgttttagttttatcagaagttaaactttttaaaagatagttaacatataatatcaaataaatacactatcaagacatctttaatagtatatttaaaactaatcagataatgtatatgttgcttttttatataaatatggtcaaagataaaaaaataattctgaaaagataacatattacactggcctctatctaatggtgggagtccgatgtatgagaagactttggtctctgatatttaatagaaaaaaatgttaaaattagcttgtgcgagtttaaatatttaattcatttgttggtgtcctcgatatggttcgtcaattcgcagtgtcatctactaatatattaggacacataaaatgaggttagtagtcgcacatgccgtatattaggacattacggatatggtttcgtaataagggtggttttatgaaataagtattttttgagttttaattaggattgtaagccttgatataaatcatattcgtcatcgagagagaaataactctatgggtaataaatagatgttctagcttttctccgtcatactggtaaaactctgatcgctcataacttaaagcttcctgcaaaaaatgtggcatacattcatccggcatacatagatatatcttgacaaacaaggtgcattcattacgccatat

SEQ ID NO: 34760 - DNA, 2251 bp, Oryza sativa
aaaaaaaaaactaaccgtgtcttgtcgtctattgggccgggtgggccggcgcgtactcgccaattaggattcctgtcagccaagccccggtgaaaacaaatgtcccgcgagtctgagaatgctaattcgcggcgcggcgttgtcggcgtgtacttccggcccacacggcccacgcatacacgcacgattttttttcttttttttcgcaaccgtttctttctttttcttttttttttcttttttcgtagttcgcttccgtacggataggagaaaaaattgttattagtttactagtcattatttttatatttttattagtgattagtttacttagtaatttttaaattttaacttaatttttttttaaatttggactttggacttgaaagtttttaaatctcgagttggaagtttttaaatctcgagttgaaaattttcaaatctcaagttgaaagttttcaaaattttcaaatctggacttgaaagtttttgaatctcgagttaaaaattttcaaatctcaagttgaaagttttcaaaattttcgaatctcgagttgaaaattttcgaatctgagttgaaagttttcaaattttaactttaaaatttaaatcttaaatcaaaagttttcaaatctaacttaaaaaattttcaatctattagtaaaaatatctcaaaaaaatcttcagaatctttcctaattactccatcaatctacttatgatagtcatatgtctaaatctaaaaaagttatttttgatagccatatttcaatccaacaacttatcatcttaatggcttttttggatttaatgtgtgattcttcattcttccacgcaagattggctacatggacatcgaggaatataaatattaatgaatcgcttgtttacgaggaatgactagtagcatatttaaatggataataagtagaatcacttatccttaatttatgtgtcaaagataaaatattactatcaaaaatagatggagagagtattatcattagtgttaagtgttaaataaaggtagttgaggccttaagttaagggggtgtgcacgctagcgcgccagctagccacccccaccgcgagtccgcaactacccaaccccacagcaccgcgtgcccgcgtgcgatggcattcgcgccgcgcgtaggccgcgcgggctgatcagctgatggtccgcgcggggctacgattctgctacgacttcatacgagtctacgaaccagtcgccgcagcccggtaacgatcttggggcaggcttgcacacaggtgcaaagatacgtgtggcagacatccgctcgacggcaaccgcctggcagtggagccaccgtgtcactgtcacctaccaaagctctgcaaggattctaactttccaatagcccgtgagtttacgttttgtcctgatgcatgatgaacagcccatcatcaacgggagaagccaaccaatctatcatggacatgtcgtcctgtgtcgtatggcgtgcagtttgtactttggattacaggtaatattgatctgtacatatactacttttaataatactccagaaactaaatactactagaaaggattttgttcgccttttagtacgtgagggataattatcccttgatgttattggtcggagtaccattgcatcaccatgaatgagaaataataaagaaatgaaaagaggattgcaaaccaaactgggatgctccccgcatatgggttctgcatttagcagcataacatctaaaaagcagataccacaaatattttcaggggactactccaggaccaataggaactagagattactaccatgaagggcacatgcttgcatcgcatgctaaccatctactgtagagtagtaaatacaaaatctccagttctgccaaaaacaaccaactcgagtcaagaaaaaggacagcagtttcatgcaaaagaaaacattaaatagtacatatccgggagatatgcattacttactgcgaatcagctaaatatttccccaatttattaggcatgtattacccccctggaaatataacaaagaaccaactggagtctggagagtattaaaaccaaggcaaggggttccttctcatggcgcacaccattctactcctagtagtgctcctcctttcctccaccaccaccatttccacctccaagagaactcagccaaagttctcggctatcttctactttggcgactccgttctcgacaccggcaacaacaattatatcccaacattggct

SEQ ID NO: 34761 - DNA, 1831 bp, Oryza sativa
atacttgtttttttttatggacgaaaggagttgagaacacccatatatatgtataggactgtagggtcagaatgtgatgcctaggctccagggcatttggtccttgtatgtggtggcatgagtacagcgtgtaattaattatttccatcatggtactacggaacatttcaaaaataacttaggccatgtttaggccatgtttagatcccctggtaaaattttacaccctgtcacatcaaatgtttggacacatgtatggagtagtattaaatatagacgaaaaaataactaattacacagattgcgtacgtgtaaattacgagacgaatcttttaagcctaattgcgctatgatttgacaatgtggtgctacagtaaacatttgcttgatggattaattaggcttaataaattcgtctcacggtttacaggcgaattatgtaatttattttgttattagactacgtttaatacttcaaatgtgtgtttatatatccgatgtgacataccaaaactttacacccctaaatctaaacacaaccttagctgctgtccatttgttctgtatttagaaaagttaaatcgttttatttagctatgtaaacgggaataatagttttagaaaaacttataaatgttctagttacatttagaaaagagttgaaaaatctaaaatcaaatagtacgtagatgggtataattaatgatatcttgaaacaacgaaaatattaaacggttttcctcagctttaagaacagcgaaaatattccatcagctgtatctattccgacacggcgataaactcagatcaatttatgcactagatcacgtttttccctcttatttcaaccagctagcaagtgatgtgagattaaataattgacagcttgcagttagctttccagtgcagctaataacgaatagcgcggcgacggtggcttgtacgtctctgtgcatacgcacagttcgttgtacattcagatccagtagcgcacaagcgaatgcccaatcaccatagattttaaaatcgaaacacaatcatcatgtgatgaagaatccaacgatgccctgtccctggaacacagttcttctccgtaccaaaaaaaggggaatataattagtccacgcgcatgttgtgattataatgcttctaagcatgaatcaaccgcgacatagcaatcagcatactactgtctgcattaattccaaacagaaataggcagctagctagcctcaacacacattcatgaatcatgcacacatctactgttcctttctaccgttgcatgcttctactgtagatagatcgatcggcacagtgcatgaatgatcaaccacaagaaataatatcaatgttcttccaatatagcagtagttaaagcatctgtcttccccccccccccccggccataatgtgttggactctggtcagctagctagcagttggtgcaacacagagatactatatagcaatatatatatatatacatatatatatatatacatatatacatatatgtatatatatatatatatatacatatgtgtgtgtatgtatgtatgtatgtatgtatgtatgtatgtatatatgtgtgtgtatatatgtgtgtgtatgtatgtatgtatgtatatgaaaaatgcttctatacacccaggtgtacatactcctggtttcatccaccgtccgttcgcaactagcagagatcgagtctgctagcggatccacataccacgacccgttttgatttttgcgaggaaaaaaatcatcgtaatatttgtatcccgcacatatcgcgagcatactgaatgctcacataaatatctcgttctca

SEQ ID NO: 34762 - DNA, 646 bp, Oryza sativa
acacgattggtgggcttggtacagaaaatgggccgtgcttcttcagtagaatacttgggttcctattgctcccaactgagctgacgtcggagggatcaaacggatgagatcgtatataacgaatagatcgaacggctcagtaattcaggtgacgtggcctcacagttttgcagctttatagcaatgaatgagttttagtgggtaccaattatataggaagaagggataggataagatgcgcccctaaggtgtctttgttaagaaaaataaatttgtttttctatctgaatgaatttgagattagacttgagatttgataattacatagttcatgcatatacctgtctcgataaactttttgttgactttaggtacattttaggtccaattttaccgcttttcacttatttgttagttctcactaatatttccccttgcgaaaacctcaaaatcaacttaaaattaaatttacgttttaaaatttaaattttggttgcagccaataatagcataattttttttatcaacgtaatagtttctttacgttttaaaatttattgttttactagctatgaattaacccttttgggactaaaaatgtgaagattttcaagtcggtcggtattcaacccacatatatcccgcg

SEQ ID NO: 34763 - DNA, 1142 bp, Oryza sativa
attggctggatatgattgttgtttgtctattgagagaaatgtttccagcttccaagcgtatttcttctggtttacccactaataatatttctctccaattcctaacgatatgttttgttgctgatacttccgtagcaatgtaccatcatttgcattttaacttatcagttgtggccaaaatttacattttaaaacttagttttagttttggaattgattttggagtttgtttatcatagtttatttttcaggtttatttcttaaattgctaaaggattttttcaggtttataggaaaatcaaaggaatttttccttttccaccaagttgtagagagaatgcgggaaaatttcgttccactcatacctcttaaaaaattcatatggattgatttgtgcatacctttatatttctccactttttctattcctatggataaaaattcctccaaaccgaacacatccttaataatttatgaatggaatatttatatatgtattattgtccgtttaaaagctaatactagaaaatagagcatgtttctaaaaagaaaacctaaaattaactttaaaattaagtttctgtattcaatcattagctatttttaataagctagcaagcaataagagacgaatattctacatttcttcaacaagtgctgcactatgcagccatagtacccttagacatctttatgctgatgctcatagccatgaatctagcggagatcaccaatgcatatggtgaaagtgttccatatggatgggacctatatacatggactttaacaataacgattcttaccacgcatataaataaggtagtattagaagaagtagagatagataatattatttattttatatgggtagtcctcgtgcatatggatttctttcgttatttttttatatagactagtttacaatgatataggtggcaaaatgaaatattatattactatgtactacttttgcaccataatgtggatgccctaactttgtgagatggtgatgtctcgagcataagttctgattgttcatccaaaattccaaatacttcccccgtttcacaatgtaagtcattctagcattttccacattcatattgatgcgcaatgtactccctccgtttcacaatgtaagt

SEQ ID NO: 34764 - DNA, 1916 bp, Oryza sativa
tggtatgtccatcccgttttctctcgttttgtatttcttgcagattgatcaaggatctctctttctttttcttacagatcgatcgaggtataagccagcatgaaggtcgccagctgcctcgtgatccatcggcgactcgatcgtcatcaatggcggcgattcgatcgtgatcgatggccacggccatgttgcgtcgacaatgcaggcgcgcagcccatcggcaaagccggaggcgacgaccaatctattggctcactgaaatcatacgggaacggaaaaaagcggcgctggagacatcagacagcacagcaccaagccaccaaccgaagatcatggcatccaacgaatgtatacatcagattatagtaatcacagtatatatgtgcacatcagctcatgtatcgatctggttgcctgcatatacatctctcttcttaattatactccattgaatctcttcctgattatatactactacaagatcaactaatttcatattatttgtcactattacatactactgtgaaaagcgcatatatatgcaacagttaggaattaataaacccaacgagtatagtcgagtatggctagttttggaaatacatgccgcttttctgaatctttgaaaaaagcatgtattttatactactgatacttttgcatcatcaaatcatgaatgcagccagtagcccagtagtctgtactgctacagtgtaaaatcaaaatagataacaaagtatataccgctagtaacttaaaaaatatgttaaaaaaggcatataccgatactaactataaaaaacagtatataccgatactaacttaaaaaaaaaaagataccgacactagtttaaaaagtagcatatactactactaactgaaaatgtagtatatacatgatcagtatatactactatactactaacaaaaaaaaacagtacatactactactaacaaaaaaaaggtatattctccttcaatgagtatacttaaaaaatgagatatatacatctctgatgattattgtagtatatatagtacttattaactaaaaaatagcagataatacttatattaactaaaaaaggtatatacttccaaacaaaaaaaatagtatatatcaaacaaaaaaagtatatactgaccaaattaaaaaatagtatgtgcagtatatatcaaaaacttagtatgtctactgaccaaacaaaaaaacagtatatactcattcagtacggacgtaatatatgctggaaagaaaattaaaaatttgaaagcaaatgcataccaacgttctcgtttgagtgagcacaaaatccggtgtcagctgtgcacatgcatacggtggtttcaaattaataatttcactttaatttggatgctaatggatcatccattaacaaggggaagtacatacacctgagtatacagaagagtcgtcctatatatatatatatatatatcctatatatatatatatatatgtagggtgggggccgcaaataatggcccatatgcacgataatatttatagtgcgacaagacctgacagtatagtgagatttgaaagcaagcaagcatgcacacggggctcctgtgatcgatcgttcgattcaagaggcaaacgaaggaggaggtcgatcgctggcctgccgcaattgcaccgtgggtccaacaaaggcattgcaaagcaaccgggcactaaaaaaacaggcaagaaaaagaaagggcttggggtgttgatggcgcagcggcaggcaaggcatgcaggcgcaagcaggcgccccggcatgcatatgaacagcaacgctacagtgttctacagtagcgccgcgcgcgcgtgagaggaggagaagctagctagctaggggaagggggggagagggcccggcctgcaagggaagcgattcattggcttt

SEQ ID NO: 34765 - DNA, 1635 bp, Oryza sativa
atatgcggtatgacagcatgtacggattgcttttaaatctagagaacaagctagacgaatatatatcatcgacgtacgttggcagacaaatggttcatagagaagttcaatataacgttataaaatgacgtttgttagcatttacttcctccagccaaagtctaagtccagtaagtaattaacacatccaccatgtgacaaaccaataaaatatacacacatgcatgcaaccaataagtcctaagatgacttgttgagttgcagtcaacaatttaatttagcacatatacattacaaataggctttagattttttttaaaaaaaccaaaaaataaaataggtcttaaacttttggatggagaaatatataatataatatatctataaataagaacataaaagaagcacacgaactaccttcttgtgttgtttaacgtactatatattacattatactatatgttcgcattcggtttatcatgaggaaaagaactttgcattcatatgtatgtatatactcccatgttccaaaataaaaagtttctagattctttagcgaaaactaaggtagagggaaaagattcccttttaggctctgttcgtatgtcaatgttcccaactcccctactcgttttccgtgcgcacgtttttcaaactactaaacggtgcattttttgtaaaaagtttatatatgaaagtggcttaaaaaatcatattgattcatttttgaaaaaaaagagcatataattaattaatcatgtactaatagaatgctctgttttctgtgccggagggatggagggatgggttcccaacccagtcaaacaaatagagccttagtcatttcagtggtcaaaatttgaattttgaatttcttaaattttctttctaagcatcttattggcttaaaattatagatttccatgcatgagaatgctaaaaatgtttatattgtgatataaaatgtttatattttgtaacggtgagtacaccagtgcggcttatcataatatgtctgactctaccacttgtactaatttaattaagtagttatcgcgcacactgaaaagttagattaaagcataactgattgtctaatttgtttctaatttgatgagacaaatgtttaaagcaggtatataatagaagtagttattttgtatggatgcagagtaacatttttcttaatcaatgagcacttaaatgagtatttgtagatgtttgtttttgaaagcacttctagtaatatactcactccgtttgaaaatataaggcattcttgtttcccacgaagtcagcgcttggaacttttaactaataactaaactaaatatatagcagtatgtgtttagtttcatgagtgtagtatcactagatatgtatttgagaatatttttctacgatgttaattttgtagttattgataatatattatgagagaactaatggtaaaaaaaaatacaatatggagaacggtgtataaacctaacacgtcttacatttttaaatggaacaagtatttgagtggatgatcaaacgctcaagaaatcgctttaaggcaagttcataaccatttatttccgcttcctcttttatttctcccgtttttattttgtttggttgggctgcaggaat

SEQ ID NO: 34766 - DNA, 1376 bp, Oryza sativa
attcctgcagcccgtattaaggaaaacaagaaccaataaagaaaaggccacaccaaaaaggaaaattaaaaccaatttgacaaagactttttctccaccacatcgcaactatgatcactctatgttattccacatccacataaattctaacgcaagtgaaagagaggacaaacagagaactaagaaaaacctagatgaaccccaattgcatagtgaccttttaaaatcgcaatagacgtatgtcccgaaagatagatctacaaggccgctgaagaaacattggcaaggacacactcgatcccgaattatatttgctcatgtactaccatctgtcaacatgaagcggggagagagagagagagattgttattccaaagaacaccgtcacccccctctctccgcacacaccccaccacatgtccacatgcatgcaatgacgccatggacatgaagcccagacccaatcacacccttatggaaaaaaaatcaccgaggtaagatggctaggggacaacaatagtagatccgtcataaccactgccattgaagacgataagggaaaacaaaatctttatttggaggaaaacctaaacaaactactagatccactagagggtcagatccccttttccttctataatagcaggaagggggcaccagggagacgctagggtttctgggttcggcagtgaaaaaagagagcaaatttcaagtgaaatagtcagcgtcatgttacttttcgcctgtatttttcccccttccgaaatgtagttgagtttaatttggacttgtgttttggtggtaatgtaattcatgccgatatctttgtatagtaattttttcatgaaattagtaaacttttagatcccttttttttttacagatttttcacttatttgatggttttctttagacatttccacttgtcatcataatctattatccaacattgtattttaaaactaagggcctcttcggattacagtattttcaaaggattttttgaggaatactgttgacagggattttttttcctttcctatcattcggaaggcacaaacaggttataggaaaaatctaaggaaagattcctttgctgctgattacaaaggaaaaacacaggaaaaataacatccactccgacctcatttttcttttccttcgcgtaagaccgaggtaatcaagcagtaaacaagaacttttacgaatacagacaaagcaactaagcaagaactctgaaggataggaataagaagcaatccaattagaagaaaaaaaaataaggggaaaaagcaactcgaggttgccagccgctcgagcttgtgatggccatggcggcagctcgcccctgccgcgcggccgtgcgagctccgtct

SEQ ID NO: 34767 - DNA, 693 bp, Oryza sativa
tcctgcagcccacttattagaaatgcttacgtaaaagctgtgctactttatagaggaaataaccaatgttttgaattttgtggaatacatgatagagttgcttcctttgtgagaaaagaaacttgtctgaaaatcttatgatttttgcgggtatcaacactcacatgttggattgctgttgttttatgattttttttccttatgcaaaaccctaaatctgtctttgtgcagcacagtagcagtgatcttgctcttgcttttcacattttggaaagaaacctagaggatgattttgcataggttgaaatgatatttgatagcactgattaacatagtggataatgaatattatgcttttgtgaaatacttgttggagacagcctttcttggttttgtgaaatacttgctggagacagcctttcttggttttgtgaaatacttgctggagacagcattttgtgaaatatttgatagcactgattttgtgaaatacttgttggagacaagcctttttttggtttcatgtcaattagtatattatgccttttcctgtgatgtctgttaacagtttaacttgttgatctataattggcgtatcagtttagctttctgtgtatttgttctaaatttgtgggtgtgtacacagttgcaaacagagttaaagaatcttggaagcccccctggtttcactgt

SEQ ID NO: 34768 - DNA, 699 bp, Oryza sativa
ctataaacatattttaatgagataaaagatgaaagagaaaagaagcgggctacagatctgtagccagctgcagcacggactccaagacgtagtatgtataggataggtgggaccatatataataatatagtaagcaactattgtatgagttggctattagattggctatagatgaattggagctagtagtgggatatactattaaacttgctcttagcccctatacaaaaccaggtattagagacagtttatggccattgtgttgtgctctagaaccaagtcaattacatgactattcaatataattccatccaaatgtagaaatgtataattattacacatattttgggagggaactgaatttatttgcaatttgtcttacacatatcttaactgtgattcagacctcaagagctccatgttttctttctttagtcacatgtctccacatatatatactttgtgagagatgtgactaaagaaagaaagcacagagttctttgggtgaatctctttctgcccaagatggattgacacaatagttatatcctgctgccgcattgcgcaagtttgtgacctgttcagtgttgagaaataagagacgtcttcttaaacttcagttcctatatattgcaaaaataaaaagcaaaccaaaagatatttgagctgatctccaaatttgaaacttcacaatttgtg

SEQ ID NO: 34769 - DNA, 1016 bp, Oryza sativa
ttcatgggctcacccgacttccggctatgtagtgcgccagacattagggtgcacaatagcgtaatgaagagactaacttcacccatgtcgatgattggaacttggaagcaatatacaacacaatgttggattggtgcaatggaaaagacccttttatagagcaaaagttgacatatgtttccagcgtctacattaaattctcagtcaaaagattctgttttaggagaaattaatgttcatccagcaataatttcaatgtacaaatgatttttgatatctgcattaattccagccataattttattagaaaaaaatgtttgcattagttctcacagtggctaacattaatgtctgaatcacatggaactcacaacagacagggtaaccattcgatctggatagaaggccgagataatcatgtgactgtaagataaaaggtgtttttgattattattctgtgatgaacaatttgcacggagattattggttttgttatttagaatttatttacgaagtggttttggagatgattggatttcacaggtgatctacaggtgccgctgtttgtttgaaccggtcagaccgggctgtgtatgccggtcagaccggccagcccgcggtctgaccagccgactctgtgtcggtttcggtttcgggttgtttgtttcgatatccatgattgtttcatgattatggcttctagatggattctatacgtatgtaatactgttgtttgctaacaatgagtcaagttggagatagcttggtctcagaatatggtttctttgtttatttcatgtgtaggtgactcgatgcctcgggagagtatttgcggtgatggaccgggagtcggcttagggctaagacgacgtccgttgtcggtgacatggggccgggggtatcgtgactagaggcttgggtagccgcggtcacccacgtggcctgaccccctcgggggggggggggggcgggcccgagggtgacgtggccactcctccctctgtctccccgagggg

SEQ ID NO: 34770 - DNA, 533 bp, Oryza sativa
tatacgctgaaaaggactcttatcctcattcaactgcatataaagaggaatacagttaaaaagagagataagcaattgggcctttattttgcaaatctcaattaaaccattatagcaggaagctcaaccaataaaaaagaacaagttcaaacataactatgtaagcattctctaagttctctgctaggatgatgccatgctcacaaagttctgtagtacacaactataacgatgacggtcaacatttagtctccctctcatgattttctttcatattgtcccaagatttcagcggcatctatgggataaagtgaacagagtacgcaaccccgtttttgcaatcaaactaagagttcataagctttttctaaacatacaggtactggtgtactttaagacccaactcacaaaaatacggtgtctattccattaactgattcatcaaataaatcttgctgaatagcaaggcatgtaactgtccacgaatgataccccatagcaaataatatgtacggcatagggctgcaggaatt

SEQ ID NO: 34771 - DNA, 793 bp, Oryza sativa
tgaaaatacaattggtcaaccagtcacatcgttcattggctgaggagttcagcacaacttttataaaccaaaggtcacaggttcatggcccggtcaaaattagggttttcagcggataatttgtgtaatttcgaccaccttgagtacactcatagttgatatataggatcaactatttccttctcaagaaaccataaaagattgagtgagtttttgggccacctataggacaaatcataactgttttcactttttcttttagatataatgaactacttacacatgaaccagaatctgctaggaattgccatgaaatagaccatggtcaaccagctatagattaatatatgttatatactgccggttgtaaacaggacaagaagtcaccgggttgacataaagtcccattattaatacttgcatcgtagacatctttgtttatgccatgtagatctgaaactattcaagcaactgaaggatgaaatctttggatatttgaaacaaagatacctcagaacagctgatcttctctcctccagcagttgacataactcaaccttcagccagaccacctgaaataacagaaccaccaccaagtataaagtatcaactatcaatcgtacttaacaaaaaacagcaaaaggaagccaaaaccgatatactaaaacaaatagtattgtgccatgaacaacaaaaggaaaccaaaaccaatattctaaaacaacaaaaggaaaccatcaatagtacatcattctattttctttaaatgataaccaaaacaaatcataacatc

SEQ ID NO: 34772 - DNA, 696 bp, Oryza sativa
attcctgcagccctaaccattcatttttttctaccttattttatcctaagtcttaatttatttcctgtaggatcgaacagaagcaatcaaacctacagagagggggtgaatggtagggaaaaccaaaaaccaaaaacttttagcggaaataaaagttaccctcaaatcgatggaaatctcgacgtagtcctgtcgccgccggtcggattgctcgtatgccgccagtctaaccgccgtcttgtcaccggttgaaccgtcggtatgtcaccggttagaccgccgaacccgatgaaatacaaatcgaagaactctcaaagtagatgacaactttattgcttctctctgtgtttacaaagtgcaacaacagcactccttacaaaaatctcgactaatctcgaaaccctaactaaactatcaactccacgctctgaaaagcgataccgggaggctacctctccctctctatttataccgaaaacctcctactcaaagtaggagaacaactcctagtcacactaggactctatcctcaattaccaaacctaaattgtaattctctcaaactacagccgcacgcatctcctgtaccggctcggtctcggtctccatcgcacgggacgacaccaacttggcctctctaccttgccacatttcccaatcccaatcctacccctcattttccattatccaaacata

SEQ ID NO: 34773 - DNA, 544 bp, Oryza sativa
cctccgattgcccattaattatgtagtagcaattaatctctccatcctcttgcaaacgagtacacctcaactagcactgctacaaaacacatccttaattccttacagttagccaaaatagcttttcacatgcggatggagcgcctgcctagaacaaaaggtatgtgaaaatcaattttcccatacaggtacgtgaagacgactaactgcgaaaatgatttttggtgaaaaaaatgcaaagagaaaagttttttcaaccccagctccgtagaaaaactttccacagaattcacatcaaggggccctaattccccagcaatttttttcccaagaattcacaacatccaacaacacaaaagttcatcacggcagtgatggggttgccactagtagaaaaaactttttttccagctgggccaaaagtagttttttatgcagaactccaacaggtatgcccgaaaaggtatgcaaaaattgctctttttccatgcgggcgacgcacccgcacgcgaaatgggtgcttatgtcaccctcatgcaaaaat

SEQ ID NO: 34774 - DNA, 599 bp, Oryza sativa
  unsure (1)..(599): unsure at all n locations
cgcccgatccgccgccccccgctgggctgttgcctcccccggctatccctctananccggcnnactcccccctcttccgcctccccctcccccctcccacccccaccccaccccaggaccctaattcgtcagccctctaccgggtttgggttcgccggcgccggagaagaagaggtggtcgccggagtttgagaagaagagtacgaatcgcgaagcacatcaagtgatccaaaatttgcaagatttgaggttggatttttctgtcaacagagctttagcaattccgttttagtttactttgacaaggaggttgatagaggaaacatgaaacatttctttattgagatttgaaataaatcaactagaaaaagaaattgtgtggcatctgacccatatgtgtacaacttacatcccactagtgcatgtacactggtggagaaaccatctttcgtcggtcggccgatttccacaatagtcccggatgcaataaaaactggggctaaagatgatctttagtcccggtgggactaaagatcatctttagtcccggttcgaatgctgtcaggacctgtcaggcccccccgggatctttagtcccg

SEQ ID NO: 34775 - DNA, 644 bp, Oryza sativa
atcctgctgggctgggtgaaacggcccagtagtaattattcctcccggaggagaagcccaataacaagacgattccagaaggcccgagagcctcaagtagcccacctcgccgcacgcaacgcaacgcaacggcacaagcacaacaccacttcgagtgtgtttgtcgtctcgcctctgctgcttccttctcctacaagccgccgctccgacctcgccgtcgccggtcgccggccgcctccgcctacaggtgaggaaggttctctccgccgcagcggcctccgctcgacgtctttgctagggttttggggtgatttttcggttgggttgtctcctgatcgcattttgacgcaggtgcggggggtctgtgtgagcagatggcgccgtccaagcagtacgacgaaggcgggcagctccagctcatggatgcagagaggatcgaggaggaggaggagtgcttcgagtccatcgacaagtgtatgtaacgccctccgcctcatttccatcccctcctcccccgtctcgtatcccggcactgcattgcttggctcgtgctcgtgtgcgcgtgtgtgttcgcgcgtgcgagtgctcattctgccttgcgtttcgattggttactcttcacattgtaatttgatgctgatttg

SEQ ID NO: 34776 - DNA, 709 bp, Oryza sativa
tgatgattaatggccggtggtggtggtggtttacttggagtaggagggtggtgcgacgaaatcagccgccgccgtcgccgtcgccgccaccagcggacgaagacgtattaccgttcgaagagtacccgccgccatcgtccgacgaagaggaggaggaggagatcaaccaccccacgccacagacctccaacgaggcggctgacaggcgccctggattactcccggcctcgcgcaaggccatacagggcctgcgtgaggtgacggcggccggcgcgggagaagacgagtgcgccgtgtgcctgcaggatttcgaggcgggcgacaagctcaggatgatgccctgctgccacaccttccaccagcgctgcatcttcgactggctccgcctcagctgcatctgtcctctctgccgccacactctgcccacgcagaatgtggaggacgacaggcttgggcgcgctgcccacacagtggcaggatcaaccggctgatgaaccagccgaaaaggcttctaattttgttccagttcacctgctagaaatcattagcagtaagcagataggtgatttctctgttccaacatttatcttcccatgaatgtaaatctacgaagcatgttgctgtgacggtctactccagatgagcagtactctgaggcatgttatttatcttctctactgaatgtcaaaactataagtgcaatgccatg

SEQ ID NO: 34777 - DNA, 558 bp, Oryza sativa
atatgttaatgaatctagacatatacgtgtgactagattcattaacatctatataaatgttggtaatgctagaaaatcttataacctaaaatagagagaggaagtatcatttaatttgtgaaaggatcgccatgtttgtcttttgcttttgaatttgtcttaacatctagtacctgatagtttccttaaaaaaatctattaacagtgatgtttactcttacatcctccattgtgtcaatatctatagctacatcatgtttgtgcacatgtttgtggtgtttaaattcacatgattccactcaataggggtttaaatcctggtgtggtgtatgccaatattacatatatgagtgtgcataagaatatcttaagaagaacatgtaactgtttttctatttcataacaaattaatagagtgcacaacataacccttaataatcaaagaattttagtgacagtgtaaaaattacattagttgatggtttgaatattataacaacgaggctgtgttcgggaggcgaggttgggaaccttgcctcctgacacggaaaacgaagc

SEQ ID NO: 34778 - DNA, 2800 bp, Oryza sativa
tatgcagtcattttgcccttgtttatggaagaagcaaaacttactagaggcaccaatattattctacttccctctctgtagtcaacagcaaaatacaatatgatctatagtatgatattacaataggaaatctcaagagtatagcaaatgttttctttaaaacaatcttgatcacatttgatttcattttaattttaatggcactggttcatgtacttagacagccccaaaactagtgagccaaaccaaagtataaactgtattttggtgaagggtacactaacgtgggacagcccaactggatattacataggtacacaatgttgttgtgttcgtgtatagtggctatgtacttccatccctcttttcatgctccttccattgctgtgggtgtcaccatatttttgtactttggagtcagtaaagcttcatgtgcggcgggcatactttggactattaaggtttccaatacaacttgaacttaggaatgaccctattatcattttttaatacaatcgtgacttgagttagatgaatgtccaaagagcaactttatatgccttctgcagccaataggtacatggtttagtacaactagtgaatgctcataacgatttccttttcttttatgatcttgactgcccatgatactttgcctgccatttctttgaactgaactatgacttaagttatttcagatacagatgggcatcattgttttccttggtgcaggatacaagatggtgtattctgaaagcatgacggaggatggactgaaggaagcttatttgtgattcccttctggaactaatcacaactgcctaagcaataacaaccatatttgaaaattctgctgcaacactgtatgttatattgttagacttgaacgccaagctgaaattgtattttggcattgccttttttctgagagagacctctctcctcaaatttctgttaaaaatttgttgcacgattaaaattatcatggccaaattttgattttcctgcatgatctagttgcaaactgtgttttacgtttgggtacatttgtctacattttttgaatggaatattggagttcatcgttgaatttgctactgtcataatatatcataatatagtgcatagttcttttcttctcatatacaagttggtttgtgtataatgcaagcatgtccaactgctcaagaagcaattgaggtttgcaagtatttgtggttgacgaatagcattttgcgttcctccgtgaattgttaactccagtctgagaggaaaccggagccttgcaaatgggtcatggagtattgacgatgggatcagaaagtgttaatcaaataccatcggcacttcttggcgtgccagacacatctgttctagaagcagaatcggaatccgttcattccggtcaaatagaaacagagcagtatcttggtgaaaactgctgcatcaatcgataatacaatgttctattttttctgtaactgtcataaacaatgttctggaagaaagcaaatgcgaagaaaaagggaacatgaaatcaaagtttggatttcttttaagctgaaaagaaattcaaagcgtggaaacgaatttgaccgcgtgacgcgtgggatgaagaggagaggagacaagggaaaaaagaaccttctggaggccggtttaggcacggcttttcttttttgtcttgcttcattctaaaataataacttcattttgtcttgtcttctgatttatctaattttaatatatttgtcccttggtttttataatctcgattagaattctcgttactataattgtcctataaatttagtgagatcaaagaatgtattgttgattttcgtcttttaagcatgaattagggggcttctttatagaatgtaagtatggtgttatccgggtagtgatgtgtgtgcgtatgcgtttaccatgtaataaaaaatgtctctaatattataaactcaaatgtaataattacttacaaataactgagaaaaaaaaagtaaattttagaaaaactgtaattatagtgagaaaactattagtttgctgcaacattagcatcatatttcagtttgttgtaattataccgtaggaaatcatcataaaactgtaactttgcgtagtatgtgtaggtgataacagtaagcttgggccacgtaaaagtatagttttgtaataattttgtataatatcattgcaacaaaccgaaaataggttattaatattgctgcaaactgatagttttgcactatagttatagtttttttgaaatttaaaaaaaaaaagatctactatacaccctccgtttaaaaataagttcattcgtaggaatttatatacaacgtttgacctttttcttatttaaaaattatttatgataagtattttgttgccattagacaataaaatacgaataattactttatgtataaattatgttttttaaatattttttataaaatatttaaataagtctagtggttaaacgttagatataaaaaccaaagtgaagatgtttttgaaccgagcgagtagatccaaacgccatcattccctggtgcggccgaaaccggtggtggtggtggaggggaccggtccaaacccgcggatgtcagcatccaccgtttcgcatcgcggattaactgtgttgctggaggcaggcaaggcatatgctgcgattccacgtttttttcttctcccaaataaaaaggcgtcttcgttattgtattggattccagagtgtgaaagctaggaacacacaacccacacgcctcgctgcctcgattgattgattgat

SEQ ID NO: 34779 - DNA, 1143 bp, Oryza sativa
atttatcttgttttgcgttgttttccaggattcttccatgcagaaaagcctatatttatcacatatgctgccttccaaatctttttttttccttctgatatgtcattagtatgttctggtttcgaactaattgtcattcaatactgtaaaataaagaaaacgtttagtgaccggccgtctaccagctcaaatgggaagggacggtttcttttgtctttttttttttattcagcaccaatttttcatgatttcaggaggtattccgttcaagtgaactagagtcgatgctttcaaaaatgttaacttttatttgttttgcagaaattgcgttaattagcaagccataaactcatacagcatagaagttcactccaggctgcaaaaatcaaaggccttgattaatggagattgagatcatagaagttcactccaggctagttctgttgcctttcgtttcacagtttgttgctgcgagacaacattgatagtactatttaacagtatatttctaattatttgacgaaacccgctcttttgatctgcaggatgaatgaagctgtcatattcagcagagttttttgtcaggtcgtcgtccatcgtcctcgacttctgttacggttttattcagggaaatttacacttgaatataatcagtatgggccgtcaatccatccgtatcctgctgcatcccttcgcgacggaccttcagtgatgaaagcgtattttgctattttctgccaggaatttaagttcatagttaagagaagattcaattttgttacataatgctaggtctaaaatgttagattccacatcttgtggtataagtttttatccccaaattcttcatcatgttttaacttctattctctacaaaattctatgcatgtgttctatgtaacacatccttcataattggtccttgaccacttaatttagaatatatattgtctatagcatatccttatttaatagtaatagctaatttacatttaatggaatttgtttaaggcatgtttgctgcgcggcgtgctgcctcatatgttgcacctatacactgtatttctatacaacattaatcaaactcacactctctgcatagaagttgaaagaagaaattaaattcattagaagatatttgtg

SEQ ID NO: 34780 - DNA, 1231 bp, Oryza sativa
tttttaaaaatagtattttctatagtagaaaaacaaaatttattactctacaaatatggtaaacaaacatacaataaaaacatatgatttaaaaatatatgttttcagctgctcaggcattcttcttattagtgaggctttaaaaagtcgatctaacaataataatatatagtcactttctattttatttatgcatgcccagtgaggtagtacaagatgaaataatatataaaataatatatagtcactttatttttataactttttatacatgtttgaatgacattcaaggaatagtaaatagaatttagaagaatatacatttcacaagtgaaatagacaacatatgtcaaattctaattgtggtttttatcataaataacataatggtccaaatagataaaaaataaacgtatgatttaaaagtttaaaattatgatgatataaaatatatcgttacaaataaatatataatttagaaggatgtagtaatttaaaaattattgttgcaaatattttcataaagagaaaaagggagaaaaagtaatcaagaggataaacttcctacaaacccttttaatttaccacaagtaccatataaacgctcatataccatcatgtgacgctctaataaatcatagaaattataagaaaaaagaaaaatattcgaccatcgattttcatttaatctggtggacctattattttcaaccattaaatctatcttaaaaattactaattaaatttatcaataaaaaggcccacgtcataatgccactatcgtccaatatacatgcacataggtacgtagatattcctccttaaaaaaagtatgtacctacatacagtacatacacatgtatttctccgtaagaaaaaaaaatatgtacttatgtacggtatgtacacacgtcgggtcccacatccttattttttcttttttttctcatttagacttgatggaaaaccaaactaataattaaacccatattaactatgctttaagttgtaaaacaatatatgctatttcgagttgtattccaattaggcgcatgtcatcgaaacataaaaaaacataaataaattaaaagtatagattatatggttgttaaattagacttacattttccaaaataaaaacaacttcaactgtgggtagaatttcaaaaattattcactccctattgtaaaaaatacttatatggaaaaaggattttactaaatttatcac

SEQ ID NO: 34781 - DNA, 3315 bp, Oryza sativa
ccatctccaaaataacatagggacccacatgtcagcctctgctagccccttcttcttccttctatttcttcctctcttcctcttctcttttcctgttagggcagtggacgagccggcgacgggaggcggtagcaaggaagcgggacggcgtagcggcagctgccggcggtaggaatgacccaacagaaggcagtggcgccaaggacggcgtcgatagggaagacggcggacacggagcggtgaatcaacgcaggtggcagacgtgggacggcgagcgacgatggtaggagagaggctggcggcgccgaacgcaaggccaaatccgcacaggggcggaagcaccgaaggcctctagacgacagcggctagcgacgacgacctcggcgaagacggtagcggatggcaacctcgatagcagcaacggatggagacggctcagacgacggctggtgacagcggtgtcaggcgatggcgacctcggtagcagcattggatggcgatggcgacctcgacgatgaaggtagtggtggcgctcatgtatttgggtttggcaacctggtttggccagccggatgacttggccatccggttggcaaggctactggagggcattttttctatcaaactagccaaattttagcttggatagtccattggagagtctgttagagatgctctaagtggtgatctgcatatgatgcaggaataagttcactttactttcctcaacttaaagtccggtttgaatttcatacttcatccacaattccagatataatatgttgctcaacttacaataccaatatatactttatgtcccaagacaatatactctcaggttttggctgacatggcggatgagtcaacgtgggacccacatgtcaatggctcaaacattttcccctctctccctctcttcccatctctctccaggcctccatgctccacggatatgttgcgtttgagataatatggacttctcttgaaaattgtattaattaagtataatctgtctggttatacctggtgtaataatttacacaaattacaatattgctatttgtatttttaagattgaatcgcacaaacttgcatcacggtagatcctattgagtttcttttatgagtttttttatagtccatcagatttttggtacctcccggtacctgcaatcagagccatccatcgagccagatccaacggattaaaatcctcgttactgcgcggtacccaagtcccctcgatggtacctcctcctccgcccgtagagaaaattgtgattttgctatcgcaaaagaatggtttcgctggaatactatcccttcaaagtgattcattaaaatgctatcctaaactaggggtgttcactgaaatgctattttggatctttttgttagtactaatgtttttactctcttttattttttctccggaccaaaatgccctcgcctctatgtcctcctttcgcccaggataatggcaggttgacacatgctttgattgctctagcaaaatatattgctatatatttgtgaaacctatgcacgcctcatgctccgccgcgtgatatgtatatactaattgatcattaacactaatacaaagctccagtacactggtttgaaagtcaaacaacacctctttggttttgacacatgttgtgctagagcaatatattttgctttcacatttgtacaataaaaatggtgtgtagtccagttcagccacaagcgcgcatacacatcaagatataatggagaagctagcttaacccataaattttgggcatgaaaaaattgtaaaaacaaaataaaacaaatttggacagcatgtagacataatattgaatagcatgtggttcacaaaatacctcacataacaatggttcacaacataacagtggtcacaatataacagtggttcacatgcaccatggttcacaacatgatagtggttcacatgcaccatggttcacaaaagacctcaaatatcagtgcctcacatgcaccaccaacaaaggtggttcacatacaccaacatggttcacatacaccaccatggttcacaaaatacctcttataacagtgcctcacatgcacagcacacaatcaagtaggcttcattttcttgggtgtgagcttctttgtacatgtcctctttgatggagccggctgtgagcttgattcagcaatattcaacctccttttacatgtcacttgtgaagcaagtgccggttgtgagcttgtccctccttgttccattaacattgcaagccggctacaaggaaattgttgttgttaagcaaaaatacatctaggttaatgtaattgtagttggttgtactaactgtcttgtcacaactgttgggctttcttgaataatggtttctacagtaggcctagttggggtatgtggtataggagcaggagcagcatgagcagcaggagcatcaggagcatcaggagtaggggcataaaccacatcaggaccattaggagcaggggcataaaccacatctatctaaccccttacttccagcaaatcaatcgtgcaatcatgtcactgaaaaaaaaatagagaagtgcatacctcccaacaatctgtagccaggtggagtcatccatggagtcaaaccctaaccacacgttgagggagtggagggcgggaagagctgaccgaggggcagcggctgatgggggtggcggcggtggcggcggatgggggtggcggtggcggcggaggcggatgggggcgggggaggcggataggggcggcggcgctgactgggggaggacgaggtgagggagtggcaggggcgggggccggcgccggcgccggagatgaagccgatgcggaggcacgctgctgtcgcctctgccgatgccgctcccagcttctccatcagtcaacaccggtgctggacggctggagagatcgattcgaactggtgataaggacacaagggtattttggtcagaacaaaacttaaaatagagtaaaatcatttctagcaaacaaaaagatccaaaatagcatttcagtgaacaccccttagtttaggatagcattttaatgaatcactttgaagggatagtattccagcgaaaccattcttttgcgatagcaaaatcacaattttctcccgcccgcacgccctaaacaagtggaggggtaaaactgggttttcgcatggtccgttctcgctgagtccacaccgctcatctggtcctccccgacgcccgcaagccgattctcccgatctcctccccttgaggcacctcctctgcatccgtcctccatggtggaggcgtggc

SEQ ID NO: 34782 - DNA, 614 bp, Oryza sativa
tgtgatatcaacacacgctccttcccccggtcttttagttgcaatttcccttttagtagcaatttccctttcatttacagatgaaagtttgagacattgaattgattatttttttataattcagataaaagtttgaggctacatttgataatgattttttagttaactgttgtatgattgagtatagagtttttgattttttttaatgaaagttttagattttgaattgagattattttaattcatgatgaaagtttgaggtcaaaattgaaagtttgtagagtttaaagttgtatgattggagttgaaagttttgcatgaaaacactactaaaagagggaaaaaaaggggaaggagtatgggcggcaaagacacctacgctaggttttcaacaatccgcttggtttaattaggtatcacacttacttgaaaaaaaaagggtttcactcctatttcacgcaagtgtcataactttaattcatgtgtatcacctatggtatcgtgaactatcatggtgtttccccatgaaatttcatggttttacctggtaatatcattgttttatgcatatattatctgtatcatcaatgttttaaagaagagtcattagtatt

SEQ ID NO: 34783 - DNA, 747 bp, Oryza sativa
cactttatgcctgcttggagccttggagcaaaataaattttcatgccattagcagatgatctacgaagttttatgcttggaaagggggttccgggagaaaacctttactctatgtacttgctgtaactgttatttttttagtagttaacatggacgtatcaaatgttaaaccacctgttgagtctgagccaaacaactgtggttttgtagtccaggatgctgcattcactggatatgtctcagatgatttcataatatttcacttgtaatgcacctttctgttaaagctcttaaatttcttgccactaattgaccagggatgggtatgcacttgcttcaggtggtagttagcaacatttctgctgatctggatgataattctggcaacagcctattcgttatgagttcagctccaataggaggaataaatcagtcttcattagaaagatcttccagcaacaatcaggcattgcatgggaaaagctcaattgctgggagccctgaacctacatgcattagaaaatcaatgtcttcactgtgtgtcaaaatagcagcactggaaacatttgaagtacttctgactctggtatgtgtataactgtatatttacgcattcttttgcttaagcaatcacttctcatgcttaagcgaaatagatttcttttactaatacattgtagttaaacaagagtgcataactgtctaattcacctatttggctcctcaactagattattgtaaccaaat

SEQ ID NO: 34784 - DNA, 735 bp, Oryza sativa
ggttacgtggatgagtaggacacgcactccactcgcctcgtattgagcatctgagagagatagagacagtgtgaagagatgacacgtgggcccattaattatttttattatttttttctgatcggattgccacgtggacgccacatagatgtaaaaccactccagtttgtattaggggggtaatttatccggtttagaaagtttagggtgtaaaatgtccggttttgtggttcggggggataattcgtactgtcacgatagttcaggggggtaattcgtactttttcccacttagatttgaaaagtattcttgataagatcacaaagtccagcaccctgcaccattactcgaaatctcaagacaaattccagatcccattcacagtatagaacaggtttgggcttgtatcatcttggccacaaaagaaagattgagattaatgatctaatttgcttttttccaaaggagaaattttaattgtcttcaatggcaagggcctttttggctgggttccaaactgtattttctccaaaccagaaactgatgcaaatgggtggtattagaagtagatattttcttatgcgatgacttgcagagattttttgattgatttggtaaattgtgctggtagaaaaaaaaatggccatgatccctttatcaaataaaagaagaattattgggtctgtgagcacagatcaaaccactcaacatgaatgggtcttttgcagatgtgt

SEQ ID NO: 34785 - DNA, 714 bp, Oryza sativa
tctacttcgtactaaaatgatccaaatggatttggggaagactgcaaattgtgcgttcgatttctgaaaatttaggcgttgtttcaccacttctatgtaaattattttattacttttaaatgtatcaactaattacacattaaaaaaatatcgcccttaaatcaataaccactacattaaacattaaacccaattaccaaaatatcgaaaatattgaatgtgcaacgagtcgtataaatattggcttctcacacacggatcattaaatttgaacggttgattttttttctttaacatataatcctatggcctctttcaaattaatcaaaatgaatacaaccgtataattgtataattgagcaaatactttagggaaaaattagaacatactaatagggtacttggatggatcaaaagcatgggtgtcagcttctagccttccacagaccacagctaacacgctggatccggcaggtggcaattatggtggaaagaccgcttctcaatcactccacaaattttctctaaaattactctgaattgggccatctatctatctattatatactaaaaatccattaaactttatataaacgcttctaaaccaccatatggtatcctataaaagctcctaagctaccacatggcactctcataaatcggtggacccactatttttaactattaaatttctttttagaaaaaaaataaaac

SEQ ID NO: 34786 - DNA, 718 bp, Oryza sativa
tttagttgtaataattgatacttcgacgactttggttatcggagataagacccgatcagagcatgttctctcttagatcgggttcttatttaccgtagaataaaatatgataaaaaccacgtaattaacttcaaaattaagcactaaaatttaaaatttaacttataagcaaaactctaaccgaaaatgatggggatgaacgtgttttagtgcccgcctgctctctgtgattaaaagagaagtgggcttgctacccagcgcagctttgtcgttggcaccgtagcccgtgggtctacctacattcacctaacagggctcagcccatgcgatgcaactgaacgtacggtacgtactgattcctgaatattgtaggagtaggagcctaggaggcctcgttcgatgtgttcgaatgattctattttctgttaacacgttactaaatgatgtattcgatgtgaaaattttttttatataaattcctttaaaatatcaaacaaatctattatttagatttataattgttaaaactcaattgatcatgtgctaattgatttttcattttccgttttctggctacatcttcatcttcgtagagaaacgaagaacaccactccactcgttgatatacgataggatggtattttgtgtaatttcggcttatggtggaattataatgcccaaacaacgcgctccatttctccatttctttttagccgat

SEQ ID NO: 34787 - DNA, 745 bp, Oryza sativa
tacgtatgattgttcaaattttatgatactgtaggaatctaaccttgttactatgattcagtaatattatcatagatgggtagtaacatgctatgttactttaaaatttataggtcgttactgcacttttggtaatagcacataataaatattgcaataacagagaaaatgtaataataccagtgatgctataatagtaatgcttgtgcagatatagaaactttaaagtcccaatcttcaaagagcaatatttcttacataatatcttatttttctaatccatttgcaccataatgttcataaaaaaatatttaatgaaactagatctatcgtgactatattttgacgtcattactacgaaaagcacatgtgttactgcatactgaccgtcacgttactacgtaatttctacatgatgagggcaacaaagaggttaaattgggttgagccagtaagttcgagctctgcaatctatttttcctatatagttggttcccactacaagaataactcctataaagctgtctccaggttaagccacgttatcatcaccttacagccgttggatcaagtgccatctttgttcgattcatagacctgatagaaactcaaccagtccaaagtccacccagacacgatgaggaattgctagcgttggatcagcttgcagtgagttagaaaaatggagcgttttctgtgcgtcaaatttaggaaactgattaaggtgactgaggagcccatctta

SEQ ID NO: 34788 - DNA, 512 bp, Oryza sativa
tattacaatgcatattcaaaacaagtaaaatcacaaacaataattagttggtcttttgtcaagttcttgaatttttttttcttcttctatcttgtcgttgataatgactaaggatgaaatataactggtttctttcatcgaactgttaataatgactacgggttagatatagaagttccttgctgtagaggccactaaaggaatagtttacatcatcaatgttgtttgattatttgaatgctagaaataaaataaattaattatatgtcctaggttcagctcaaagcatatgttattggatttgtttccattatacgaaaacggtcaaagcgtgcctcttaggctgtaattttgctgtatatttgtgttgagttgcatcaactgcctttggtcattgaaaaacataagctgaatgaggaagagagaataatacttttatacttcaacactccccaatgctatacgtacaagcaactcatagaagtgggctgtgtttttttatttaactatga

SEQ ID NO: 34789 - DNA, 673 bp, Oryza sativa
tgtggtacacttcgctgtctaaccgtaaactagtgcccctttggcttttgagattggagtgggttttgatggtttgaagttcgataatttgacttccactcattttacctaccattcacccaccctctagtacaatttgttctcgcgtttcaatcgtacaagtggtacgagaggcacgtttttgctctctttcgattagccatgggcaattggttttgaaccaagcctcatgtttttttatggagttgatttcagttttggaaacaaaagatgcaatcttatattatgtgtcaggtcttgatgtttagcaaaacattcttagaggttatattatcctggatgcctctgatagtacaagtaaagttgattttgaagataactgcaaagctctcaacttgatattgagtggtgtctcatgctctgatattgatcaaatttctcaccatcaaactgtgcatgtgatgtgaaaggcctatgtgactttcattaaaagtttcctccacaatcaaggagatacctaataacttaaagatgtttttataaacgatcacatgaaattttagaaaaaaccttgttaacggtaaaatttggcatgttccattggtaaggagaacgaagcaaagtcgatggcatgattttgggatctaaggtcaaaaggttaaattggctaaga

SEQ ID NO: 34790 - DNA, 630 bp, Oryza sativa
ccccttgtgttattattgtagcaccttatctcctcacaaagaacattgcaaatagatcacatgcaacaatatgtatagttgaaaatgatatttttgattcaaaacataatctctcaatcatttcttgtagtattcctgtgtttattatgtgacattccccatcatgtgcatttatctatatgatcgacttaagtttaactaaagattgaccatctaacagcttataaaagcagcaagacaatgtttatgcatgtgagtaacttggtgaatggtgatgttgttactttacctgtagactaaagcacggtaaccttttaatgtaacattacgatgataatgctagtcgtggtgtcttcggtgtatggtagatcattgttgtggcatctaacccattcattcacacttccctgaaatattagcatatagaaatatatttcaaatgaatgctcatacatttgatgtaaaattgcaaacaagaagtcatctatcgaaatgaaaaaggttcctcaaatttaccttcttgattccgagagtttcttgggtgttattattggttgcccaaaagtatgataagtagttggcataggtctgcaatgggaataattcaacctaattctggccagattgatg

SEQ ID NO: 34791 - DNA, 1029 bp, Oryza sativa
ggattaacttcagtgtacgtccaaagcttctgattcagggcatgccacttggttcacttccgcaaccaacaagatatacaatagtaaaatttataagatgatagccgatcggccgatcggccgataggccgatgttgtatcgtatcagttgatgaacaaaataatcagctacaagcatgaaggatactgtacataaattagatttagattgaatataattataaataacttttctttaataaaaccaatcctataggtcaaacccaatcgatgaagcataagattaataaagtttaaagtcggccataatataattatataacctaaattactagccaatggaaagatgcttgtagattagacctaaaatacatgcgatcggttgtagaggtaaatgtcatgcatttactaattctatcattttcttaaatacaagcaattacaatagatcgggccgagacaacattaattgcttataactaagagtacgtaaattaataactatatggatttatatcgtagccgatgaagtaacttaggtgattaaagataacatatcggatgtagctctgatacaaccttatataagagtattgtttcaattaaatctactaacaagtttcaatcccagtagatcggacctagccaagatagtgtgagattagttaaaggctttatagattaaaatgtttgatatacttgtataagatgatagatatagcaaattaagtaaaagacagcgagtaatctaaaataaaaatagttatattaggtatgaccagctgaaagtccaatgctatcgttattggcaatccaagagcaagttaggtcttacaatttcaattacaacgtagtaggtcaaacctaactaatgcaacatcaagttataatggaagtcgtaaggtctaagcaaacctttgattgtttctcagggtggtagatacactaaacaatctaaatcgacgagagcaatttagacgatatcggctatatctaggttgaaccagtcgatatagataaataacattg

SEQ ID NO: 34792 - DNA, 606 bp, Oryza sativa
gtgtctcctccgtccgccggcctcaacaggcgacgtcatcatcatcgtggcatcaacaccgtcagtgtcgtcatcgcgtcaacgagaaggggagccagcggccggatgcgagccgtcatcatcacccgtcgtgatcggtggcggagccgcgagaaggcaagccagcggtgaagaaggcgagccgtcgtcgtcgttcgtcgtggccggcagcggagggggcgaggagcggaatcggccggcgcaggcggcgaggagggaagccggcagcggagcaggagagccgttgtcgtcgctcctagtggccggcagcggagggggcgaggagggaagcggccagcggaggtggtgaggagacgagcctacgccgccgctcgtcgcgcacacaccgctccttctcggagccgccaccgctcgttggtgtcgacggcgacgccaacgccgacgccgacgctgctgctgacgccctgccgcggccttgctgagttgagttgaagataatatgcgagatggagaggagagggtgagtggtggggcggggttgagttgaagataagattgagtacttgagtctgtgacttagatatttttcggtggaggtatgatttt

SEQ ID NO: 34793 - DNA, 2234 bp, Oryza sativa
aaccacattttaattatagatggaatgagcatttgcatatttctaagcatggctaagcaagtaattgcacatagagcatatataaatccatttgagcacaaagagtgtactctaaccatttctaggggttcaaacagcaagaggatcaattattcaaggtggaatatgcagcaaataggtcataactaccttaacccaatttcaaataccgatatagtctgagttcacatgcaactttgcaaacaaatattttcattcctcaaatcatgggattcaatgtgttcaaaggatgggaggagaaaacttgccttgatcagagaattgttagcacctaatccacttcttcaccgattatgcaattatctagataaaggacacgatatgcaattaaacaccgaaagagctgaaaatccaaaatgctctaaaatgcatgatttatgcacagtgggttggtactgatctaaaatgaatttaggtgaaagaatttttattttatcttattccattagggagttatgaatttttagaagttttatcggtttatagtagtatagtcttaggtagtgttatgaaatacttttgtaaagtgatttttattagattagacttcacaggggtgtgaagatgtgttttctaagactaacacatttggtttcacaatttttggagttataatgattttcttatagattttacaagttacaacgtgttttaggcatatagtgttttatatgtgcatgacttttgagtgataggttcagaacatgctacttcctgtttaagttgaataaaaggaataatttggttaactaaaacatttttagttcacatgtttatgatctttactagtatggttcatattttataaactagagatgctctaatctaaactagcaatatattatattaacctagaaattgttatatgagctaagttcttctaattttagtggatgaggatggaactatggattcactggtcaattaagtttttatttaggtttaattagacctaaagtgtatatatatacttatacatgtttatgtattacttaaacaacactatgtgtttaaattcttatttcactaagttaaggttttaatcaatgttctctacaaaaggtgccaaattttattttactatattgaagataactatttgctggttctatagaaactttgttcatttcatttggactaaaaataaattttctacaagttttacaaattaaaggctgctctatgttagtaaatccttatatgaatatttagagactttttctacacagtaagtatataatcttatttcataacttggaaatacatattttagcgatcctacagaacttaagtttattcaaattgaagctaaattgggttctacatgaatttctaaagtttagcttatctaaaactaatcattatagagataatagttttagaggcatttgatgcaaagtaagtcattacttttatttaacctaatcagagagtgtctgatgatgaatctgcagtttttgagtttgtttcaaaatgagttgaaatgaattttctatgtattttataagtttgtacatgttttatgcatgacttatcttagataaatcttagagacattatttgtacagtgagtgtcaagttttatattcctggaataaagttcataacttcaagaatctacagcaactggaatcacttcaaaatgagctatatttgattttatatagattttacaactttgtgcatttttctgctaaacatataattgtttgggcattttcctaatttttcttcagattttaaaggatgggtccacatggctgtgagggaccaatatgcacaaaggcccttgagttttctaggaatcaacccgcagtcctaggcccatatgtcagttactaacattttacgcaaaaacccctggtttctcgggaaatagatcccgcagtcccctagttttaggtttgtatgcaaaacgatgcttgagttttagtttatttacagattattactggtcctacttgtaagtgactgttccagttgttaatacatccctgggagtctttaaatttcaaaagccatgcccttgctctggacagagcagagcagcagcacagccgcgagcttcacagcatcaccagtggcgaacaacggcgattcagcttaagctcccaaaacaaaaagtgtagagaacaacccgcgaacctattggctcaccaagaatcaagaaccgt

SEQ ID NO: 34794 - DNA, 664 bp, Oryza sativa
tgtttacttttagccgtaacaattagtctggttttctgtactaatttaaattgctttgctatccatgaacaaatatgaataaaaggagtttagtatctatttgaaaagattctgcacagatacaatttatttaaactcatattctatcatagtaatgaaatataattgctttgcttatgacttgtacttcattatggaatttctatccccaacggagtactctagatgatcaatggtgaaatgataaatgaaatgataaagagaataatcgactcttctccaacaaatgaactatcaacctcccaaaaaaattaattaatatattagattagctatctatttttccataacaaaataactatatattaactgaataaaatattgcaatgaaaaaattatttagtaattatagaattctttagtagttaggggatctttttcttctattggtgtctattagtttgtgtttgcttagcttcgtttctgctattgtgaacttttctgtgtgacttatgtaataaatgtgtgtaactctttgagtaaacgctaggatgtttcattgaaaaaagtaattataacccgcaaaaaaagaaaaaagcaattatagaattcttgtatttctgcttcgactttgataccaaattaaataaagaaaaaaatgaag

SEQ ID NO: 34795 - DNA, 554 bp, Oryza sativa
caagcttgtatagtttttcgcgttgagcttggttatcatgcttccatgtatggcttggccgggcagtttaggatagttggttgtgagtccttgtagctatgattttcagtcggttttccttaattaatatctcatcacattgctgcgggaaattaagttgcataatatgtataaatcaaatacaatatgattattaaaactaaaacaaattgatacttatgaattttaagtccaaaaataattgatattgcatgttttatgagagaagaaaaaagagatgatttgaaccaaagatctatcacccaaaaactataaataattggggtgatgtggcttagtgagaaaagagagaaataacattaactaattcttagtggggatgaacatataggattctgcatcatttctccttgaagcacaatattatatattatataaaaaaataagcttgcaatgggtcggctgtcattaaaaaaaatcagatcagaactatttttttaaagtatttatcattaactggaacatgtttatgtttgataatagattgttagaaa

SEQ ID NO: 34796 - DNA, 554 bp, Oryza sativa
tcaggaccttagatactactcagatcactgcaaccactagattacatgccctttcacggcagcataactacttaatatctccggggattaagaaaatcgatgtgcatgcagccctgcccagatatatgtggcgttgagcgctgctacgtcctgccattgccaacatcagcgaatacgttgggttcggcctacctgtgttgacgaacggtgtcgcctaatgcctcgtgctggctcactgtgcaattaagactttctcgcagtcaattatccaatccataatgcgattgtgacgatcgatctcgcagtgtacttttgtggtattaagttacatgcatcaattaattcaacacagaaactttagttgatgtgaaacaaatttgctatatatttggctataaaaactcctccaaaaatttgacaaatgtaattatagtataatcacagtgtaattacactgtaacttctatgtaactttcaaaaatctctccgtaacatgttatttcggaaaaatggaggtcgtgggaacaaatcctttcacatatatgcgtgctatg

SEQ ID NO: 34797 - DNA, 630 bp, Oryza sativa
  unsure (1)..(630): unsure at all n locations
tttagctagtggaaagtagaaagattgaactagggatggtctaacatgaaactaagtgcaattcactcttaaaaaaaggcaaaatctacagtgagaagatttgttgagcggtttggtgcaacattttgatgcagttgtttgtttaggtgtcacatgtatgtcgtcgtatatagttttttaagccacaaattctactggctattctcatgctatttctgttttaaattaactttattttttaatctatgttacaattaccaatataagatttagaagattaaaatatcttttactttattaattttcagtacttttgtctttaactttatcaagtccaagcccaccacgtttatcgccaactttaacaagtcctaatattttgattatttaaaaataaagtctttatgagttaaattggtgaaggaagagatgaagttattttgagataaaaaagtacctcgtattatttagtctcgtcatgtctaagatatggcccgggtatggcatatttcaacgttgaaccaaacctcccattataagtgcaagccaacgattgatcaccgtncaaatgcacatggcatatgaatgctcgtaatggcccgtcgtatatgacggataagttcatgcttt

SEQ ID NO: 34798 - DNA, 522 bp, Oryza sativa
tacgtgttaattactagacgaatcttttaagtttaattgctccatgaattgacaatggggggttacaataaatatttactaatgatggattaattaggtttaataaattcatctacctgtttacaatctgaatatgcaatttttttggctattacactactgttaatactataaatatgtgtctgtagtccgatgttacacgctaaaacttttttttttaacattcagactgtcgccgatgatttatattaaaagaatatattctgtttaaagaagaacatacctaaacttttcaaccctgtgacaaaaccgggccaaagaagatagcttctgaaaagatgagcatctgtcatgtgcacacactgcaaacgcacgcctagtttggtagtggtagctcaacgaataaatgacggacatgtattttcatcgtcgattggacgtcaccacttttttatatatcatctaaataaaaatttttttaaataataaattttatatactttatccgcctcatattaaaaa

SEQ ID NO: 34799 - DNA, 1379 bp, Oryza sativa
ccgattaaaataagggtatctgttctagtgttaataaatattcactcaactccttgattgctttgaagctttatagcatagggtacaaataagccttacatgtgtgttgagattaggtgctcgttatatagtcctttttaggcttccaagtttcccaattttttcatttacagcagaaaaggcctgctttgcctatttgtcaaaacaaaggatctgatcaatattttctcagatggagtagccaccagtttgggtagaaccatggatgcgttttgaaatcacgaactgcctaatagaataggtatcctcccaattaaagaattgatggtattcatatttaatgtacaagttgccatgtgccaaattgtggtaggctttccggccttccattatatttgagagatgaagtgaataattcaagtcatcaaacaagcataatgaaacatccgacacctcgagagaggaatattggagacattgctgggcccttagcctgccattcaacttcagcctgagatgtgcccgtcaaaccactctaaggcggcgaccagatgtgttacacattcaggagacttgacaaaaatggctaaagatctacaacctctcaaatattcctaactcatactcatgtgaatctagttcccaggatgtgcactagattcacactttcatcttaagcatgattatacatagcaaacacaactaagatgaaagaaacttaagacttacaataacttaataattacataggccaaccggccaaatagacttattagagaacagcggaagcttgactacccaatcacaagcacaccgactaggggtttaccccattaagttctcatcctagaagaagcaatcggaacccgcatcactcaaagactaagactaaacctgcaaacaaaaggttatatcaacagcaagagtcagtacattaaacaagttaatgtactggcaagcacaagtcaatcctaccatactacatgtaaggcatatattcaaaggaaggcaatatgtagatcattttcagcataaagcaagttttgtttcgcaattcttttgtaaaagagttgatgcttcaattaacaaaacaagttttaagttttaacattaagttcatcataattccatcataatcaatctcttgttgtcatccttgacaacaagtcataatatatcatcacactcacacaactcaacacattttatcaatttcaaatcaagtcacatgttcacattttaaatcataaagtctatactcatgacacatcaccaaagcgctcatgaccgggagcacggcttaatcgattagtctaaagaactctgcatagtttgtacagctttacccacatgatatgaactctctagtttgttttgag

SEQ ID NO: 34800 - DNA, 698 bp, Oryza sativa
agaatactgtagagtaccattatcttcttaatccactcatcatttcgtatctctactcaattggctaggttgcctccaaggtgttatttattgtgccactcttacttttaggatgtatagacatgtgtcccaaaaagacttcgtttgtccagattcatagctagaaatgaagtctttttgggatgggggactagtagtagataatcttgcgtatattctgttgaaattggctattgactctcaacatgagcagggtggttcattcagagcatgctactggaggacacaaatagacctgcttcttattaatgttgcaagagagtctttctgtactatggggatgtatgaactaagaccactattggcaggagatccaactttttcagacttccagttagccttgttaaaatctctattggcatcctttctttcttctcctgacaattgtccttatttagaacgaggtcttgagctcttcaacaaaggtaataccttcttccaggttctgagccaatctgggtttgctgtatttatcatctatttccacatgcattccagttttgctaattcattggtaaaacgtagagttaacgatatacagaagaaacccactaggacacatacgcatgaaatttgttaagctagctaaataaatcatgcatttcatatagcagttcatttacttaattacatccatg

SEQ ID NO: 34801 - DNA, 1250 bp, Oryza sativa
aatttaccaacatcactacaggaagaaccaattgatgaggacatattctatgtgtgttagccggttaggtgttggtaatgtaggaaactctttaccttgctcgatagtaacatctatcccctaaataattagataggttattagcctagagatgagctattattaggtactcccactgtcccattttaaacgtcagccaatgattttccatgtccaactttaatagttcgttttatataaaaaaattatgattaatatttttattgttattagatgataaaaaatgactagcactttaagcgtggcttatgtttttttaatttttttaaaaaaatttaaataagacggacaattaaatttggatatggaaactcatggttacatttaaaataggacggaggggtatcatttgtaaagtatcggtttaggagacatggtttattacaaagcccaggtcgcccgttctgagatgattttttgctctctttcttgacaataacaatacgggctcctttggaacaaaagcttttcttttttaaaagaattttgtaggatgtggagattttccgatatgctccttcggaacaaatgaatgctatatagacgaagagctactatatctagtaggttgatgggctttttaggcaaaaaagagtttttaattttaattattatggggataaaaaaaggaaaaaaggaaacggaggtcggatggatagcacgtacgttgcgcgcggagggatcctaattacttacggagggagattatattcttgtgagataaatttaatgattaaaattaatgggtccaccaatttaagtgaaaatcaatgctcgtatttatctattttattagtcatgtgacgactcgaaagcgtttttagaaatatatgtgaatatcgatggtcagatttatctattttattagagtgacatgttgtgactcgaaagcgtttatacgataccacatggtagcttaggagcatttttagaaagtttaatggaattttagtatataatttttttagatttcctctaatttaaaagtgttatatagatgtttagaattttttttagatttcctcttatttaagagtgttatatagatgtttagaaatatttacatcatgtttaatagagtgtttattaggagaggatagaggaagagctagcaatatatctagtaggttgatgggctttttaggcccaaaaaatgtttttaattttaattattatggggcatatgatga

SEQ ID NO: 34802 - DNA, 564 bp, Oryza sativa
cgctttgcaaccactcgcacccgagctctctgccctagcgccgtgcaccacccgccgccaccgctctaagcgcctccggccaccgctcgccgccgttagagccgtcgccgagcctcgccgttgcctccgtcgggttcgcgagcccgagggccacgccgtccacccctccgccgtccgatcccgtcgccggaatccgcctttcaccgcacgcaggtgagctcgccattgcagccgccttcggccggcgtctccgtccgttgctctctctctctctaatcgctcccatttcgttccccaggtcgctccggagcccgtcccgccgtcgcccgccgttttccgccgctcgccgtcgctcgtcgtcttcggtgagtccctctttttccccctctctctcttcctagccgccgcctagccgctagtgccgccccgctgtcgctcgccgccatcggccgtttgccgtcgtcgggccagcttgcgccgccgccgcttgccgccgcgccaccgcatgccatgccgccgcacgccaggccgccgggccggcttaagccacccgcgcgtgcgccg

SEQ ID NO: 34803 - DNA, 701 bp, Oryza sativa
attattgggcattaattttatatgagaatattattcgcagcccaattttactgaatacatgtgaggcgtgtctctatgatgtatgggtccagaaaaattcaaatatcacgctacatccaaatataatcaatattggactcgttttgttctatattttgagtagagaccataagtacaaacggattttgaataggatatatcatatgaaaagtatgagctatcaaagattatatgggggagaaaattgactagtgctagccatatggttggttggttgcttttgataatcacgtcagattaatgacgattatatttagattatcggcaagcacacccaaggcgtgcaaatgatgtccagggccactgtcatcagcgtattatttgcttgctaattaagtaccatgtttgttaagcatgtccattatccggaggagatcaaatatttaagcgtgattagcccaagatttgcggacgcggttgagagtctcagcctgatccatccatcgttagctctgcctataaaaggcaccgactccgtccctcgtgaaggagaaggagagaaacacagggcgcaagcgctgcgccattaagtagcaatatgccctataggtacacacccgcacccacatatattcacagagagatcagaaagaagatgcatgcgcatgacacagggtgcgtgatcgcagatcagcaacaag

SEQ ID NO: 34804 - DNA, 508 bp, Oryza sativa
ggccattaaattactactgtctatatattaactgttttatcactaacccatctggcctaacatattgatagttgatttttcttataattgtattatgacacctttgtatcatcattaaacttgaaacgtcaaccttctagtgaccccattttataagaattggtcacttttcattcgtacaaaccatcgtaataagcaattttcagttcatcacttagaatccccgccgcaacgcgcggggtatcacctagttgtacatatacatgtagccaaggccagctctgggcctagctaggccggttgtgcgaccatcatcaccacccccacccccacctacaggcctaagcccatagcctcagtaaaggcggaactgcgcgcgggcggccttggagagcgatgcggcgatccagtctctagggcacgccgcgccagttcgtcttcaatctgcggcggtgcggccggaggccccccccggctagcgctttttttccgaagctccttgaccacg

SEQ ID NO: 34805 - DNA, 573 bp, Oryza sativa
gagtttaaattcctaaaaatataccgtatacacaaatttaaaatttagatatactttaattccaaggtataaaaaaaatacttgtgttaattaagatatacgtgtacacaaattttaaatttaattgtaggtaccgtgtacataaaatttaattttagatatacttagattatatcaatctaagtatatgcactgtacgatcatatctttacataccttattaaggtgtacctattaccttccatgcatatcttaacactcatgcaaaaataaattccatgtatagccattacaatacataaataagtaaacattttatgtatttgaaaagtgaaacgcactaatttggcttggtttacataataagcataccttatacttatattccaactacaacgtacatggtaaatttagtacctcgtttaatttccatacatacttaatttcgaaaaaaccgcatgctaatatttccatatatactacagcataaaagctggccgagcaatgggagaagatgggcaaacaaaaggagaagatgcttgaacagccaatgatacagcagctaggactgcg

SEQ ID NO: 34806 - DNA, 1236 bp, Oryza sativa
aattacatagaatatccgaattagtagatacaattgccttctcaggactctatccttgcatggcaattaccatgaagcacattaactcaacttgatgatgtacaccgagtcgtattgttggaatcggctgtatcggctaaccccgtccgactcaaactctgccgatcttatcgtagccgatttggatggcagccgattcttgctctgttttcgcaacagtctccgtcttggattcctcttcgatctgaccttcatccccgatactgaggttaccaaatttggtcgttaacacatgccccccaagtccggaatattttggtaatgtttcggatttgccatatccatttccgagagaaactcgcacttgccgtcttcccgaccgttatcgctccgctttaaatactaaccgttgcccccgagaatcttcacaccgtgactcccgttttcaccgcttaagcaaattccgtcttctctctctctccggcgatttccctcggccagatctccatccgcggcgatgtcgacctccgccggtccgtctgctgcgccaccaaccaacccatctgctacaccatcagccgagtacgcagaggtctgtatccactggctacatccctttctcttatcggcaaatcgattttctcttgtcttatattgctttcttcttctcggtcgctttggatttgtagcacctctccaatctagtggcggttcccagtttgctgcacgactaacaatatttccttggtccaatcggtaatcttgaccccactgaattcatcatatccgaaaccaatagaacccccttcaggtcgaccaacccaaacatgaatcattggaaaaacacctttaaatcctggccttctcttgagaaaagctagcctgcatggtacaaacggatgtcggctagcaaacaagctcattgggacgagattggaatcagccaagccttagccctcaccatagcaaatttggccaaggacgaacccctgatagctgctgccacctatttctggtccaacacccttaatgcctttctcttcaaccaagggccaatgaccccaactctgctggatatcatcatgctcaccggtttagatgtgacctcgtcggccaaccccatgaacttgaacaccaagagtactttcgagttcaagactaagagcattggaggctggtcaggatacattgcagcatacatgggcaaaggaccagttaccccaagagagcatgtag

SEQ ID NO: 34807 - DNA, 785 bp, Oryza sativa
aactggtgttgctcaaggtagacggctggagtaagagcgtcagctagttcatctgggagaagagcttggatgtctgtgaacctttcccggatcggtccacagttggttaccaggttatccaatgatgcttctagccgatgagagatgtctttgagcgttctctttacatcatcgggcagaagagctgttgctttactggtgatgtcttgttctgtttcatcaaggtaatcttttatgtcgaaagagaacagatcggctaaaacctgcaaaaggtaatatcgtggatgattaaggatcaagacataattgcccgatttcaagtttatatcaacagaacttactggaataacaggagcagctagttgttcttctccttcaacatgatgactgtctgcagccgatggagtgcggccacctgattccacctgcacaagaggagaagaagagggaggaggctgcaaaaaggataaatgttagacatagttggttcagattagctagagagacgatgaaaagtatcttactggtgcagccggtttaggagttgatgtagccgatttcttccttacagcggttttctttttctgtagttattaaaactatgaggaatcggctataaagtaaaacgaatacaaaaggaagtcgagagaagctgcttacacttaggaagtgaactggagcagaaggagttgaaggggtatgcttgggtgaagccgatggtgttctttctgtgtcacttatttcggctgcggcttgatcgacatcatctccaatcacttcttcat

SEQ ID NO: 34808 - DNA, 5315 bp, Oryza sativa
ctgcagcccatatcactgtatagattgaaaccgagaggagtgtgcatgggatctcggactcaaaccgagaccgagaagaggggtgtgttttattttcctttttaggggggaatcggatctagagtaagacttttttttatttttttcgctatttatattgttttgacgggagtcggacctgagagggagtcggactttttttttatttttttcgctatttattttgttttgacgggagtcgaacttatttatttatttttttcactatttttttgacggacgaaggaaacctctcttattttttaagtagtagagatagagatatatagaaatactatatataaaaaatttaaattcaaattcaaattgaatcgggtatgtaaacttttgacttataaactttggatatataaactttaggtgtataaactttggatgtatggaaatactatatatagaaaatatttaaattcaaattcaaatttgaatcagatataattcaaattcaaatttgaaacggggtatataaactttaagtctataaactttagatgtatagaaatactatatataaaaaatatttgaatttaaattcaaatttgaatcgtatatataaacttttggtctctaaactttagatgtgtaaacttgaggtgtataaactttaggtacataaatttactaaaatagaaaattgatacggtaccaaaaaaagaaaatcaggtggagggagatcgctacccaatcgccctggcaatcgctcgcccattagagcttccgccttcctgcacactctcgcaggctcgcagctccggcgtgttcatgtcgtgtggctgactgcgtcatgctgacatgtaccatcgttgacatgtatcgtgctgatgtgtgcacaattattgacttgtggcagccgcgagatgtttggcgaggtgaagactagggtgtggtgggaggagatgttaggctgcagctgcacgcttgcaccaactatactctttctgaagccttaatttttaaggcaatttttgaccaatttttgacgaattacattagctgctgctagtcaccattacaagtgaaatgactcctccctccagccaaatttacccagttttgtacttttgtgccagcctgccatgtggtacatgctgattatgatctcttccttaacatttttatctggagaattaatgctaattaatgattggtcgtgtacgtgtcctcctgcatgattaattcgatttctttgtttggcacgtgtttatatacctaaagtttttatacaatgcacctaaaaaaatacaatgtacctaaagcatctataccagaaatttatgtttgatttggatttggattcaaatattttatacaggatgttgttatataaaagtttatgtctatgtaaattttgtgtgtataaagtgacatgtatagagtgaaaaaaattatacgtgaatattttatagtacaatggattttttatttagttaccatttttttatttttttaaaaattcatttgaatggatacgtgaaccagtagtaagggaggcgcggatgtaggggtgaaaacggagcagatattattcgatccgatccgcttcgaatccgtctgatgtgaggatatagtaaggatttttagatatccggccggatgcagatgcggattcggattttgtcatgcggatgcggatatggtatcaacgatatccgacggatgcggattatccgatattttaatcggattatccgatgtactgtttggcggataatccgcaactttcaggccacacaacaactctatttagcccattttacatcgggcggcccatctagcccatctagtgtaacctaatccaatcctcccctaaatctctctctgtgtgactcttctctcggtcccttctcttgctcccacacgcgctgccgcatggcaccattaccataggtgcgccgcgccacctttgcagcctgttggcgccaccgccgccgctcctccttctagtccaccgacagtgtgttgtgtgctatatggaactagtgtgttgtgtgctgtatgcagtgtgctactgtgttgtgtggctgtgtgttgtatgcctagatagctgtatgcctcattgcctcatgcgtgtcgtactgatgagtgaactactgaactgaacactatatttttaaattttaagcaacacagtgaactgctgaactgaacacttatattatatttttgattgatgtgttatattaagcaaaattatattattgatgtgttttggttggatttctctagagagctgaaatcatgttcatatgttgttttgccatcgtattgcggctaattgtattgccgccctcttgttttacggattgaatacaaacttaacatccgacaactttttgtccgtttccgaaccgagtccgcaccgacttcgcaccgaatccgacgtccaaaataatccgctctgcatccgcatccgcacgtcatccgcacccgctccgcattcgcttaaaaaaaatagtttaggatatgatatagctattatccgtccgaatccgctccgttttcacccctacgcggttgcgcgcgtgcattagccacatcctctttatcccaaactctcgtatgttatgcacgtccatgttaatcacccaaatgattaacatttgacactatggctatttatccaatccatgcgaccgtgagcaagtcgtcggaacagcgggaaccagagcactccaggtctccagccgtctctgtgagcaggtcccttgcctcgtggagatggaggaattacacgagaggcagcagcaacagctcgtctgatcctcctggctccttcgataccatgaacttgtattctggatttccagtacccaaaattctttcatcaatattgcatcatggctaatccaaaaatccctaaatttggccatttctaacccatgcttgtatattgtccattttatctcccaaaatcagcaatgcacagttttgcaagtcacacataagaaccaaatttaccaaagtgaaccaaaacatgcatgataggagagcctgctacagtaatacacctacccataaccttggtcttctaagcttgccgtctccctcctcgagcaatggccgccaccaccgtcatcgttgagcccgtagtccacagaagcgtcatcccattctggtggcgtcgtcgtccttatcgggcgagcaagaaggaactcggactcttaaagttggcacccctgcatcctgcgagttctggttaagttgtgatccaaattcatttacatataataaaggccagcttttgccggagcaaagcggaggcccgtttgaagctagaggcatgggccggagcgaagcggatcgttatccttttagggtttcaccttcatatatactccctccgtactcataaaggaagtaattttggacagcgacacggtctccaaaacataaccttaacttctcgtttctatagaaatatttattgaaaagtgatatatgtatactttttatgaaagtatttttcaagaaaaatctattcatataatttttatatttccaaactcaacaacttaggagttatttatgatttatattcctaaggtttgacttaaatattgtcctaaacgatttcctttacgagtacggagggagaacttcttataagccgccgtttggcgttgtaatctcaccaccgatatggtgaagatattttgctggttggcgcccgtggttttttctctcctacttcgaaaggattttccactttaaatctcatgtcttctgtgattgatctattgttctttattgtttatttgcctatcgttttctaacagctctcagctagtggcatcctcttaggctgattggaggtctgaggaggaagaagattccttgagaccctgacatgtgggccactagtctaaattgcacattggtacgcaacaatagctggtctaaagtgaaaagttgttaatacctagtctaatctgcatatcaggtaagtaaacctagaccaaaatgcaattcaagagggtgcatgggtgggaggtgtggttggtcgaagcctcggaggcacgcgaccaggttggtagcgtgcaacgcacatagtactagttctagcaattttatacaattatacccactttcataatcatcaattttacgaactgatcaacgtacatatttaacctatttgtgctatttatttgtcattccttagttagaaaactatttatatgctcaaaatattaaaacacatcctttattgccatccatttattattccagaataggatgattagatacatctagaaccacaaccgcaactcgaaattcgccgaattatgcaatggtttggtggttgcgtctgattacatgttgactcgtagcagcatgacgatgcaaagcagttgcttcccttgcagcaagtgcatggatcacactctcttgtaacggataaaggaaaatagccggcttcactcgtcgtgttcatggactgcattggaacaatattccgagtgctcttctcttccattgatcctgttcatctattcatatcacatacttgtgtttatttatttgtatgtgtaacaacacaacaattgtgtacaaatgattttctcacagcttagcatgaaaagtagaattactacgaattcttattaaagattaatatttaaaagaacaataaaatattaattcattttgccaagaacatattctgcaaacaaacaccacatgacataaagtaaaagagagcttttttaaaaaaaaaattggagcgcattcttgtaatgcataaataaataattcagaccaataaaatgtgcatataaacctttggcctgaaggccagtccagagaaggggcaggaaaacaacggtgagcgacatttgaaacagctttgccattgatggtccttaaatgttaaattgaccgccaattcctgcataaaatcaattgaaatgaaaccattttcacaagtattcataaatatttgtatgtgggcaattatgaataaaatagacccctcatacgacgaaatataccaccagccaaccaaacacaattacgcggattgaagcgcccaagaaaaagagcaaaaccgatattatggagatccaatccactatgcgcaatcatgagggcccacttatcagcctcactcagaaggttggtggccagaggcggtttcatttggcagactagaggaaaaccaatatccgaagcaagtgatagaattcacgcttaacttaatttaagaatcttatttaagtatcttaatctacatcctaagcctttattttagttct

SEQ ID NO: 34809 - DNA, 2131 bp, Oryza sativa
catgtacgaaaaaattagcgaggcaaatggcatccaccggacgtgtgtcctccccagtccactacctaggcgtacacgccactcagatacgcgtatacacgacctcgtaggtataagctacatacgtagtggccgcgtaattgagacatatacctgtacttattgtcacacttgatcacgagcctagttaatttgtttatatgtaaaagaccaggcatacatgcgtactgtgtaaatgtgataattaacctattcgaaagggatatcggctgcgaaattaacttgtacgcaaagaatagtgaggcgaccggccttgaccggatgaccggacgtgtgttcgcatcagtccactacctgtacgtacatgcctgtcaggtggcctatccaattaattttttgatagaataactgaagtacattctggcagagaatacctgccattaaaaagaagaccgattcacataggcagcattgcagaattgaagataattaaacttgtccatcaggtatagggacaataatataaatttatatatgtatcaaagaattaatactcatgtaatccaaagtaaaaagtaacaaccccaatagttcttgcatcatatgacagatgttatttcacacaaataaaggattttaaaaaaaatatcttgcgcttcattgcgagacagcactgttgtattgcttcataagttgtctgacgacatccgggagtgtggctgtattatccttcattgccatgatatccatcacaatgtctgctctgatattgttaatggatacctgtgattcataaaacaattcattgttaacaagatgagtataatgtacttgaaaaccataagtgaaaagtgcacaacatataataagtacttaggaataattaccagattgagacctccgacacatttgaagccatccagttcttcatgtacaccagagagttgattccactatcaacactgcatgagagttgtttatatatccattaggcattaatcaaatataggtatattctatattaaaattcaagtatgtttttttatacccgaaatacatcggaggatcattgggttcagtctgttctcacttggtgacctcgtcggtccagtctaggaagaacatagacaaacactcctgcattgctttcgctagtatggggccattccattgatgattattttcagcatggctatcattgccacaaaataactttttgggatcaaggatctgaaccaccctttcccgcagtttaaatgcatagcttttccaatggttcatttcacacattggaacaaaaatctgtggtttaattttgtcagcttatgtatttttatataaaaaggtagaaatgttcttactgacagaatatttacaatagaatgttagtagataaaaagaagaaaaatggcaaatcatctatacataacagggactgcatgtgaatgtaaactgtgtgagtgataaaaactaagatacatacctttcacgtattgtagctcgctggtgaatattgcctgttccgaagctcagaaacaaccagcgacggtagcgaaaaggcacatggacgtccggcgctgtaatgtggcttgacaaaaatggttgaggaggtctagtttccagcaagaggctcgcggacgaacgtcgtcggtgacaaaaaccacggacgtcggccctcttcacggcgtggcgagcaatcccggcgaggtaactcagtgaagaagaggtggatagctagctcttcgaccgtgaaacagtgtagccaagaaaaataaaaaaaaggaatattgtagccggtatatgtgtatcttgaaaattgaatgtaaccttgaaaatatatggcaataatcgcaattagtggaatggcgtcatttttcaaaaacagaatcttgtttcaataggtaagtacctgcatgcaaacattgtatatatggaaatgtgatatagaaaatggaaagtgctaatcataatgtgtaggcatgattagagggcacaaatttggaaatacatgcacggtatacatcaaaaatggaaatacctgcatgcatgttctaaggaaagtatatcgatgcaaaactcttatcgggttagatccgctaatatgtgatagtatcctctagtgggggcgcag

SEQ ID NO: 34810 - DNA, 720 bp, Oryza sativa
tattgacctttgcaacggaggttaggtataataacgaacgaattgatgatcaacaaatgtagtcaagtttatcaatctggagacggattgattcataataacaacacacgtggaagaaataagaaattctgtagtagttgtattctaaactaaacttattcctttcgacgccttgccaggcccaactcggtgagaggcccatcagtctagctgatcctggccacctctaactaggccgggcctagcaatctgggccgggcaagcatagctggcccagccagccgaccagctcagcaaccgggcaagccgctgcaactctccttgctgtcctcgttgcagtgttacaattattgtagcaatagatcgtacagccgccggtgccgccaaaattggcatgccgcctccgccgctgacctgctatgccgggctcacacgcgatcgccggcgtcgatcgactaccgcttctcgatctcaacccgaccatcccaaagttagccacacgcggttgtgcctttccccgaccgatttagaccgggaatcccgctggatcgatggcgccgcccacactccgccaaccttgggagctcatcatgtcgccgtcgctccgccatacacagccgcggctctaaacttgggttgaaacttgaaacccccaacccttttttcttttttttttgagaaaaaccaaactgattcggatcgaggctctcgaattaagag

SEQ ID NO: 34811 - DNA, 779 bp, Oryza sativa
attcctgcagccctgtttttggagatatatgtaatgtgttatgtcatttcctgttaaaacattcatatggtgggatgagcctgtatatgcatgtattgtactatttgaggcattttaataaagtgcctaaaaagaaaagtaaaggcattgtcaaaaatgccttgaaaataaattaggggcatatgttaaaatacctcggaagaaattattggcacaagtccaaatgcctcaaatgtgcctcaaatgtgtttaaatgcaatctaaaaagtgccttcatctatacttatgaaggcattttgaaaaagtgccttaaaatccctttccctacaatagtatatccaacacttttttaagtgccttctttaaggattggaggtatttttttaagtagttgaggcattcttaaatgcctccgaatccttgcgattcggaggcgccggcgtcttccattactggtgcctccggtatggctgtccccaggtgattggctgggcgaagcgctggtaaccaaacaaaggcgccgttattcttggggcattggcaagcttgtgtggccgtgcggcgacggcatcgatccaggcccgtgcaacgatcaagatgacgatgagcgccgtacgtccagaactgcaacatcgacgatgctggcaagttcttctttcttccgattttcttaatttgctttttcttgcagatcgataatgcatgcatgtatactctttccttttcctaatagatctatctctgttaatagcagaagaggatgcagacacgtatatata

SEQ ID NO: 34812 - DNA, 990 bp, Oryza sativa
acccagcataacaagcacgaagaaacattgttccctatccaggttgtacaatatgtggccatccggtggaggacggctttcatgcaactgtggcatgttccaaagcaagggcgttgagatctgaacttcgtcaggtttggagtttgccgggagaggagcttttcgttgatttggggccggattggttattattgcttctagatcgggtggattcatacaatagaggcacaattctgcttatgctttggcgggcatggtacttgaggaataacgtggttcacgataagggcaatctaactattactggttctgtcagcttccttcagagctatgctgaatccctgttgcttgtccgacaaaaggtttgcgatcccaaaggtaaacaggttgatcagcagcataatcaagcccctccgagatcagtgacgaaccaagtaaaggagaataatatgaggtggagagctcctccagtagggtgggcgaagattaatgtggatggagcttttaatcctgaagatggtttgggtggtcttgggatcattatcagagactcatctgggaaggttcttctatcatcttggcgttttattcggcgatgttcctcggcattagagtctgagctgctggcatgcttggaaggattgaaactcgctgttgaatggattaaaatgccggtaatattggagtctgactgtgcaattgcagtggagagaatgtcaagcaaggaacatgacagatctcaatggtcttttctgctccgagagatgaagaggaagatggctttgctttcggaggtgggttttagtcaatgtcgacgaaattgtaatagggtagtccatgaacttgctcaattggctaaaaggacggcacattgcgcggtttggcgtgatcatgctccatctgaattctgaattacagcccatattgcagcaagtatgtatccctgttatttaaatcaataaagcccaccgttccctcaaaatatatata

SEQ ID NO: 34813 - DNA, 760 bp, Oryza sativa
ctactcaggtacccatatacacgatctcgtaggtataagttaatttatcctctaaacttaacagtatatttaaatctgacagcgcaccctaaaaatggtgagcagccgaaattaatttcggataaaacactaatttttgttttggaaaaaacgctacatatagagttgacgcgtacgtggcacatatacctgtacttattgtcccacatgatcccgagcatagtacccaatttttttaaaatataaaaaaccaggcatacacgtgtatcgtgtacatgtgagaattaacttgatcgaaaggtatatcagtcatgaaattaacctgtatttaaaaattagcgaggcggacggcctccaccggacgtgtgtcctcccagtccacacctgtacgtatacgccactcaggtacaagtatacacgacctcgtaggtacaagttaatttatcctctaaacttaacaattatatttaaatctgaccgtgcaccctaaaaatggtgagcagcctaaattaattttggataaaacgcttccttttttttttgaaaaaatgcaacatacgtagtggccacgtacatgacacatatacctatacttattgtcccacgtgatcccgagcatagcacctaatttttttaaaatataaaaaaccattcgtacatggtacacgtgagaattaatttgatcgaaaggtatatcagtcacgaaattaaccagtatttaaaaattaacgaggcgaacggcgtccggtgtcctcctcag

SEQ ID NO: 34814 - DNA, 577 bp, Oryza sativa
ttgatcccagccgttcccggcccaaccgaacaatgccttacagttttgtaatagcctggaaacagtgctactatggctccgttcaagtttactgcagtaaattaagtacgggcatgaaaagaaaatcattaacatataattaattaaactttagttactttaaacataaaaatagatttatctaatattttaaaaatagcttttatataataaattttctcatgaaatatgccgtttaatataatttaaaaaacgtgctaacgaaaactgaagtaacatctgtatctagccgggcctgtggtctaatcctgaatacgtggacatcacaaaccgatcctcacatggcctcttaaattcagcacagtacaattgaatatagcgtcgtgtatctacatccttgatgatcttgacgacgtcggaaagcgattcttgatactcaagtacgagatttatgaatcctcaattctcatgtcccttgagcagtacgtggacttctgctgttgccgactgaattcttggcattcaattctcaactgatcaacctaattcagctctcacatcaccgccggccacttgg

SEQ ID NO: 34815 - DNA, 574 bp, Oryza sativa
cggactcacactctcgtatatcctccctcctctcctctttcccagtggaatccatggctcctctcgtcgctttcgtccctgcccatctacacgcacgcacgcacatcacgcactgcgtctgcatgcatgcgtctggccggctccctccccctttcggcccggagaaaggcggagtacgtcagtcccatcaaaagaagccccgagtgcgcgctggatcgagagccgcgtgacacgatcgtcgtcgttgatccattccattctcgttggatgatcttggaaagtcatgatatgatgaacgtaacgtcccgttcttttctgattaagatgtaaattttattttcgtttttatttgtttgatttccaaactgctagaacagtgtatattttttcatcttaagtagaaacgaacatcacctaaaggtcctgctcgtcatggtcctagttaatttttacttccaaattttatactagtaagtggtaaacaaaattatgaagtgggtttttatgcggcagcgttggtaacgaagattcgtgaacggaagccggccgccattgatggaagtggaggatggca

SEQ ID NO: 34816 - DNA, 710 bp, Oryza sativa
acggtgggtacccgacgtcgctgccacggacgccactgtccggccggagcgagagatacctgcaagagcagttcagttccgcgctgcatacgcaaaaacttcagctatatcttcaaataagttcagaaaagtccaactcacacaggggaatcaggtgacacattagcttgcttcttctggccatctagcaatctgcaagaagcagcaatcgatttgaaaggcagatacatgaataatgaattaacgtttgaatttttgattgattatacgaagaagaaagctgccgcgtcgtcggcgtcatcgtcatcggtctcgtcgaaccgcaggtccggcgtgttcccgtccgtcgagaatggcacggcaagcacgcccagctccatgaggtctgtcaagagcggcttgctccggtggaacgactcggtcacgaactccgggagatttgatttcagggtcatcttttgggcacacctctgcctcgccggccctgcaaccgccgccgccgccgatgacatctacgatgaggaggaaagcgagaaagaggaggaactataattttttttatttttagcaaaacactcactgacatgtgcatcttagggttggtttggtttgtggcctaaataggccttaccaaattttgtcaatgccaaattttggcaagttttggcatgactaattttggtaagacaaagttgtgtttggattgaagc

SEQ ID NO: 34817 - DNA, 640 bp, Oryza sativa
aagtaaattcctacagtgaatttcatcctagctaaaccgtataacaatgataagattaaaatagcactcatccattgtaacgtacgagtattttttcaagtctattgaaaaggaagtaggagaactgacttgctcagttagttacgctaaattattttttcatcatcgtgcggattattggagattaattgaagacgcgcggcattaattcgtagagtagtattcatagggtacgtacaacgccattgaataatctgacagtagcagagacaagttcagtctgtacagtgaagtgcaaagcttctcttagaccctgaattccaacctttttctttaaatttttaactttttcattacatcgaacttttttacgtacacaaacttctaatttttctattacatcgtttcaatctcttcaaacatttaattttagtgtggaactaaacacatccccttatagtagtagccgtatgttgattagagagacagcccaggccggctcctcatgattgaggaataagtctactttgtctctctcaaatttacgccatccaatctaatttgtatctctcaatcataataccatatatcttaagcactcaattattaaaaccgatgcaaaataactccctcgataatt

SEQ ID NO: 34818 - DNA, 633 bp, Oryza sativa
  unsure (1)..(633): unsure at all n locations
ccgggccctttgatggttctgcatctaattaagaactgtggcccgatatgcctcatctgcagacccgaccgcgctaaattggtatgctggctgttgcttatccttgctaaggttatactgatgaacctcagacatagggatcatagatgctttcttactctatgcggaagatgaaggcttcctcagcggacgggacacaccagacaagattgtatccgggccatgccctggtccaacaaactgccgcttatggatgaaaagtctcgactgcctgtcgaccctctgactaatacttgcagcagacggtgaagcagcggggagatctaaagaactgccaaacacggcggcttaaaagctggaagcaaaggactctgttgtgataccagctagtgcgccaaccgattgcggatgtgtatatcccctcatggaaaaatggctcgttcttaaattgaaaaaaggaaaaattcgcccagagcaccaccgttaaaatacctttccctttcctagttccccttgggaaaggaatcggcgggaattggagaaaaccaacccccgttttttttgggggggtttaaccccaaaatttttcgttantgattggatatcctgattntagatcgaaacgagggcggg

SEQ ID NO: 34819 - DNA, 3229 bp, Oryza sativa
  unsure (1)..(3229): unsure at all n locations
atatgtggctgacatatgggttctagtgacacgtaagcgtcaccatggcatgccacgtcagcacacagagtgggttggaatccgttggacctatatgacacccgagacaagttaagggacccaaaaattcatttcaaaagtttagggacatagttgacatatccacacaagaccggccatacattttactcttttgaacgatggaattgtgaaaaattctcacggtttggtttggtctgtctcgtgtgtgtgatcactgatcacctccacatggcaaattctcctcgcagtaatcagaattcgtcactgggccaagccagagcccagtttgcggcccatcatcccggtaatgggctgaattcgtaattgggccgaacagatcgctggcacctctccacattttctcgtcgtatctttctctgttctctccaactctctttgatcttccggtgatttcgcatttcctcgccgccggcgtttgattccgacgaactgatcatatccgccgccgccgccgccgccgccgccgctgacgccgacacggactcacgccgtcggagcgaaagaaccgccgcgattgccggtggggttccgctgctcccgcgacagaatttgggttcagggatcaaccacagccatgtctagtcttacccaatccaaatcttgcagatgggatactccgacgatgttcaggtgatctcccgcccgacgtggatcattttcctttctcccctctcgcccgtacccttgtcccttgcagttgtaagcaacaaaatgttttggtcaaatcatctgtagattggttgtgttgtgtctgtgtgtatgtgtgtgtgtttcaaccaagtgttgatcaaatcagctgcagggagtatgtttgtgactagaagcacggtccacattccctgtcacccaagttcctttcattcagcattggtgccttgttcatctgaaagatccatttgtgaaattgtgatagtggcgtagactgtagagtgtgacgtagttggaatgggggttttgcaagtgggcagtcttaataactcttagtgcaacctgacgaaaggtgtttttttcggcaatacgcgaaagatttgtgtatcattgcattattaagatggacaaagcagggctgaaaggaaccaaaatctgtattagatgctaagcacctgatggtaggtatttgtatgcaatgcattcccatatgctagttaactctgttaaattttgcacttattgtctttttcggaggatcgagtctgcacgaaccatgtgattcattttctcatcaaagtgtagggttgtatttctccataggattgtaccagaatttcgtggtttactcctgtgtcgtggtctcatggatttaagttttgaactagaatggttcacaattgccttcatgctcttgttagatttgaaacttatagttactataatcatatatatttcaaatctatgtagatatatttccttgccttttgttctactagacagataatataataattattcttgtttagaggactttggaatctgggggtaagatataagagcaattctacggtccttgaggaggtaccatgaggtaccaaaaatttaatgtaaaatttggtacctcatggtacctcacagtacctaagtaccaaatttacaatagaaaaagtggtacctcatgttacctcctcaagaaccgtaaaattgctcaagatataaagcttcatctgtaaacatcatcatcagaggtacattagtacttccgtagaaattctgattgctatccctcatctgataaggcatttaataattactttataatggtagactaaatatattaatgatgttcttatgcctattatctaaatgatcacatcccctttaatttgtccttgacaactcatagctagttgctttgtttgtgtcaatattcattaccctgtatgtgttcatgttggacttcagacttcagagtctagacagtagatagacatgccaacttcctgaaagtgatcccttccaacttttagttgggacaataaacaatatgatactgtcataactgcaatcaagtatatgacatatgtgagagttaaccacttgttttgcttgtggtctgtactctgtacgttaggatgctagctgtaatatctggatttctttcagaatctttctaataacttatctgtccctcatcaggaaaatggcaatgatttagctcctaaatcatgacactctttgtgcatgcgcactagaactgttctcaggtagatataataatttaaatatacaatagtgcatcctagctatcttttatcatttgacaacctcagtttcagtatttctgaataagacacagatacacataggcatgacctttatattgtcagatttggatctgaagcatgacggccatcatacttattcatgatgcaattactcttaatttaaaaatactttataagcacgaagcaactactatatagaagaaaataaagtacttgtcaccaagaacttatatgagaatatttcagttacagctaggaagtgataacgctaaataactgcaaacattgtaagaagtcatatgtgggtttgtatagatttatgttccttagatttatgctgttattgagcactgcaacacatttgggcctcttctggaactcccttgtagttggttaaccacatgcatgttttgcagtcaagcaaacatgcttgatgcttcagtttcttccacaagtaagagtcttatatgacccatagtattgatcactatctcaagtaacttgctgaaactgaggtgcgtgcatagaaagtaatggttagcaacattgtcagcaccttcttggtctcccactctcactattggtttttggttgaatgtgcatctccaaatacaaaatactagtgtaatacacttaccaaaccccaccagaaaagtccctgttagtggctcatcataggaaagatttggataactagatttccagctcattctgcaacagcaaaacacgcattgcacgaaggtgaaaaaagcctatgncgccctaggtttcacaagtgcatgtgggtgtagctctgagactgtgcatgaacaccagcctatcccacttgagtcctccttcctgagctcgctggtcgccactgatcccaaataattgcaccgagagcaagctaacaccatgtttagatcccaattttttcttcaaacttccaactttttccatcacat

SEQ ID NO: 34820 - DNA, 610 bp, Oryza sativa
aaaccatctagatctggtgaaaagcacatgtcttttgctagtttttagtgtgcccgttaatttttattggaaggtgtaatcacttgttaaaaacaatgataggattatacgcgtgcggtacaactattttactgctgcctcacatgaaacctactctagttctgtttcgttttgctaagttatattcctttccaaatagagtctggtgtcctgatgctactactatacgccatactcaatctgagttgtatcatactaacatgtccgcttctatagtgcttatgtggaacaacagtatatttccaaaattttacgcattaaatcttaacccttgagatctagatttactatgatttagtggtctatatttttctctttttctccgattaatgtgggagtttctagaccccacagcgaacgtagtgccttctttcaaaactgttttaataatataataaatagatagattatttagtgatatactagaattaaataatttaaccaggatcccgaccctagttaatagtactacgtatgaacgctcctgtgtataaatgatgagattgtatacaaaatactctcaatggttttaatatgtatgatgccgtta

SEQ ID NO: 34821 - DNA, 4514 bp, Oryza sativa
ccaccatcaaggatagggttgctccaagaacagcaactggggcattgtcctgcattgcctctgtagttgtcattcagctgtctgcttactcctgaaagcatcccaatttgcagctaactgttcacaaacaatgcaactaggcatgtcaataaaggctatgatctagtgagtaccacaacttggcaatgcattggactatgatacagtctaacagttctctgttacgtgtgttacacctgcagttttatcactccttctgcatgatgacggtttgtggcatcaattgctcagtgtggggatgatggctgtgtcataatcttcagagattacctgtgttagccttggaccatgctcatccatacattacaaggtacagcacatctctgtgccaatcatcatccgatatacccttaggattctttcggcttctcttatgagcttatccccataacaatgaattataatttgataacaatataccgcacgcattctgaagtacactcttcatattatttatttatcagattgttgaaacgaattatttgctccatgctttaaaaaatacattttctaaaaaaaattttagtgtattgcttggaccacttgttttaagttatttgttaaatttatttatcaaaatattcaatttatttctacaatcaagtatataatctgccgtaacaatccgctcgtttcaaactgagtcgctttgagccaaatctgaagtactctttggtatatatgccatcttcttggaggcctctgatctggaaaagaatgtagggttgttttggtttgaagccctaccaaaattttggtagtgccaaatcttgggttatgttgtttctaactctattgaattagtaagatttggcctcaatctaaatagttaacaaaactatcaaataattggtagggcaagaattggtttcaatccaaacatacccgtttatgccatcttcttcatccccaatgatagaggtaaaatcagttgggaaaggtggctttctatctcatcatttttcccaaccttgactagtcaggaagccatacatagggtggcagtctttgagcactgcaacaaaacgccattaccgtttgatatgctcatatcgtgctccgtataaaacaaaaggcggcactgtggccgtagggtccccattgttacgtgtacacttgcatgcttctctacagggcttctcataatctctttacatggaccgtattttttttctctgtatttttccacatgagttactgttgtccacagccaaaaggaagttagtgatgtacagtgaactatcaagagttaggccatgttataacgtctgcggtttttcacaggaatttcaccaaaacaatttaaatattatatgaggagtgagtagggatatgaaagtaaaagaaagaaagaaagaaagaaagaaagaaagaaagaaagaaagagaatttcatacgtgaacatgaaaattttccacaagtttggtttttcatggcgaacgaaatagtttgccgcactgggtgggaaaaaaaattagctaacaaatgcccaagatctgtctgatccatctcaagactttctactcatccatgcaaatctttttaccgtgtattttttttctagtgaattttcaggcgatttggggggccggcatttcacatgcacatagaagacggcaagacgctcatgtctaaatgcaacagtatgcttcagatttgtatccattcatccatcacctttcttcaagccgattcaatgcaaaggtgagaaccgagaaggcaggcaataatgcaaggcagtcatcgtcgtcgacgacgacgacgttgagccgtagaaaaaagggggcaaaaacaacagtggacaattaaaatccaaaggagaatctagtgacatccactgttgagtgcagctgcagctgcagcagcagcagcagcaaaaggaaaggaaaggaacaggagccaacgcgaaagcatggaaagctgtggtgcactttcagcttgcaagaatttgcaatggtcagggggtgccaggaggccagtattgcatggttcagttaaatggggaaagtgcatcgcctggcaatgcacaggctgtgtggcattgaactttctttcaggtcctcacagccttttttcagaatttttctttctgggagaagtttcagccttttgcagtgaccggaaatgcttgttgagtttgctgtttctgcaggtaaaagttgtagtagtagtaataatctttatgtgaaatgtgctgatagagataggcatcacattcttgtgtgaagttaccttcctcaaatgatgtctgatgaccttctagaaaacagtggtacttcagtccatgtccctcagaagtgtagctcatctcagtagtccatcaaaaaagcaagttaagcaactagacaaaatattgttcagactatcttactcttaacatatatttttgcattgttaagttgatgaccttttgtggattagcttgaggtatagaaatttgtagtctgtgcagctagaagggaggctttgcatgaatgtcttcttggataagagcacttctgagggatctttggctcggttcccttgggagcatctactacttgtgaaagaaactgcattttttcttcttctgaattttctctgtgcaagtgcaaccttgcattccatttctttgtcaatttcttcttttccctgtacttctccttttcgggtagatagagtgagagagaatcagaataaatctgcaatgtgttacggaggatccagaattctttggactgtcccaggctcataaagacaatgcgttcaagcatctcatgtcatcaacaggtgacctacctatacaatgctaccaatcatgcacgcatgggctagttctgggagatgtctatgatctagagctcaccaaaatctctttccttgcttagggcctatttgggaagtttaacattctgagaagcagttggttggtagccagcttctgagaatctggaaaagctgggtttcccgacttctggattctagttcattttctggattctagaactacagcttctcagaatctggatcaaaagctggtttgtttggaggagcttctaattctgagagaagctgcagcaactagaagctcccccaaacagggccttaggttcatctaatcgcttaagggatgttccttggtgtacttttttttaaaaaataattcaatattaatggttgcgtgaaattttttttaataaaaaggcaatgtagaattacatctaccacttcaccaaaaatcatattcaaattcgatctacacattgagaaacgaaaaagacaaattaagatgtgaatagtaccgatactatttgggattgcttatttgacccgttttgaacgttaactacctatttgaccttccttttttgagtttgcttatttaaccctgcttttcgaaaatgaacgatccgtctgaccctgttatgttaaggtgagttaacggtgttaagttagggataaatagtctattttgcccttgcttagttatatattgcttgtttgaccctattatgtcataccatatatatgttcgaatattttgacatatttttactaatttttacatttctttcacattaaagaaaagtttgacggatttgccataaatttgacaaatttgaatcattttgacaaaatgactttaatttgactgaattttaacaaagtggtagtagagtacaggtatcaatagcagcggcggcgaaaccgtggctatctaaaaaaaaatctaaatctagaacacgacggcggcggcggccaacgcaccggtgacggcgatgaagctgacggaggcggagacggcgcctgcggtgctcttcctgaccgcagcgggcgtgagcacgctgctggacagggccatcgcagcgcctgcgtcggcggggctcggcgccgcagctgacgactcagagggtgacgagggcggggacatcggtggggccggcggcgaggccatcgtcatcagtgacgatgtgggccttggtcgccgggagagggggcaagggtgccatcttcaacgcggatccctctgtccgcttcccgccgctgccgctccttcccttcacgagcgggcaccgacacatgtcccctccgcatgcatcctgctgccgccaccgccccctacctccacaagctggcgccggcgcggatccactctgcgagcttccctccgcccccgcccccgccccctacctccacgagccggcgctaccgcgggttccctgccgacaccgagcaccgccgccgccccctacctccacgagctggcgccgacgcgggttccctgccgacaccgagtgccgccgccacaactcgccggcacgcgagacatagaaccgggcgtggatagggttagggatggaatggtttcctcgagggtattttggacattacgattttaattatatttgtttcttttaactcaaaccttagcgttgtaatgaaaacagggtcagacggatcgtttgttttcgaaa

SEQ ID NO: 34822 - DNA, 1893 bp, Oryza sativa
cgggtgagggggcgggcggcggcttcggcttccggccagggcggcggccgggcttgcgcttgggggaggaggtggaggcgagctcgtggttgtccatggcgacgagctagggtttcatgaaggtgggagaagccaatgcccgaaagggttggggttggctcggtcggtatttcttaggtgcgggtcgggtcgggttcgagccacaaggtcggttccaaaggagaaattggacatcctctgccatcgtaaaaagagggtttcctcatattcaccatttttcacgttttttaccattttctacgtttgatttgaccaaaatactctgagctcgggttcgatgggtgtggcgtggcattggtggggacggcatcggccgttgcggcgggggaaggggggaggggctcaggttgctcaccgcccaataggctgtcagcgataaccacgtggaggaggatggaggataccggcgttgatccactgtgctccagcttgctgatagatcaatcgatgaagcccgccggtaagaggagcaacgacgggggcagcggtggaatggcattgctcgatggcgatgtcacttgctttgatgtcaagtccttcgccacctccctcgcgctactcaccctcgtcatggagctctgacagctccacccctaccaactccttatcctcctctccgccgccagctcaacctcctcctcctccattcccccctccaccccgcttacccaccatcattgcttccgtttcttccctctccaccgccgccatgcccgctgctaactattttggtcaagccaattgcggaaaaatggtaaaatcatgtgaaaatggcgagtatggcaaagtagcggtttggcatcggttgggagtggctttttaacgaatccaatctacggagtggcatttgagcgaaaccatcttttggtagtggcagaatgtataatttctcgttccaaagtggtggcgtgtctgtgctttgcctgcacaactttgtgttacattcttttctgtgaactttttatgtaacgagagaatccacttcatggattgttctagttcaaagatttttcattgatattgtcaatttctataatataccaacgagtttatcatttattctataatacagtgttaggctgcttttttttccagaaataccaaaaggttaccaatttatttaccccattattttaaaaaaaatatgaaattttttatgtaaccttcttgcacaatatggtttttttatctaagtttcaagtttttatattttaaagcaaaatatttttctatggtatatgagagtgaattgcttacccaaaagataaataacacaaaaatattgtgtgacatataaaagataatttacattaaaaacaagaacaaaaaaatattttatgtagcatataatgaataaattatttttttagttgcaattgaaaattctaaaacttatacacaaactttcacattttgttaagaggctaaataaactcgccggtatattatagaaaagagcaatacaaatatcacatcattaaattgggataaattatatttatcaggtgctcagtttcctttattctgcaccatgctaaagatttgttcaaatttcatccgtgttcagaattcaaaaacttttcatggtagcaaaaacacttgagaacatcagattgtcaccagttttcaagtccttataaagaacagtctcatcgtcttccagccggtgcatgttttctgaggagtgaagtgcacggatggtccctaaacttgtatgggtgtgtcaactaggtccctgaactattaaaatgaatttttgggtccctcaacttgtctcgggtgttatataggttcaacgggctccaatacactccgtgagatgacgtgcatgcc

SEQ ID NO: 34823 - DNA, 622 bp, Oryza sativa
tagaaatgttaaacaaacgaggggatgtcccttcctgagtttagaaaactttcccgcttctgtccacggcagatttgtctcttttctccaccaaacagacagtgtttacatcagtagaaagctcaagctaactagaccactgctgctggtgtactaatgacacacacacactcttggctgctgtttgcaacagggttaccgcgctaatcccggtgtttttctgctgagacagatgccgttgctgtggctgagtgaacgtctggttgccactggggaagaagagagaagctttgatgtgatagagcacagtgcccaatcctccatggtgttattggcgttgtctcgtgaattcgtcatctgttggagtagtttttttgcaccacatttttgggtgtttagatgggactaaaactttttagcccatgtcatatcggatgtttggacgctaatttagagtattaaacatagactaataaaaaaactaatttcataaatgagagctaatccgcgagacaatttttttaagcctaattaatccataattatcaaaagtttactgtagcatcacattgtcaaaatcatggcgtaattagactcaaaagattcgtctcgcgaattagtc

SEQ ID NO: 34824 - DNA, 664 bp, Oryza sativa
ttttccattctgttcaaaatcacacagacaatattaggtcaaagtttaaaggctagtagagagaggcgatccttcgcttaacttcatgtgtagttagtgtcactaacatagcacatcatactatgcatgtctctagtagggcagtcgcagtctcgcagataattatggccccgttaatatggggaataggtcgagcttattaaccgcacgtaaaattgatctaaaaaataatttgtaaataaaacttttataaacgtgttcttagcgatttaaaagtaaagattaaaaaataaaattcgagtaaaataaaccttaaaatcaatttaaattaaatttaaggttaaaaatttaaattttactagctgataagtaagcggaaagatgaggctcttattcctttttttctcgtcggagtgcccgtagcatttccccttccctcctttttgagcgcacgccgcacccactcccccgtgttctctgcgctgccgttccccgttattagccaacgctttcctccacccgcccccttcccaagctgagctgtgctggcccttgtttcgcccttactaatcatcatcggcttctccttctccttcttctcttccccaccacctttcttcccacacacacacaaacttgcgcgcgcgcggtgagaacgagaagc

SEQ ID NO: 34825 - DNA, 656 bp, Oryza sativa
tctgcacacacatcttcgccacttccaatgtccaggcgtgggccgggcccagaattttcaatttgggtattcgaaattgaaagagatatttttttccacacaaaggtctaatagttgtataatatataatggtataagcatgatgcgtgtctttcatagaaagggagctgactcccgctcccttccgtccatcagggatttattcaaaaacctgaaatcgagttgagttgaatggggttcaagtcaactagatgaaatgtttcttcgtagtgagcgaacgagttgtaaagtcatagattcatagaattgaccataaattaaatatgttaagcatattttaaagtacagtactaaagtattaattgacaaaacatgtcaaatttataaagcatagaaaatggaaaaatgataagaaatcttacaatttagagagacttttcgtttcttgatattttgaaaataagtgacgatgtctttatccttcactttcctcttcatgtttcaaacctacaaaccaacactacggtcttctaatttaagtattaaccatgctaactctgctaaatatgtgcactaactctgctacaaagcctcccaaatcagtgaatcacaagtttcaaagttcaattgttcaaccataacccatgaaccatccc

SEQ ID NO: 34826 - DNA, 620 bp, Oryza sativa
agatgcggcggagctgccccaatggtggagcctctatagtctctcccctccaccacccgccgcgatgtcttccgctgctccgccgctgccgcgctcaccggcggcgacgcccgactcgacggcgtcaactgcccggacgcgcgtggtccgtgcgccctcacgaccgccgcgggcgccacgccgccggagtgggcggagcgccgccccgccgtgtccgtggactacgaccggggccagcgcgaggcccgcgccgaggtggagggcgtgggcgccgtggcgttccccgcgcgccaccgcctgcgcgtggaggggagccggtggcagcgggactggaaggtgttggaggccgccgcgcgcgtgctcgcgatcccgcgcgccgaggccggcgctgtcgacgccgtgctcaactgctgggccggccgcttcgcccgcggcaacttccctctcctcatccgcgtaagggcatcatcccacgctctgaagtatttcatgaattgaattgctgtgatatacatcgatgtggttgccatggttgcgttcttatgatttgccatcacgcaagttatcgattgcttgaaattacgaaaagcgtcaacaattctatcaatctagctgtgttg

SEQ ID NO: 34827 - DNA, 670 bp, Oryza sativa
cgcaacgtagtgccttctttcaaaactgttttaataatataataaatagatagattatttagtgatatactagaattaaataatttaaccaggatcccgaccctagttaatagtactacgtatgaacgctcctgtgtataaatgatgagattgtatacaaaatactctcaatggttttaatatgtatgatgccgttaatttttagacatgacgtatggtcattcatctggttcgtaaatttaatgaaaaaaaatatctcatacttaagcacttttaataataaaataaataatccccgcaaaaaaataatcaaatatataatatttattgttatttcaataaaaatgatgggtatatgctatagcctaaaaaagacaataactacatatagatttgctgaaattacacacagccacaggcatatggcaattttggatctttccataaacattttcccccatcgacgcacaattactccatctactcgagataccagatgtgactgatcgagctcaagctagctcgtggaatataagaaaaataacttgcagcttcaaatggccggcggagatgtgagagctgaattaagttgatcagttgagaattgaatgccaagaattcagtcgggaacagcataaggtccacgtactggtcaagggacatgaaaatt

SEQ ID NO: 34828 - DNA, 550 bp, Oryza sativa
tatagcctgtagttctgtaattattttttcccgttatatcgatatgaaacaccgaatcatattttttgtttgttttaaaaatatgtatagcagttgttgttactttctactctctctgttcgatatcataaactgttttagttttgtttaagtcaaatttctctaactcgtacgagcatcgatctctcgtgtaagatgttttcttagcagagtaatactgattaattaataaatgtgtccactaaacatgaacaattcccttgtacgagcatctcgtataaacagtatacttaaatttctcatttaagttaagactttgaaaccatcccagattagtactgtacggtctgaccagagcttacagccacaagcgttaccgtaggatttcaaaagttcttgaacaaatgtcaatgtttcactcttgaaactttaacccacaaccgatcgttccaagtcaagtatatgtggtttgttgagattgatacaaaaactcttgtggatgaccgtgttaattttagactggcgttgacaattaattggtttgaaaatt

SEQ ID NO: 34829 - DNA, 583 bp, Oryza sativa
atcataacgtgtattctttgtgtgacattcaaagcatgctattgttgtggacagtgtgcccaacaccgacagatgtgaggtctgcataattgaagatcatcacatgtgcacatggatatggcatgagtcaacaggtttaaagaacacaagacgagcacaaaacaaaatccttgggcatgaacgcggttataccgggaagacaggaactcaagtactacaatactctctcctagttctaaaacagacaagctatcgtatgcacaaagtacaataaaggacaaccaatgacacttaaaaagtaaaaaactagcataagagcacttactgctcaaaatccagacatgcaaagagtgaagccattataatataatatataatgttcatcatatggtctatttcaaccatatgaatgatcaatttgagatcaatgctttcagaaaaaatgcatatggacagtaaatgacctacctacagaggtaactagtttaccaaaattttcttagacaagcataaatcatgccttattgctcttccccatgttcttcttttgtttcttcaagtagtgcccaaaaccaccatgaat

SEQ ID NO: 34830 - DNA, 591 bp, Oryza sativa
cccagaattgtgtttgaagttgcatacataagtttgttactgagatgttcacctttccaggccaacaggtcacggattggagtgaggtcattgagttagaaggtagtttcgaagagttgaatggaaatgtgagcaatgctgattctgagaggtctctctttgaagaacaatatgaaaaagacgatcatgataaggttcatctctatttcccccaaatgctgcatcatatctcaaagaacactttgtacatgcaaataatgattatgaataaccacatctggcatttgaaaacatggagctaaaaatacttactactttctggggtatgcatctgctgataaatcgctataacatgggtttttagaacatttggactctcatcatctgcttgttggcttatcaaccgcagccaaaatttgaagtttgaaacttaattttagagttgatattggggttttttcattgtagtttatttttcagccttggcttattgagatggagggttttagtagttctttatctcgcactaatcaagaagctagtgcttaaggagttatgttttttgcattggtaaaaaaactgagtattttt

SEQ ID NO: 34831 - DNA, 606 bp, Oryza sativa
attacaccaacaccattcatcagaagtagttaaccaccagattttttggggcctatggcaaatacagttccaaatacttcaacaagagccagcaaaaaaaaaaagaaataaaaaagaaagaaataaaagaagagaagcgaagactttgacttttcagaactgcgtggtgtttgacccggacgccccggcgccgtagctgctccggcgcggcggcggccgccggatcgacacgagcccctccgacacgacgctcccgtcgtcccactgccggccgagcagccccgtggccgtgaccgccgcctcgtcgtcctccccgcgcatcgcccggagcgtccgccgcgccatgtcccggcccacgccgccggcgccctcggccaccggcgtgagcgcggcctcgacgccggcggcgcgcgcgagccctcggaacctcaggctcccccggctcatcccgtacagcgacgagatgcagtactcctcctccgcgctccccggcgcggcggagccgctgctcatcagcctcaccacggcgggcaccgcgccgccgtccatcagcgcggtcctcccgtccgggcagccggcgaggttcgcgaggatcatcacggcgat

SEQ ID NO: 34832 - DNA, 685 bp, Oryza sativa
tctcaaatgtacaatacgtactactgttcactggattgagaaaaaaattcgcccgagtttgtacaaactacgcgctgtccttcactccttgaatctttatacataaaatcaatattcacccatcctctaataaacttatctaaataataaatagatgtatatgggaaaatattatgattacatttggtattaagtatattttaatttaaaaattatcacattgaagcatatttagagctttgtccattaaatatcatgtaaacgctattaagccaccacttagtacatctacaaatgctcctacaccatcacgtggcattttaataaattagaaaaatcacaaaaattacgagaataaacaaaacatccagttgtcgattttcattaatatacggtggacctattgtgtgtacgtacctctccacctattttctttatctcctattttccagtttctgttagatggaaaaaatattttaggataaaaaaattttagacaattatattatctaaatcatatagctaactttttattagtgcacaccattagattatttactataaaacataaaattgaagatccaagttaactatattattaaaaaaatcattactctgggtcatatatattataataattattggtttcactgatccatacatttttaagaaaaaatatatagat

SEQ ID NO: 34833 - DNA, 785 bp, Oryza sativa
gcagcccataaatctaagtttgagttgtatctctcacaatttaaagcaagtttaggtgacaggattattagattgtgcttaaagcctaactcaacaaatgattactcaaattttaggccattacaaaaaaaatgggtggaatggctagagttgtgcttggatcggcttgcagataattaaagaaaatgaaatttagtttatttggttagactggaatggaccaaagatcactcatgtgctgtctcttgcatgcccatccctaggaatggctagactggatgaacacggtcggtcattactggaattactctcttatattatgggtcgaactagacgttgcttgatggaatagtacatactccctccgtctaaaaaaaactaacatcgtactaggacgagacacatcctaatacaacgaatctggacactaagatgagacacatctatcttatcctagtacgaggttaggttttttttttttgacggagggagtaccatcttcgttttttaataaataatgccgttaacttttggattaaagtttgaccaattgttaatttaaaaataaaatatgtcacaaaaaataaataacaattatttaaattctttaaataagttgaatgatcaaatatcataccaaaagccaatgacgtcgtatgtttaaaaacggaagagtctatttaaaatggtgtcactccgtttggaaccagaacagaattgtaagcttggtctaaaccacaagaaattaaaaaaaagaacgaggacaatagctatagattaacgtt

SEQ ID NO: 34834 - DNA, 776 bp, Oryza sativa
ccccatgcgcacgatatgttcggtatcttcggtgaagtcagttcacagcggacaaaaaccgatctatacatggacaccgatatacataaaaataaatgcaccaaatccaaaaacgcgaaaactagtaattcggttcgattcggtgttcgttttatttgtgcccatacacccctcaaacattttttaatataaattgtgagcgtgttgggattaaacactagacctcgggggttaaaaccacatacccttgccactgcactatcatgtgaattgattactacttcggtttcaaccgctatggactcatcggaaccaaggccatcaccaccccgcatcgcttgagcgcacagaacccctctacgtggcggtgcatgcaacaagaaaaaaaaaggtgagacgagaaagagaaagaacgagagggatggagaagcgatgagaggagaggagaaacgcccatgcgagacccccaaccctgatagtcgccagcaccgccatctccgccgtcatcgtcatcggccgcctccgcaaatcgaagcttcatcgttcaccatcgctgcctttgcctcgcccttcccccagccggcgatgggtaacgaaggggagagagggagattgctgaaacaagaaatatacttcgcatgtggggcccactcgccacgtcggctaagaacagactctatactggttaggatctcgagtataccagttttgtaagttgagaaactcattatatcttgtattgcagtttcgaggacgaaattcgaactcagcaacga

SEQ ID NO: 34835 - DNA, 531 bp, Oryza sativa
aactattgttcttttgataatgtaattatcaatttagccttgcttttcaaatatgaagcggacatctgaacctggaatagttaaaattgttaaagttagcaccaaaatatcgtttatgcccatgcttatttcaccatgctttctaaaaggtttgttttttttttcagttttgtgatgtatacataactttgtgattgaaattttgaaatatctgtggaaaatttaacttagatttgaaaaattgtaattgaactttaacacatttgtcacaatatgtcaaattaagtcaaatatgtcacagatctgtcaaaattttcatcacacatttttataagtgcacaaaattaggccaaataaacaagacatttttgaaattagggcataaaggatattttggccctaagtttgaagtcagacaataactttatttatttatagcagggtcgaataaaccaagtttaagaaaagtccaaaagcttaattatccgtaaaaatacatattgaaaaaatatatattgttttgttaatgca

SEQ ID NO: 34836 - DNA, 739 bp, Oryza sativa
atatggtcccacatatcatacacacattgtgtcttaaagaccgtgctacagccggctacagatctgtagcccgctgttcttctctcttatcttttatcttattaaaatatgtttatagctggctaatagtctgctattgtacctgctcttagacgcccgtgccatgcatgtaaactttgtgaaagcattttagaaacagtgtcttttcttgcatgtggtcgttagttgtgctaatgcaacatggcaatcagcaattggttagcactgtaggataaatacacagttgctttgcatttttcaaaaccactatggagatatatttgtttagttgtggatgggttatggggattggaggaaaacaaatttcaaacttactttgggcagggtatcagttaaatttggacagggaatgagtttgatcagagtaggtacaaatttttctactaacggtactaatatccttgcttatatggtcaatatatagtttcagtgtgtcacgatttgatctaaatatataggtgtaagtggcaagttaacttgcaaaattatgcaaccgcatcattaaggtggtattagtcatcagttttttctctttatattataagcatgtgtagtggtgaaacattcccctggtgtaaattaatttgtattgcatcctgagaaatcatttcgccttcaatgtgtgtaggataatatatggcatttctctattgtgggtagaaatccatgacgaacgcgt

SEQ ID NO: 34837 - DNA, 1420 bp, Oryza sativa
ttggtggcatcggaggaggaggcgtagccccgtgagccaatcaggcggaggaggcgaagaaccgccttgtcgtcgtcggtcgcgtcgtggccacggcgccggagatgggagaggagagtgcggcgaggctggagaagaatcggccgccacattttgtctctgcggacgctagctttagggttacgtacgttggttcagctgcacctgcacgacaccattggatggatccatccttgttttgtatatgggccatcgataccatctcgatccgttcttcctgggaaaaagtacaccgaaggtctctcaacttatcatcgagttacaaaatcgtcccccaaccgcaaaaccggatacaacgcatccccaaatttacaaaaccggtgcaaactagatgcctcggcggttttgacccggatttgcctgacgtggcggctgagtcagcgtgggacccacgtgggccccatatgtcaggatacacgtcggcagccaacctcttacttcctctcctgaccgggcgcatggtcggaccggcacagtgggtcccatatataagtgaatcaaaggtaaatgggtggatttaacagagaaactaggcatggtggggcccgcatgtttgtgagacattagagtgagattagggaaggattactgtgcggggtcggcatcctggcggcggcgctcgccccggcgcgccagcggcggagagcgggggaggagcggcggcctgggaagggtgtcgccgcggggccggcgatggacggcgcggtgcaggacggcaaccagcgtcgcaacggcggagggcgacggagcagagggggcgcgggaaggagtcgacgcggagtcggcagtccgcgtccgcgaggaggagcgcgtggaggccgccgtcgcgtcgcccggcccggcgccgccgcgtcgctacgccaccccgccgcccgtccccggcctccctttcctgcctcgccccaccggccggcccgcacgaggggggcggggaggccagtgagctcgcgccgccacctcgcgccgtgggcgccctagcgtcggcatccccatgccccgtgcgagagaagagagcaaatgagcactgcgacttgactgcgatagatatgcattaatcgatctatgcatgcatatgcgacttgacttcgagagaggcattcagaattaatctgtttagcactcatatatagatatgtgaagtaaaccaaacacacaacacaccaattacttgatgatgtttgattaagctattgctgatatactacacacaactgctagagaaagagaaatatatatggccctggcacttgaacctctaaaatttacctgtataaacgtagttatagcttggatcgatcttgcattatattggctcaccttttgttaataattaattagctcaagctggctggggtgcagg

SEQ ID NO: 34838 - DNA, 768 bp, Oryza sativa
ttcctgcagccccacgcagcggcacaaatcagatgagggcaagctcgcaatagtcgatcaagacgtgtagtcaagctctttgtcagggcaaatctacttagagcaatggcctcaacaatagagaatctgctcgagggcgcggtggtatctatggaggatctgcccggacaatcagatgactcaccacctcatcacattgtttatgcccctatcttcttttctccgccaatcatagttagaggcaaacaggagccaaggctattggtctagttgctctccaaaagttcagtggatacgtatagagagcacaaataataggaaaaggaaaacgagagaagatagagaagagaaaagaaaagaatgcaatttgtacctgtatctcgcttaggctgggggcactttgggtccccgtaactgcccctatagatcaatctctccctgtctttctctcgatagatcacagtcatctctgccagtgtgtgtgtgtagctcggctccttttggagaacagtggtaggtgcctgtgaatggcgagaccggctttcatcactcgagtactagctagctaccccccctatctagcgtcgcatcggctgaccagtgaccaggacgccgtacgccttgctcttgcaggggtttggggtttgggttcccctttctctttgagcagaggcagagtcagactgtctcagagactcagagtctctcagacccagagagagagaggtggtactgtcctacgtacagtattcatgtgagtgatggaga

SEQ ID NO: 34839 - DNA, 709 bp, Oryza sativa
ctgctggtcatacgatcccatcggctgaggaattaggcaagaagagatattgcaaatggcataattctggctcttattcgactaacgattgtaagatctttagacagcaaatccaggttgccattgaagggggaaagattaggtttgatgattccaagaagccgatgaaagtcgatgggaatcattttcctgttaatatggtgcatacagctggtcaagcagccgatagggcccgtgcaaagggtcttcaagtaaattcggctaagattatcaacaagtatcaaaggaagtatgataagcagcaggagaggcattatgaagaatacgacgatgtttttgatcctcattggggttgcgagtttttcagattctgctggaatgaagggatgaggttgccatctattaaaaactgccctagatgcagtgatatcatcgagagctcaagccgatcacataatagggataatcggctaagacaggcaagactccctgttcatcaaagattgggcccgatgagtcaagatcgtggccaagaggatgaggtgatcagggagaatcaatggtatccttctggtattttcatgaagaatcagaaaaggagggtccatagattgaggagcagggagcgttttcaggaggttgaagaggaaatcaaccatcggctgaggaaaccaaagccaagacaggagtggcgtgtcaagaatcagtt

SEQ ID NO: 34840 - DNA, 3300 bp, Oryza sativa
ccctcccagagggcggtaggcgactatttccgtcaattttcaaaatggaaaattatttttgtaaaacttttaataagaaaaattataaataaaaaaaattctgattgtattgtggataaaataggtgccaatttcatagaataaaagtcagtatgtggctttttggtgtgtctggaactaatctctatgtgtcgttgatattgatgtttcatcattggtcttggtgaaagtaccttcatgtttaaacaagaggtataactcttagtatccttgttactactatatcgaaagaactaatacgttatataaccatcattctcatcaatcacccactctaaatattattggttttgtgcggtgtttaacaccatattgtaagccatggttaaaaaaataacacgattccaccatataattattagcaggaatagtacattgcatcagcaataatagccgcttattgtaatgtctattttagaacgtatttacatgatagttgttctcaagactaagtatacataagattgatataaccacattaatttgtgagattattaatatcaccatgatatcaaccatacacaacaattaatatatagttgcacatagctcatactatcagttactcctacttaatgcgtattactttgcaaaaaatatccataagtccatatatatactacatgttgcctggagctacggtgacaaggatgatgaatagatgaaacgaaagccataagtccattgcttgttaccgttaataatgaaaaatatatataatgaaatattagatgtcgttttatcaatcaagagtaagaaaagtattgacctactagtatttttttagactagtccatctacaaagaaaattcaactatactcagatgtcacttgtacaaatagagaaaaccgatattatgtaatacaactacgggtaaaccttaaatgcaacttttttactatgattcctctagaacgtaagattcttaaagtataggaatagagaaaacatagaattaaaaatatcatgccatgtaaaatcctacaagaaagaaagctacagaatttattcaaaacatgtatttggtgtaccatagaaaaaaacaaaagaattttaagattatatgttgatttgctagagagataatggagagagaaaatgccttaaaatatcaaaggaatttgaaataatgaggttgaacctaatgctaaaattcatcaacattgtggaggaatttttcctatcctttaaattgccttaatttgaagcaatcctgcaatcataaggactcattcctttggattggatcctgtcttttccttaaaaaatccttcaatcccaataagccctatatgtttacccattaaaaattactcctacctactttctccgtcccataataaatttattttgcttgtccgaaaataattttatttttagagtaactattacatcgaagtttgtgaaataagaaataattatattatgagtagataaagtgaggaatagttgtattgaaattcgataaagtaggggaattctagtttttttattagtatgtgtggaataggtgaaaataatgaatttattttagaacggagataggacataacttctgcatgtatgttaatatagtgtctaaaagattaatgtttcttttttctggtccagcagctaccaatctacttctactataccatcacatgcctgcctatctctgacaataccttaccaaaatatcagaggcaccattttacagaaacacatggataaggaaagagcaacttggagaaaggggaacaaggggctgtggctcaaacggagcaacctcaagccgcggcttttgtgtgtcgtttgtgtgctcaattgttgagagatcggcttcttcttcttcgtcacctacaaactgctgagagggagagcacgtaagtacgcaatcaaggctgacacgctaacggccgacatcgcctacctgccatcaattaagctttagctatatatactaccactgtatagctaggtcccatgttgcgttggtgacactagctgctgctgtcatcacgcattccgaggaaacacatgtttttaattattttgttaattacaacagctttgatacaatttcgatcattttattcgttttaagtcactgagcgtttcaagagttgtccttccggctaggacaaattaaaatggtagtataagatattgttttttaataaaaatgaaacaatctattatttatttattaattgtctttttgttagatttctctggagatcagtacaaacttcttttggtctatatcctcgtataatatactccaactcatatttttggaaactggcttgtgggtattgataaaaggaccaataaattcattcttgtaggacaaatcactgtttaaatcttatatgtaggtactttttggaggcaacgcactagattcggttttggacgtaactacaatggagtgatgaggacatcaaacttattcacactgcatgctgcaacctaggggcaatggtttgcagatttttttcaacttcggatggagattcacaaatagggtgcaataattgtgaagtcttttgtctagtgttggtggttattagtgggtgcatcacttcatgttttcttttggaggtgccattatgaaattgtttgttgtgtgtgcttatcaatgaactgattttttaataataagctgtagctcttagagcaaagaccgaaattatattccattatttagaaaataatttatggtcagagatagatgtttgacataggataaatctaaaacgacaaataacaagcagtaattcaaaacgatgagaatgttcattcgatgcgtttgtaatgccatttggacttctaatacctatgtggtggtttgtttgcacattccaacaaattttaatgccatgaaagcattctttacatggatgtcgttgaaggtgtatttttaatacatccaatgtgaattaagatattgatactcaaaatttcaatacataatattgacattgctgttgttttgtttgtctcaacggttttcaatgcatatactagcttctcgaatactactacattttggtggtcccacggtgaaagaccagcagatgcctgcattggagatttggagctgaatctgtatttctagagacagaatatgctctttagtagatttatgggctacgccgtttgcttacatccataagattaattggtgagtgtataattagtgatatgtgtttttcaagctctttaagtagcttatggattataggcacacttct

SEQ ID NO: 34841 - DNA, 609 bp, Oryza sativa
atttactaaagtagaaaagtaataaggtgccaaaaaagaaaaccaggtggaggggtggtgggagggaggggggaggggatcgatcactaccccgtctccaggcgatcgatcggccattaggatcccccggattcagcctaataaaacatggcccaagtcccgtgtgcaccatgcaaccataatgtggatccggccccataaacataatactaagatgacttgtgacttgtgagtgagctagctcaaatattgtagattaatttaaaactgtttcaatatatatgttgtctcccagctcactctcattagttggtcttgatgtagttattttgagcgtttcttatttactagtggattcataaacattgtgaaaaaaattaattggccacgtgtaggacccatcttgagaccaccatcgtttggcctaatataatatcagcaacgaaaaaaattaacatgcgggtaaaatttatatatatgtatgtccttatgatctaaaagacaatacttaaaaataaaaatcctaaaagtcaaccctaaattaataatcaaattctagcaacaacttataatctaaaaggtaaacgatggaaagctatgtataacaat

SEQ ID NO: 34842 - DNA, 593 bp, Oryza sativa
gtgccttgctaagatactagtaaatggttatgaactagaaaaatattatcagtacattagcttcatcacaatgtaatgcaacaacagggagaaggtgcactcacagagctgtagacgagagagagacgaacatcgcgggcttccgtaaaatactgcaggagtggcagagagtgtgaaacgtatccatacaccatgacaaagacagcaagtgtatggacgtttggcattgctctgaatcggactgaactcgaacggaaaaaatcaacccaacgaagtgtccccagcgctggagcaaagatgtcaaccattggcatcccccacaataagcaagcgtacaaatctagttctgtaagcgcaggagcagaaatggtgagctgacgaatcccttccagtcgagacagctgaacaaggcggagagactccgagcggatggctagattggacaccacatcggcatcgcggatacggagctctcgtagcgacgggcacccctccgacgagacggcgcctccgagatcgcgctggctctggtcgtccaacctgcagtggctcagctcagcgcggtgagcctcgcgaagacgccggatggtggt

SEQ ID NO: 34843 - DNA, 585 bp, Oryza sativa
ttggaaaaatagatttgtctcaccatggtgattcaattggagataatgcagtgtaatattatttggttcttggtctgctttagtttcttggttgatgatcaacagatgattaaattcatggtggatggaaaatgcaatcactggagattaaatggctagcatttgcgtttgatcaggagatgtaaaggctggtgcatggtgaggtggataggaagaaggtggagatgcggctgagatggaaaactgatttggttgatgatggtgattcaatttttgtcattcaagtggagaaattaattagggaggagaagagattgcagagatagaatgacagggagagagatagacagagagacagaacgtgagagagattgagagattaatacggagagatagggagagagatatatatagaaccaagagttaaaagaaaatgaatgtctcatcgtgtttgattcatttttttaatattagtggaggatattgattggggattgaaaaaggtgaaactaatgggagagagagagagacagaacatcagagggagatagagacatggagatcattacagagaaaaaaaaaaga

SEQ ID NO: 34844 - DNA, 754 bp, Oryza sativa
ctattgctacccaagattgttgattcccagcatgaacatatgctgcgagatgagaggcctcagtaatcgcgagatgagaggcctcagtaatcaatggttactgcttctgataaaaagacagtataaagtggggtgtaaccttgaactgtattcatttcaccattatcaacattggaatgaactgctgcaatacagaatcaaagaaaatttgagcaatagtagcaattaatttgcttgtaaaaggtgtatgtttaaagattaatgtaaaatctatggatgtaaaggaagcctgactccatttttttttctgaattctgttcccggattgtttactattggcagttcagaaaactgctttctctaaaactaatccagaaggataaatgtttctcatggagaacaccattcgtttcaaaacaatcagttgactcgtaagtgttgactactcatgagacattcacttcttgttcaatggattatttgtaaaggccccattatttaccttatatgatcagccgttgccaaaatttaaattttaaattgattttgaagttttttggttaaaatttatttttccgcattagcttttaaattgtttaagaatgtatatacaaaagtttaactcacgtattattattattttgctactagtgcgccatacggcgtattatcctcatatgcccaacagatgggggcctaacctttttcaaataatgataataataattgctgaccccaatcccatatgttttat

SEQ ID NO: 34845 - DNA, 1278 bp, Oryza sativa
taaatcgatatgagataactacccatctcgtgggcaaaacggaaggtttccaagacaaacctacaaagaggtgtcgcactctcgcagcagcggcggatggtttacggcgcaaaccgacaaagatggactaaactagggtaaaatagaaaacatagtaaaagaacgattcaaatagattatattcgggggttttacaatgaaccggccttgtcccttaaataggggttggtcttgccctctacaggcccttctccacgtccaactcgggatagaaattaaaggaaactcgaaacatgcctttccgagcaaggaaacccgagacccgacgaaaacatactcggactcggaccctgacggtctgaccgcccacatacctgcggtcagaccggccctactggccggtcagaccgcccacacacctgtggtctgatcggccctgtgaaggaaacccgtcactttctaaactttggcaattttcccctatttcgtccataggtgccaaatttgggtataaacaagttgcatgttgcaaacttgagacgataattatgcaactttttatcaattatggttggagattcacaaatagacttcaataatgtgttctccttattttagattcgttacttattttgttcattgggtgttttcaatgatttgttgaactacattcttgtttaggtgcttctctataataattggctgtaactctcttgagtaaagaccgagatgttatattccattatctaaaaaaaatacaacagccaatccgtctaggcatcgatcgatcgttgatgctgcgcaatgcaactgtaattaaagagcacaaggaaattaaattttccatttaatttggtctatttaggtggttgcaacttgcaacataatgtcatgtgttcatgtatacttgctgatcgatagttgatgcattgatctatgctagctcgatcgttttcccatgctttgctgggagggacgtcgacgggccacgggagcgcacgtacgtgctggttccagcactactaaagtactaactagcgtacgtgtacagcattattgcataatcaagggcatattcagactgtagccaaaataaacctggcaataccaaaattttggcaacatgtcaatattgccaaaattttaccaggatttattagtatggttgaaaatggtatcaaagtgaacatgccctaagatagtaagatgcatgttactccctccgtctctaatatagcaatcaagaatcggacgagatattttataggggctgcagga

SEQ ID NO: 34846 - DNA, 1309 bp, Oryza sativa
  unsure (1)..(1309): unsure at all n locations
tgtttaatctagggtgaacaaggtaataataacaataacaataataataaggtcataacaaaggtagataggcatggctagataaaacagtgataacgcgggaatttaaataaagcgataatgcaataatttaaagcaacataattttataaactgggattcaatatgttcaaagatgatgtgacttgccttgctcgctttcccaaaacgccggcttcaacttccacgaaaagcggatcctccgaagctgcagcgtctacacgaccaacggaaaagaaaaggcttttactctaataaactccatataacaagcagaaacaaagcacaaaaatgggttcttgacttcttagggaaaaattagagacttgaacggtccaattccgagttcaaatggccaagttatggccatttgaagtttatatgctctttaaatgaatatttgcgaatttcttcatttaaattttaatttaaaatggattttttgcgtcagccgaggggaggggcgcgcggaccgggtccacgggcgtgggacccacggcgccggccggtgtgagcccgggtgcgcccggtccaccgtggaccgtggggctgccgccggtccaccgtggacggtgccgtgccgcggcggcgtcgtggcgtctcgtcgtgtcgtgccgctgcggcatcgtggcgtggcgtcgtgtcgtgacgacatcggcgtcgtcgtcggcaacgaggcggccggcggcaaccgagagggaaagagagaggttgagatcggagagagatagctgatgagagggaggcggcggcggaggaggcggcgacgacgacgagcgcgagacgacggcgagatacggcggcggcgtcggcgcagggatgccctacgcagttgtggcgaaggagaagtcgagagagatcgatcgggcaaaaacttctaagtgttggtggagaagacgagggcgagcatcgggaatatatatacccctagatctttactcccggttctttactcccggttgttctcatcaaccgggagtaaagatattttcccgctatttccaaattctttttaaacccggttagggttaagaaccgggactactgataagcgtactgaatattattttccattacatatgtgcttctaaaatagaaaataatgcattaaaattatttaaagtacaaagattaatgacaattacttcgaaaaattattgttgttctngtaataaattaagtggataaaacgtaataagcaaatatatgatttaaaattaataaaaattctaataatcatatatacttagcatatgaatgatattaaatt

SEQ ID NO: 34847 - DNA, 696 bp, Oryza sativa
  unsure (1)..(696): unsure at all n locations
gtacagnagttcatcagaacagaaatgtctttgttactgatgaatcttgggttgaaaaattggagatgttgagaggttacgcgatgccgattgcgcaccccgcgtgtaagagtttgcgcacgaatcgatcagccgctgcgtcttcaacctgctgatctgcgccgcctacaccaggctttacatattcgccaccgtcgagttctccgcgagagccgtagttctcacagcaatgtaacctgaaacgtgacaggctctcaatcccattgatcatgacatgaacaaatgtgtgctattgtgactattgagttggatgcgttaatcaggttaccagaacttaagctgatgagagaagacggacaattcaacgacacggacggttcagagttccgtacatttgggaactctgaaactaagagatgagagatttttttgattgactgattgattaccgtgcaagttcattgtgccggtccagacctaggagtgcggctgattcagcaccgggaaagactcgccagagaggctcctataggctacctcgatccgggccgtcaatcaccacgccggagacggtgacgatctcgacggacctgaccgcgacgacgtacaccacgcggacgtngagcacgctgacaacctctgccgatgtcgagatgaacgacttcaccagctgtatgcccatcaacgacgacatcc

SEQ ID NO: 34848 - DNA, 744 bp, Oryza sativa
gctaaatgaggctggctcggtcggatgtgctactataataatgataaattaattagaataataatgttcatagattgcacatataaatggtataataatttgggcatgcagattttccctgaaaggatttgtctgaaacacaaacaatctataccaacaaatcggttttgatcaatttgaagtactaactccagccgttcactaaaattgttcatctatctaccattaccagctggatcttacatccttcatacttcattcatcaaatccaacagacgaaaatcatctgacgcttcagatccaacgaaccatctccctcagcttccaccgcgcaccgctccatcccacggaatcgccgcacgcgcaccactcccatcccacggaaaccgcatccgccatcatcgccgcacctcgctctcccccaaccccaaatcccgcatcaatcgccaatcgccaatccacatcgccaatcgcaaggacgtggtaacaacaggtcgcaacaaacccccgctctaccgccgtcgccgaagcctccacgcgaggacctgcgcttctgctggccgaaccattcccccaactcgcacgctatccagacgacggcgctgtcatggcccagcctcacaaattccgcgtcagtggcgccgccacatcccaaggttcgtccctttcttccgttacattactctgttttgcttcctgccgagatgaaatgctgcataaacaatctcccactgggctgcagga

SEQ ID NO: 34849 - DNA, 1172 bp, Oryza sativa
tttttttcaaacttccaacttttccatcacatcaaacctttcctacacatataaacttcaaacttttccatcacatcgccaatttcaaccaaacttccaatttttgcgtgaactaaacacaccctaacctcaatagcatatgtatgcaacttttgtagtactaacaggcaagcaagatgccaaagcaaatggaccatcaccagcggatggaaaggcaagcatcagattggctaacaggcaaatggaccaccagtatttcccccaatacactgctagctagtactaccagcctaccactatcacaatcccagcaaagaaaaatggcagccgtttcactggaaatagctgttggcacatcagtgcctggccagccagcagcctgctctgccctgcctgcctctactcatgaatgatactagtagctcccccaattcatacgaacaaacaaacatccatccaaccaggcaaaagaagcagcagagaagcaaaccaataaagaaagaaacggcagctgggagggcattgaagagggcccctggcagcagttggggtagctttaagacccccccttttaacaaccttatttgagaagagaaaggcagctggtgatagctaagctactccttagatagaaaaagcagcagaggacatttcatatctcatctcacctattgccagtacatgcaccagtcccaaaacgacattgagccaaaagatggcacacagaaatcacccaaaggccaacccccatctccactctcgaagtggcagccatgcatggcaacagtgcagggcgccactctagtggccagaggcagcacaagtgagggaggaggtgaaagagacaaggcacaataggggtgatcagaaactatgacagagtacagtggaacagtgaccactgggaagctatctccactgtcagcaatggaggcaggcggaggaatagttgctggatagcaagaaaagggcaaagcttcgctccactagacactggtgcgagtgggccccagctttagtgcccactgttcaaattacaactctgtaaaaatacagtagggagggccaatcacttttagccagaatatcttacattaattttattgtagagtcaaagaggtacaagggtgtttacctggtagcacggtcacgattcgtggtttcgcactcaa

SEQ ID NO: 34850 - DNA, 667 bp, Oryza sativa
caatttttctcaaacttctccccaattttaggagctaaacatagccctaatttattgaatactagtaacatacccctatgttataacgaatcagacatgtataaggaaggataaactataagtgtgattgtagggtaaaacttagatcaggtcattacttatatgatgcacgtgggcgcgctgcgcacggtgggagaaggggatggaaagaggatgaccctacttttaatatagtagagatatactctttgcaattttaaatttttgcacaagtaaatagctcaagtgactttgtttccatttgtttatactaaattaatggctcctttgaacagtatgattttcctagaaagcatggattacaatccctaagaaaatttcctatacatatgcccctgtggattgagttcctatgccccacttccttgggaaacttaaacgatgagctcaattgctcaaacttcattctttcactttttgaaaggtccaatgcaactcttctccatctatctactctcaaatgaatctaccaaattcctatatgtcttttctatgtatttttcatttgaagcatccaaacaaaacatctcatattcatgtgttttagggttcctttgatttagaggaaaaacaaaggaattttggagggttttaatcctatatgaaa

SEQ ID NO: 34851 - DNA, 792 bp, Oryza sativa
cccatgtgggaagatccattatgtacaaacttaattaatagtacaagcttagtactactcgattgatctcatcctctgatccaaccatcacatcgattattacgagagtaattaacaacaaggggaagaaaacatggtaagcttagctacctggagggaagctaattaaggttttgagccaataattgatagctgttggagaatgcaaagggtcgcctaagaatatacaaatgtgagctaggactctgacatctcatcacattagcctctcttttttttgctgctaactactaattgtatgtttttttaatttggatgtgacctgatgattgacatggactgcacttggctacatataggccatacaggaaatattgccggccaaggttgtgtttagttcacgttaaaattgaaagtttgattaaaattagaatgatgtgacgaaaaagttggaagtttgtttatgtaggaaagttttgatatgatagaaaagttggaagtttgaagaaaaagtttcagccctaggttcttttttacactcataacctgtatatgtatgtgcaacaaaataaaagacacgatattactatatatccccgttccaaaatataagagtgtatgcgaaaaagcatgtatcctaattgttgtagtgacctaggtagcatcttaagatcccgagttcaaatctccatagaaacaaattttagattgggttatttatggggctaagttcccaattaaaaggctgcatatatccggttggatatagaggctgggtaaaaaatatccttc

SEQ ID NO: 34852 - DNA, 1202 bp, Oryza sativa
ctagtctctaagaagactcataggggtatgtgtatgtatgagttcatagaggtgagtgtgcgtgttgtgagcgcccgcatttgtactttgttttaaaaaaatatcaaacattatttattgtttctcttttaatttaatagataaaataatagggaggggacgacattgttgcgtagatatgagagtgaggaggaggtggagattttgtttttccaatttttctaatttttctaaatgacttaagtgaaagcctacgacgggatgtttcattttttttaagaatttccaatgtttatccctttttttataggacgtgccccatggtaacttaagattttttttcaaaaaaaatagatctaatagttaaaaataatggagacgtcaatttaattgaattaatttaatctagcacctcgtacgtccagccacgtgtcgctcggtgattcgcagtcagtgttcgttatgttctttttgtttcttttcgtgggaaaaaggctgttggttactccctgtgtcaaaaaaattagagataaatatggaaaaattcacatttatccatatcttaactacttaaaaattagtaactttccaattgtcacaataattttttgtccgtcaatccgaccaagcggcaccctccatccacatacgtgcaattacatcccatacgatgcccaaagaaaaaaaaacagagtttgaatcaaaataagctaaaatttctcacctattttgactcggaaattataaaatatttcctccagtgtcctatagccaattacataatttttgtagtgtccatcagccatgtcacgtttttacggtgtctcccagccaattacacgttttttgggtgttctgtatcaaattttgcctttttcttaaaattttaggacatattatatggtgatttattagcgctctagtgggctttaattgatttttgttacctatagtgatttagtataacataatacatatgttcgattaattattggctgttatttagttgccattcaaatgatagggtctaccatcaaatgatgtattttaactttttatagtaaatatagctaatgttatcttgatttatttatttaattataaataaaacaatagttatattatgttagttaaaaaaaagaagaggagataattgaattggagaggagatgatgggtcagtccgaggtatacaaaaggtat

SEQ ID NO: 34853 - DNA, 1818 bp, Oryza sativa
  unsure (1)..(1818): unsure at all n locations
acatgtgggccacagggtctatggggcccacatatcagtgagcagtactgtatgtgcagtactgcagaggacccttactcgctaaacccaccctcagtatttaaactttgtgctcatgcaacatggcgaattgacatctttaacatgttaacattgcactaataactacaccattgctttgcattttttttagaattcgtatgtacgtgtatttgtttagttgtggagggattatggaggattggagggcatgaggttgatcagagcagtcacaaatcctgctgcaaatgaatgatacccagatcctgacttatgtgttgtaggaggttgatattgttgtactgtgttgcggtctctgatctatataagtggattgggtaagttttgttgcaaaattatgcaaccacatcatcaaacaattttactggtcagatttctactctgttacgagctgttggattcacagcatatgaaacctcttccatatcatgtctctagtgttgatagaatagtgcatacattaccagagcaggatggaagtgatatatggatcttcttctatcgtggtctaaatgtatattgggcaatgggcatggatacaaatagatgttctcaaggaacaagtacaatacactttgtgtgaantaattggagaataataattacatatgtttcatacactgctagtacaagatgtgaccgacttttccttgctggccgatggatggctttttgttgttgagtatgatgggtggctcgacatgtgatacttctagttgctcattactcattcttttgtcttgatttagtcctaaaatttaaatttaaaggtctaatgtggnactccctccgttcatctagttgacagntattttgaaacaaataagtgagcttgcggtccatctcgttacgtgttattggttgttagacatgacacgagatttgcttggtacgtgttaatgcttgctacatgatatcaagaaatacggcgcattgcacatgccctacatgtaaactttgtgaaagctgttcagaactgatcgagtttgtttgcatgacttatatcatgctgctgcaggatggcaacgggcaacatgttataaataaacagtttctctaagttattggttgagaatgaaaattagcatatgtttttgttttagagggtataattagcgattggagagatattggaggaaaccaaatgttaaatttaaatttggggtgtgtaatagttggttagatagtcagcaactctctttaatgtcatctattgagttgctagtagatgataaaaaaagttacgttaatttcatctattgagttgctagtagatgatagaaatagttgcattggaggtgatttgggatcatctagtctagtacaaatgttgccatgaaagatgcggtcgctaagtatgcattcaataataatgaactagtgatctatccaaatgaggtaactcaccaagatcgctatgttggagtccgaggagcaccacttctagtcgagccatgtcagactccgaggagcaccacttcgagtcgaaggccgaggcccggaaccatccgcaagaatgggtagatcgttattaggtttctacctcgaatactggtaagcacggttgttggcggatggcatgaggcccttcgaccaaatctgccgaaacccgtggcgaagactatggagcaagaacggcgtgaggcaaagagtcgtacgagtgccttgccaggccagaggcgtcttaggcgaagggtgcaagacgaagactatctgccgaaggaagacgacttcgccatggcaagttcgcccccgcaa

SEQ ID NO: 34854 - DNA, 1460 bp, Oryza sativa
catttaacccaatcactgctcaacgctacaccacgttgagactggcccaaaccaccacctgaactaatcagttccattatgctaagctaggggtgagactaatcacagtgaatctggttgatcgcccataaccacgagcacggctattcgaatagttttactctgatcagaggtatacaactatacccacaagacacagccccacgacacattcccgtgagccgacatgccatcacgacataccaaaaagaggccgtgacaggacccttcgcataacccctctaaccaagcacaccacacctcaagtttcacccccactcctcaaaaggcaatgggcacctctcatgcctaggtgaatccagaagcgacaaaggccatcgcagggcctattccgctccatcacgcccacccttacctggatgtgtcggctagaggaaagctacactacaactccagccgttgcccaccctgcttgtggtaagtacgataagttcttccagggcatcctgcgaaccggtccttaatcgccatgggcacgaccagcaaaaccatgcacccacagcccaccatttagtgtattttaattaaccaacaccattgcggtggtactaaaccaaagtcatgctagattccaaagtctatgtatagtgtgtttccccctttgtgtactagttgaactaagcatagctatgcaattcctaatccaacatatagccatgttacaacctaagctagcaaaggaataagatgaacaaatagtatggctgataatagtaggtaaacatctcatctagtaacattataaaacaatgcataattttaaagaaaacatagagcatttgcaatataggatcaatatgttcaagtaacaagcatgacttgccttgctctgcggctagagggacctcggcgactatttcaaagtacaccgaagcgtcgggagagccagaatctacgcgacatacaaggcaaacaatgcaaacatgctataagactactaaaacagagaacaaaacattttttaatggattctttgcatttttcttgatttactgagacttgaatgggcttaaacggagcacagtggaccgagtccacgggactggggagaggagcaccatgtgacgctgacgtggcgccgaggtggcgcacacgctggcggccaagtgggcggaggcggctcgcagccggcgcgcacgggcggcttaagccggcccggcgccatggcgacgcggcggcggcggcgcgggcggcgacctgcggcgaacggctggcggcgaagagcggcggcgatgcggcggtgctacaagggggagagggagagagggagaggagatgctggtcctcaccgagggattcggtcggcatggaggaaggcgacggcgaacggcgaacggcgacgatgggcggcaagatgtcgacggtcacgggcgaccgagcttcgtggtaacctagggaac

SEQ ID NO: 34855 - DNA, 946 bp, Oryza sativa
gagggggcgcgcgggccggtgggcctcgtcctgaggctagcccagcgaaggggtgcgggagggaaacgggccaccggcccaccaagtgaaaaaggagggggggaaagagaaaaagaaaaaggaaattgatttccagggctttaataattgcttgtgctcaattttaattgattaaaattatttctagagctctgaaaattctactaaaaatcctgttagcatattttgacatgtagaacccaagaaaaattacagatgccattttcgattattaaatgcatttattaaattagggtttctctcttgctattacacaaataatttcttaagaccatttattaattcaatttaggcttgggagaagaacttcaggatgtaacatccatgcactaataaactatgtcgttttccatgttggaaggaaaggttcccaactcgttgaaatgaacacagccttaatggtttggcattataattaatccatccaagcctgcgtctaatgtatgatagaagacttggagcgaggtgtgtgccacagtcacgttcatcctcgttgtatcttataaacttaaatttaagacctacagattcgtgaaaatgagtagtgagcaatgaaaagaatcaacggtccaaaactccaaaagcccatcatggcctagcaatgtgagttatcgtccatctatctcaatttctcccttctcattgcattcgtgatctttcctcaagaatgtcggaattttatattattctcacatggagtagtagtttaattcctgcaaactttctttttaagaaaaatcttcattccaaagtttttaccacattagacctttaagtttaaatttttgggtgcatcaaaacataagcatgagtaatgtgcacctgaaagtatcacacgcgttcgtcatggatttctacccacaatagagaaatcgggctgcaggaa

SEQ ID NO: 34856 - DNA, 742 bp, Oryza sativa
catgttgtaaattactttcatcatatatgtaaattacttttagatttgattaaattacttcctggatatttgttaaagtaaattcaataaagcctaaaagtaatttacacatattataaatgtaacatactaacataacacgaaatgaaagtaagttatcatggcactaaaagtaaatccgttgtaggggtaaaaacatgagtcttaagttacatgttcacaatataatcaatttctagaaattcaattgaatcaacacaaagtatagaacagaataaagacggctacaaaagtaacatgttcacggtattatcaatttctaagaagtaatttaatcaaatttaaaagtaaatacatttatgagaaaagtaatattgatatataataaaagatatttacaacatatatattttcttcattagaatataatcatgtaagatcttgctgtaaagatttaattaaacaaatacaacggtacaatcggattgtagatcggataagtaatttaagggaaaattttatatgaagtttaaatgtagcgggaatctttgtttcatgctcacatgtgggaaagtgatgcatattattttttggtatttattgaaatggtaattatttaagattaattggtgcacaagcactgtgcagtggtgtccgtctttgatctgtttgcgtgcaatatttatgaaaaaaggacaacaaaaccttccatttaatttggaaaagcaagctttctacaaaa

SEQ ID NO: 34857 - DNA, 679 bp, Oryza sativa
  unsure (1)..(679): unsure at all n locations
gcgtgtannnnntatagtatcctatgctnnnnnnnnnnnnnnnnnnnnnnnnnnnnnnnnnnnnnnnnnnnnnnnnnnnnnnatttagtcgataccggcagaaaccctaaaatgagaagcaaccgataaagctaaattgatatgttatcgcaaattagccttggggttatgaaatgagttttgtcggtaataaaacctaataatgccacgaacttacttaaaatatgacacaaatttagcaataatatatatttcatagcattacaaatccactaaaagcaacatttgagttcaaaagtgcaacttaaatagtttcaaagttgctttagcaaaaaccattccatacgaattttaaaggaattggtagaaaataatcatttatttcaaaggaacctatataattatttttcataagataaaattctctaaaatttctctggctttttccattgtttcaaaagagagcctaattacatggttgctggtctccgtcgacgttcatttggcggccgtagagcaagttgggggcggtcgatcggtcagactgtccaggccgggggcggggtcttctctgccgcgatcgacgtacgacgtgacgtgtgcggttgcgcgcgcgtcgtcgtgcatgcatgatattatgatatggtgggtgacgcagctacggatcatgccgggatgt

SEQ ID NO: 34858 - DNA, 515 bp, Oryza sativa
tttttctcgacagttcaaacttcactgagaaatgttaattgatcacactaatttctttttcttttctcttatcagttacactgtaaactaataaattatgtatactgaactaagtatgagcatcttgtatgacctgaagtcaatatccgtgggtttatttttcgaatgcgtgaagcggcagcaattttcatcgcccccatggcttctgtctgttcttcaatgcttgccatgcaattggagtatactgattacatctacatcgacaagtggttcgtccacatgctggagggctctgaattcctagccatggacgcccgcttgctgcataggaaggttgggatccatatgcttgtccagcctgcaggcaagatgcagtcgcaggtggccacatgaatgacatgtcagttcagaacgttcagatccaaggctttaggtcaggcaggcagaactgctgaattttattatggcacatgatgaattgctgcgtattgccttgctaatgcctggttcaaatt

SEQ ID NO: 34859 - DNA, 543 bp, Oryza sativa
atttcatatgaggattacactaattttatgaagttttatgagctaatgtatagaattatgtttctatttcggttgcgagctagttacaaagtagtcccttttaattctctacaagttaaagctagtactctctccagtcataaacatttgatacttcagataagattccatcgaacttttggaactttgacatttagttacttttactgtttaacttttcaaactcttaggctcaaaacataaatatggcacgtgtgaaaagtactttcatgatcaacgaaaagcacattatgaaaagagcaatcaatgtataataaaagagatttttttcggtctagcaaaaatatctcgagataaaggtacctcatggtactacgtatatcgtttctgatcgttggatctagctgggtagaaaggcatacgattagaaacgatttgatcggaaacaatttggtactgtgaggtatcgtacctccagatactttttgttggaccgaagcaaatctcataataaaatttgcatgcacgcctacgtgccatttg

SEQ ID NO: 34860 - DNA, 632 bp, Oryza sativa
ctgttcattggatcctcgccgtccagcctttcagggcattgcttgacgatctaaaactgtaggcgaacgtgtttttctgcagggtgaggagtacactcctcgtgtggtctgtacaatgtccaaagctaaagggatgagtaaataagggtcccggggcctcgtcttttttgcttatgcccacatatattagccaaaatttaaatttttaaccttaaatttatagctggttttaaaatttttttattaaagtctatttttcattatgtacttttagattttataagaacacgtatatagaaattttatttataaattacttttcatttataaatatgtcgtttcgcttattctaggtataccggatcgaaatccgcttacgaccgatatcatcgaattttgtgaaatccaatcaaaaacttccttcaaacttttaactttccattacatcacatcacatccaaaaattttcctactcacataaattttcaacttttttttaaactatcaatttttctaaaatttctttccaatttcagaaactaacacaagccaaagttaactttgatcgaaaacggaatgatctggttttcaaccccggtcaggaaactggatttcgcgaattcaaatcgatt

SEQ ID NO: 34861 - DNA, 834 bp, Oryza sativa
cctggagagaggagaggagagagagattaacagaggggagagtcggagagaggaggaagaacaggaggaatgagttggactgacacgtcaggctcacgtgggtcccactatttttttttaatttttttacatgaaactgatatgtgggttccacgagatttattatttttttctatatcaaattgccacgtaagcgccaagtcaatgtcacatcagatgaatatcaagtcaaattagccacgtaggcgccacgtcagccaaaaccgctctaaaaaccgccgaggaacctaatctgcgagattgctattcggcgatcagtcgcgcgccttcctcctcgcgcgactggacacgtgtcgcgcgcggagagggggcggcgatgtgccggagggaggagcgagtttttcggtttttttctccctttttttcgtttatattcggttggttttttcatcggttttttcgtttctgtttggttttttcctccggtttttttgtttctgtttggtttgttattttttcggtttctcttctgttcagcttttttttcctttttttttcaagatgtataaataccaagtttgtattcgtacatacagaaagtttgtatacgcgtatacaaagtttgtatacacatatacaaagtttatttacgcgtatacaaactttctattcatgatgtatttttttattttttatgtgtatataaactttgtgtatgtgtgtatatattttttatgtattgaaatatcttcataaatatatatatatatacgcacgtatatatatagtatatacatatgatgtacatatgagagactagagggaggagggggg

SEQ ID NO: 34862 - DNA, 703 bp, Oryza sativa
ttcctgcagcccttgttcctgttcctgttcctgttcctattttttctttttctgaaaaaaatgaattttagaattagcatgcaatattttcattgcacgagaaaaataataggtgcttagttctttgtcatcggttcatgcatgccacatgacacctcttatcttgctgtatctatatctgcccatgatgtgctagtttgtggtactagaactaagttcaagcatacatcttttagggtatgtttggatcctaggcaagagaaatcttatcctagcttagcaaggacagcagtttgctaacgacaataaaaatcttacttctgtgggaaagcttgcctataactgcccaggaaagcttgcccagcttgaaggacataaggcacttctgtgtgacagttgatgcatgctaggctacaaagccaaatgttgtgcttagtttctttgagctatggcattgctgggccaatttgtgctggatatgtgatgcgaactgataataagatataaacctacccttagtttcgagctgtgttgtttcaattaaaagcactggttgatctgccagccggcaatccttggttgtctgcctgcgcctgtaggtgaaccatcagcaaacctttttgtgagttgaagatagtatttttcggtagcctttgctagacttaacaaagctaaaaacaggattcctcaactgatcaagaat

SEQ ID NO: 34863 - DNA, 731 bp, Oryza sativa
  unsure (1)..(731): unsure at all n locations
cacgtgattagattgcgcgtnnnnnnnnnnnnnnnnnnnnnnnnnnnnnnnnnnnnnnnnatcccaaaaagatatatcactactaatggtgcagacagcatgcatccatatatcacattcgctagtttgcacagctggtttggatatttcatcgtccatatattcgttgaatcattgaacaccttacatgttactagatgcatacctttggaccctccaaaacaagagaaacatgttggcaataggatggtccgtttggacgactgaaaatcagtgtgtggttgcagcttgtgcatcatctctagcggcctagcttcgtctgtaccctgtgtagtatagtagtaaataacgcttcagtccggttcaaacctccggcgataggccttcgcttcactccgtccgaagttgatcgttaaatgtgtacggagtacaaataaggatgtctttagttcaacgcaaagtttgaattttggttgaaattgaagatgatgtgatcgaaaaattgtgtgtgtatgacatgttgatgtgatggaaaaggactgaagtttagatacagcctaaatttgaattacaacccaacacttttaaacttgttcgccaggttgattaatttgtttggatgattttgactaactagagaggagtacggacagacacgtaatgtgacaagactagggaacgagccgggacatccataaaagtaaccgtaagtttacacatggttttcagtg

SEQ ID NO: 34864 - DNA, 674 bp, Oryza sativa
ctaaagaccaagtttttgttggcacaaataacatgtcgcaaagccttaggattatgtttctccaattttcttttgctgcccaagttgagatcatcaggatctgtttccttctccatatggtttgcatcttgcggtaacaatggcttgtctttctgtgaaaattccatgcagatgatgcaaatgccacgcggcactaggaaaaaaacaaaatggacctagcgctgtggtaggggacttatcaatgaagcagtggcgcctagctcagtgacgccaccgcagtctcgacttccaatggcgttggactctcatgctggtaccggttcctttctcttccatgccactgctgtctacgatgagcctcatcaacttcagtgccgccacgggctcgccaagcttcggagcttctaatcaagtcctataccttagcactaggcccattggcgcttatggtgagaggttagcatccacatgctgagaaagtattttctacacctaggtgctatggcacttaggtatatgcatgcaatttaaacaattatataaaaagtttatataatttaataagataggccatgataattaagacactatacaaaaatgcaagtctaaattcggtcgatgtatgaagaaacaaaaataacaaattttatctgcgtggtatgagtactattcaa

SEQ ID NO: 34865 - DNA, 2900 bp, Oryza sativa
gcggatgtagcctgtattgtaggagtagtttacaacttttcgttgcttctttgcacctcgcaccctgatacaagcaacttcttttttttggacattttggttggtcacttttaaaatctgacaattaaggatttatcacgcgctatctataatatatggatcctcatgtgtatatgatagatgggtccagtaataaatcatttatcaccgtttataagagtggcaaataggtaattattcttttttttccatggccacaacaaaaagatgggtttgtccttgtactagtactaaactctcatgattaattctctattaatttgaggccaactgtactaacaagttatattatagaagtcttgccaacaaaaattcatatctcaactatttgatttattcattttgaagttctgataaattaagatgaatttttttaagggtcaccactcacgaggaggagaggttccccttctgaattatcgttagtaaatacttgaaacaatatgtataacagatgaaaccaaaccaaagaaaagaaattaaaactaagatcaaatcatagtgtaccacgccaatttttatgaagagtctgaccagtctaattttttttaaaaggggctgttcagattgtaatcaaaataaaccttaccaaattttagtaaatttgcaatattaccaaaattttaatatgatttcttatgtatttattaaagtttggcaataaactaaatgtaggcatttttttagcaactttacccaaaaaattgtatatttgaaaatggcatcaatctgaataggcacgaagagtctctaagaaagttttcgtgtgtgtatcattttctatttgagatagagcagcggctttctataataacaacaatttattaggccaaactaagggggtgttatcccaccctaaaatcttacaccccgtcacatcgaacgtttgaacacctgtatgaagtattaaatataggcggaaaaataactaattacgcagattgcaaccaatctgcaagacgaatcttttaagcctaattgcttcatgatttgacaatatggtgctatagtaaatatttgctaatgaaggattatttaggcttaataaatttatctgtgtgtccgtatatccgatgtgacacgcaaaaacttttcacccctaatctagacacaacctaaagcttcgaaaaatacgtgtaaattcccagaatgacgtaaccagatattactctaccatatcgactgcgtcatcgctgatccatagagaggaaaaaaaaacttgtgccatttgaggcgcaacttagcaagacgtcgtcttggttagttggttgccttggagacaaagcataaatgcataatcagtataggagcaaatcgttttaaaaaaaaactataggagcaaatcgcgattaaggaggtgtttagatggggctaaaactttttagcccatgtcacatcgaatgtttggacgctaatttggagtattaaacatagactagtaaaaaaactaattttataaatgagagctaatccgcgagacgaattttttaagcctaattaatccataattatcaaaagtttactgtagcatcacattgttaaaatcatggcgtaattagactcaaaagattcgtcttgcgaattagtccaaggttatggaatgagttttataattagtgtatgtttaatactctaaattagtgtctaaacatccgatgtgacagggacttaaaataagtccctgtaaaccaaacaggccctaaatagaatcttgggggtgcaaattggcaaccccacttcttcccggaggtgcatatatccgagacgctcagcttctcgaagcacacgtcgcgtcccaccacgtctctctctcctactgttttctcacccaaagatccgattttcaccaactaaacccgctccgatcaacggcgcagccaagccggcgcgcgttccaggcaatggccgtcgagacggacacggcgagggcggcggtgtcgtccgagacggcgccgatgtcgccgcaggccgaggcggcgccgcgcgccgccacggcgcgccgcgggaactggctgcggcgcctcataccgcgggactacctgtcgctcagccggcgctggaagctgggcggcggcgccttcgccgcgcccggcggcggcgcggcgtcgaggaggctggcgtcgctgtcgcggtcgctccggtggaagcggcggctcccggggttctccctgaccctgcggagcggctcggcgtcggcggtggtcgacgcggttgcgttccgcgtcatgtacgtcgtggaggccgtcgtgctcggcctcgcgctctcctgcttcttcctctgctgcggctgccacctctaacctctcctctcttcacaccacgccataatcgggcgtgcaacagctgcaaccatcttaattttccctgcttttttttttcttttttgttcttctcttgatgcttccgctgtaaatttctactacctacctttcggtgctaagattgaaatttgcaatctgcaaactgcaattcgtattttcttctctttggatgatgcaatgcaagagatggatggcgtgtggggacttctgatcggaaaacccaatgaaatgatttatttgtcgctgtctcgtgtaagagtagaaaatgcgacagctttgggtacacttggggaggtagaggagtagagagtggaggtggtcatggaggtggacgtggcggcgtttgggttccctgctccggtgaggccgggggcgacgcgggtggggtgggtgggcatcggcgtcatgggtggcgccatggccgcgcgcctcctcccccctgggttcgcggtgaccgcgtacgcgcggacgccggccaaggcggaggccctagtcgctgccggcgcgagcctcgcgggc

SEQ ID NO: 34866 - DNA, 511 bp, Oryza sativa
gctgccgatctgccgttgctgctgcttgtgcgttgctgctgctactgctgctattggctgctactgcttgttgctgcagaagaacaggaaggaggaagagaagggaaaaaaagttagaagaagggaaatttggggagtttggtggatatttccaaattctttgtttttcttacaaaattagtacttctaggtaatccgttttattccctagttgtttctaatttatatataagacgttccgtttctggtagcttgaatttatttttatagaacgctaggctgaaaccgtattttcaattctggtattaaaccatcgggattcaggttagttgtcctaaataaagtttgtagttatcgtcgatatctttctaacactgctagtttcgttcgattctgataaacagtttgggagaaacaacaaaaacagtactgctgaccgggtccggaaatcaggacagcaattcgttttccttaatctgggattttcataggcataatctgattttgtgcc

SEQ ID NO: 34867 - DNA, 537 bp, Oryza sativa
ccttgtggttacatgtcactcaaatggttatgaaaaaaattaaaaaaaattaagaagatatattaacatgtgatataccactccacaaacatgtaagttcaaatttaacttctaaatctcataacaaaaaaataaattttactgtgaatatatgttaactagctgtagtttaattttttttttgtgagatgtacaaattcaatttgaactggtatgtttctagagtaatatatcacatgttgatacatcttctaaattttttttatatttttttataaccatttgagcgagatacaaacccctcaagggatcaaaatccactctcaggaggacctgtttagatggatgttattttgaactatataattttagtaaattaataaatatttattttgttattaatactattggaatgtggggatgttatcagcgtactaaaatttggccattgctaaattttggaaatgttatttttgacaataatttgaacagcttgaaatgccacgtcaggcataggcaacattctgagttattcct

SEQ ID NO: 34868 - DNA, 592 bp, Oryza sativa
tgtattccaaatgaacacttttatgtcatgaaaacaacagcaaattaagcacagaacacgttatgcatcttgagcatctaggagtgtagtacagtagttgtaacttcgtcacacaaaagacttcgtaacctggataagtacagctagcttgttggttgttgccttgttcacagttcacatgcatagtagaaccataagctaaccgagagaacctagatattaactgagaaattaaagggtcatgcatgatcatgtattgtacaatatgaaagtgatttcatatccctcgagagttatcccatcgttttgtgtatgccatctaaatagtcataaaaaaatttggtaagatagattaatataaaatatatcactttataaatatgcaagttaaaattcaacttctacaagttgtaacaaaaataacaaatatagcttattttgttacaacttgtagaagttgaattttaacttctacaagttgtaacaaaaataacaaatatagcttattttgtttttttggtaacttatagaaagtggaatttggtctataaatctttttaaaaaaagtttattactatttaaatgacatgta

SEQ ID NO: 34869 - DNA, 633 bp, Oryza sativa
cccctttgattatatcctgcatcataccctctattccggtatgacttgctgagtacagtggttgtactcagtcttgctctattttccccaaaaccccagagattgagtgcgtgtcagatggtggcttctccgaggagtaggcttcgtccgtgccgtcgaggatgcctgtggagtggtgttctcgctgcagtccaagtcaaggcttagctccatttatcttttaattttccgttgcatttatgtaagacttttataatgtttgtaagacgtggatctgtatgtcaactttgtcgtttgtgtaccccggccggtcctggacgggggtttaaatgcacattctgcttggaattctattcgggaatttctgggcgtgacaagttggtatcagagccgaccttgaccgtaggacaagccaaatggaaaacctaagagccctctgaatccttttcattgcatatgttcttcgcaatttgatttgctccgggaaaattgggatttgttcctgtggttcaagggaaaaaagctttgtcgcttgtttaagtgagatttgtcaaatcaggtcagtctaggattttagtaaaattatttgaggtttatttgacagtgaagtcgggattggatgggaggaatgca

SEQ ID NO: 34870 - DNA, 530 bp, Oryza sativa
ttcagtactgtgtatgcatatattgatatatgggaaacctgatcatgaacgagacggctggtgagatttgacacgcaacttgaccatttcttggttggtttggacatctcactagctagctgaactgctagatcgttcccaagaaaaaagcagatggatcgatcgatcattttgaccaaggaatatgcatgcagggcctatcaatacaagaacgtttgtacgacgttttgcaagctagtcagccagccaaattaagccttttggattcacctgcacacacgtacatgtcagacagtccgagtcggtgttaactcagtcatggagatttcgatgggtttggatgaagctgactttccttttgatttcaaaggtagccatcgatcgacaccagcaagtaatagcagcttgcattggtcgacgccaattaatgaccggtgcaacggcgaccatcgcggattaattaactagctgttgagaccaagtgtcgttgagtctaagagtggattttaaactgttgatagaacgtttac

SEQ ID NO: 34871 - DNA, 506 bp, Oryza sativa
agatgatttgaactgaaaaggtcatcaataacaaagtggtataactcatcaatgtctataacttttatttggatcatttctttatccgacaatgtgatttgtaacattgttcacaaaatgtacatatctcttatatagtttataaactataagagagatatgtaaattttctgaataatgttactatcactttaccgatgaataaatgaccaaaataaaagttatagacattgatgagttatacaactttgttgttgataacattttcagttgaaatcatctagtatttgaaaatgctatttgaagttgtcaaaatttgaaatttaaattcaaattattgaaacaaagtcacatagcaaaatgaccaaaacaaaagttgcagatattgatgagttatacaactttgttgttgatgactctttcagttgaaatcatttagtatttaaaaatgttattaaaagttgtcataaattgaaattcaaattttatataggtaaataaaactc

SEQ ID NO: 34872 - DNA, 601 bp, Oryza sativa
ttgttctgacttctgaggatgaggaagattttggttcacacagtgtagtttttaagaatgtgattgcttagaaaagatgaaatatgataacaatgagaaaaacaccgatggcttgagagaacttaggattcacgaaacacaacaagtttagttttccaatttgttttgtttccaaaggaaaagttgtgcaattcgaatttaaaacaggcacaaccaagataactgatagttttctagctgccgttgatgttgtcaatattattaactcgataaattttgcagctgtatactgtatagagagtagtattactattacctcgacaacgacataaagaaaaataatgttcaatgtaacatatgatggatgtttcaaacttccaagtcactgtaagttctgttgaggtctttattatcaagacctgactttttctgttaattcaacagctcctaagtacctagcactatcaaacgggcatgccaccaagaaaacaaaacaaaatatcatcgaaagtacggaccgagcaacaaaatctgaataaaacatcctaccaaagcaacaaatgtgctaaacaaacacaactaagtactattaccaaatact

SEQ ID NO: 34873 - DNA, 711 bp, Oryza sativa
tttattcatatttatagtttcatccggttctaagttactatatattgagatgaaaaaaattaccttgtactttcttctttgtttcatatcatcacaaagatatatctgaacaaatatttgtccatatacgtctgtagaagattagaagttgattttttagacgaaagtgtatgcaccaaattgcaacttggtctcatccaaaatggccatgtgtcgtctttcccaatccctctcctttcctttttcacctatcctcttcgtttctttgccaccccccttgtccatgcatttacacatcgctaaatcataccggtggtcaggttacaagtccacaacgagtcaacgaaactacccagctgagctaggcttgatttcaatccaacaaatatgaaataatgaaagtgcactgtagcaacaggcttgcaggttgtaacactgcttccccgcaaaaaaaaaaaaagttgtaacactgcttatcactgtgctggtttctctgccgcaacacatccagcaagatgatccatggatcatactacatggataaccagggtgtgctcacagctcgtgtgtacatgtgtgtgtgactgattgatgtggcttcgatggggctcacaaaagttggcgttacgtgacaattggctgaaactgtattacggagcacgaactcgattggattagtttggcttggttcgttcatagtagcaactagca

SEQ ID NO: 34874 - DNA, 654 bp, Oryza sativa
cagcaaaagatgcttatacttgcttggctgagagcgaacccattacctcgcagtatttagcacctagagttcaccaagctttcttgtctttgtgtgtgcaatggaagcttgtagataactaatatttgtaaattgaacaaagagtatttggcgatgacctcggatgacgtgtaaaatccgtgacacttcggatgacatctcggcgctaatctatatggcgctgagaaaacggcctaattttgaaattagtttttgggatgattcaatttcaaaataagttttttaaaagggtcaaattgtcaaaattacggtaaaaattatccacattcacgaacaatggatcaaaatgccgtctctcacatcaatctcatgcaccttgcagtgtttcccgccggctccgccgcccgtgcgcgtgtgcctccaacacattacctgcatacttgcatagtgccctactgtacatatgactgtatcactggtcactgcatgtggcgactcgacatggagatggggggcctctcccagcctcccctctcttgggctttttggccgcgagccaacacaggcacacagcgccgcccgctgtagcgcgacgtgcggccgatgaatgtggcacggaacgtcgcgccgggcacgacaaaagcggaagggcct

SEQ ID NO: 34875 - DNA, 1362 bp, Oryza sativa
tttcctgtgttaccaggcccaacatctttggttctttgccctttagccctaccacgaccagaggaggttctctctttcttcttgctggtattactagtactgggactatcatgatcaagttcatctgtctctagaaagcttttccctgtaatacccttgatagctttcttaatccttttgctacgaatttttgcaaatctctcattgaatgagtaaaacgcctccatgcgtagttgagtctgcatgtgtgtgacacatgaaactgtaaaatttaaataacccaattttgcagactttggattgctgacattccggttaaatcactcttagttaaatgaaatccaagcagaaaagcatgcctattctattttcaaaaggcagcgatttcctaaatgaaaataacttaaagacaatgaaacgaattgtcaaaaacttgctttttacagatgcctaaaatgcaaatgttgcagaacatggcaaaccagcaccagccgatccaaaaaaaatgtaaaatagaggtgaaatgctgacatcttaacaattgatgttctcaaaccgtaaaactaacttactagtaactcatttttttagggaacagaattcaatggtatccataaacatattatcacatcaaaccattctataataggataaataatagttacagtcttccagagactaacctcgtgcttattatactctctcaaaacaggaattagcagttcatcagccttttccttgctccacccaaacctttcccaacataacctgaaggaactcaacattagatcttctgttgttgcgccaaagaaaagaaatagagcatgtgtgttttttcataatcataatccttagttttgaaacagaactaacttgtgaagaaaaagatcagaacaaattgtcaaggtaatgataaggagctaaaaagcacattccacatcataaaaacaaattgattataacatatcaggcagctaaaagtaacagaacactctgctttctggtaaaacttgtctagggttttgcgctccacggtaccagtctgaacacctaccagaaacaagctggtgctggcatatcggatatattttaggtttttgagcggttaatgccactgccaatatgttggactacattgtccaccactttccagcaagaaaaacattgctgctcttaaaaactgattcaatacaaaaaagtgcagggaaatgaaatgaacggtatcttttattgtttgctcgcatccatgagaacataaggttattcaagaaagcttacttgcgcagtaagcctgaatctggtcttccccaggaaaatggttctgttgaatcatcaacttgtggggaaatatatgcgtttatg

SEQ ID NO: 34876 - DNA, 660 bp, Oryza sativa
aaaaaagttggaatctaaacaacaccagggtactacctgatacgtcgtgtgcaccagggtagaagaaatgtagcaaaggccgtggcacgcctagtagagtagtagtgctagcctgctaggctagtgtactacggccgtttgccatcgcagcagcatacgttcgctagcttcgatctggcggttctgcactcgtgtgcaagtgcaaccgagcatggtggagataattttcttttcggtactgtataccccatgggcggagctaccatgattcccgggtattcccgggaatacccaacttttttatcgaaaaacaagtatatttctaatatatacatatgtacacatattagtgcacctaaatcctcaattattcgatccaaacatagccctatacacatgtacatatattagtgcacctaaatcctcaattcttcgatccaaacacagcccaaccggcctatatgacccatcagacatcagttgatccacttagccaccactcttccagacggccccctctcgctctccctccatgacccatccctccctggctcggctccctcgcgccgctccccatttgcaaaccctatgcggcggcgcggcgaggcggcaactggcggcgagaactggaccgcgctaccacggagggggaggctattg

SEQ ID NO: 34877 - DNA, 654 bp, Oryza sativa
gaaacctggctctgataattaatttttgacttcttaatcgtctaattttattttatttattcatcttttttgaatcgtctaaatttattttatttattcatcttttttgaattattgcttcttaatcttctacgctagctctatgcaaccacaatctcaccaaatggcgaagtaatattagtgtctttttttgataattaatttttgctgatttatcattcatttatcgaatttgttcttaatgcatacgtacttaacctatctcatgagcacctctaaaaaaattggtccgtatatcttgagctcgatgaaaacatcacagacatataagctcactcttatataatacacacgtgtacatttggttctaatgaatacttttgaagattgagttagtaatatgttaagattgacgaggttaccggtcaccactggtgtctgtatatacctacaaattttgagttcgacgaagtcaccacaagtaatatggtacgttgtccaccactaaaaataattagctataaatacaagcacatcatagactcgctgtcaacatgtatatcgctaccagtgaaaataattactccttccggacatgtctcatgtccagattcatagtcttagatgggtctcatcccatcatagtttgctata

SEQ ID NO: 34878 - DNA, 508 bp, Oryza sativa
cacatcattgtgcttcaaatacaagtttatagacaaatatagtaatatttataatattaaattagttcattaaattaatatttttttaattacatggtacaacgcagatactcacaacacacacgcaaaccatacccctatgagcatcttgccatcttcgaagactgggctggcaaatctatcctggagattaatgaagtcaccacagacgcctcgctgtagacaggtacgtcacttaccactgaaagcacaaagctattaaatcctggaaaattcgctcccattttcttaataaatttgtcttgggttgaaaatgctattatttttgtacaaacttagtcaaacttgaagcagtttgattttaaccaaagtcaaaacgtcttataacctgaaacggaggtagtaaaagataaattggattgtccattgcttcacaatccttatagggatctctgtcttctaaaataacttacactcgtcctccgcctccacttcttccccttcgcgt

SEQ ID NO: 34879 - DNA, 651 bp, Oryza sativa
ctccacggcaaagctcaagctccccgacaactaagccagcaactgtccctttgggtgcacgatgaggcaagtcataccaccgatgcctgaattgtaggtaactgtccaggaactcatgcagggaagtattctgtgccactgggaaaaggtaacgataagcattaaaaccattggtaaagttcaaatgcacgcggatttattcataagttaaattctaggagtgaaacaatggataatcacagatctaggcgtgtcctcaactcaagcttttatgttgactcatctactcgctcaattattgttcaggcttagtttgcataagaaaaaatgccaaattcctctgattgtagggtagttattcctgtcaatctgaagttcctgtcaatctgaagggactaggattaattccttcccattaaaactatttcaaaggatcataggtcatgatagtgataagaatatgattgcataggctttgctttgcttatgcaactactagccacttcaactgcaaatgtagtaataaatttaactgcacgcattttatcttgcgcttaaaagtgcaaactgacatttgaacaagcatacactagaattttacacataatccgtagccttagataatcacagagaccgaagcatcagaagatg

SEQ ID NO: 34880 - DNA, 560 bp, Oryza sativa
tgtttaatatagtaattttaaacttttatacagattatagaaatacaaggactaaaataagaaaatattagaggctaacatgaaaagttgaaactatttcacgagaacaccatgtattgtgagggattttattttagatatatggtctcaacatatatgacagccatgtgatatcaagctactcaatgagaccacgtgcactgtaaatgtccttaatatccttaaaaagaaagtagaaaacatgtcactatactccttcaagacagtcacaattttagtacctctcgtcagatagagaagcatccaagactaatcactcattgtcaattgtttcttctggtttaaatcacgcattgacaattgtttcttcttgtttccgcccgttccctaaggctgagttcttttcccaactttccaaactcacctcccttattttccgcacgcacgctttttaaacgattaaacggtgtgttttctgcaaaaattttatgtgtgaaagttgttttaaaaaaaataatattaatctattttttaaaaaatattaataaatacttaattaa

SEQ ID NO: 34881 - DNA, 643 bp, Oryza sativa
cagtccaataataacagtaatgagttcaccaacacagttccatcggtcgctccccaatcagcgagaagatacggcagtaaactagaaccattcactgtatcagactggttcctgaggaaggggttagttaccgagcacgaagaaagcgacaaagaaaacgtacgaaggcgcggttagccggagaggtctcttcgtcgtatccattgcgagaagctgcgccgcatccacctccggcggactggcggcgcgccgcccttcccgtccatcgcataggcggcggcggcggcggctaagtgggttttttcgcgttccgcgcggagaagaaaagctgaagagccgtttccccgtctcttcttcattacagcgacaccaacgttgatttccgctaacgacacaggaaggcgtattctggataatgggcccacttgtcagcctcccgtgaaccagatccaggttcccaccaaacagaaaaacagaagctccaccactgcatcgtagtcgtcttcttcacgcgcacggcgcacccagatccaagcgtccatcgccgcggccgcatccgccatggctccgacggcgcccacggcggcgaagtccgcctccccgtcccagccatccgggtgcgccaccctcctgctccttcact

SEQ ID NO: 34882 - DNA, 711 bp, Oryza sativa
attcctgcagcccttttgcttactatgttaatgagtactccctccgtccccaaaaaaaaaaacaacttctggctatgtatctagacataggctatgtctagatacatagccagaagttggctttttttgggatggagggagtagtcggtaaactcagtgaagtcaaatcaagtactctgtggatagcttctattgtaaacatcaagaaaagtggaactggtcaatttctcggttttctcattaacattcttttaaagttggtcaaaaatgccctgtgaaaataagtgatcgacactagataaacataaaaacatctggccgttctatccagcaggtcttagcaacaaatccttcagatttcaagtccactgtgtgcgtctttactagttatataggaagcaaggaattggtggtggagttgatgttgatctaatgtgaattaggcatgaggtaaattatttttatttagacatgaggtaaattatttttatttgtgtaatgattgaattcatgtttttctttctttttcttttttgagaattgagataatgcatggacaaatatgctagtataccaagaggtccgaccacctaggagctgtggaagttgccaaccatggcttattgtcctgggctcctggctactctcctattagtattatatataacatgagtttaccactcacttgaccaccaatgaccgatttaaata

SEQ ID NO: 34883 - DNA, 1407 bp, Oryza sativa
tcctccgtcatctttttactgttgagtgatgccaattgccaaatggatgtctcttcatggagtatcagtgcatcaaatcttccaattcatggtttggtcatgtattatgtagcgatgcataagcaaacaatcatcggcaaaatttgcctttaactgggccctgggtggaatacatgaacgttgtgagacataccatcattggttttgaattgccttaaatgtgagcatcatagtaatgtctagtgcagtctcatagcagtgcaaaaccgcccatacacctggttgaacaacagtctcatttttccaagactagcaaaatacctacgcaaaaccaacaattttccctgatttcttgctatgtttggcttacaggaacaaaatcttgtttatattaccacaagaaaataaaataaggtgattcttctatgcttacaaagcagatggtcatagccagtaatttacgactgtgtcaaaataaagtactaatctagagttctagactatatgcaacaagggtactgaatggtgctaatacaaattaatttgctagtgagttcatggttttggaagatagcaaagttttaatgtgatacttatctgtattcactcctattctcttctctaatccgcgttgtatcgttccatcttagcatgtgtctataggacacgcatgacctactttacaaccaaatttgttatttccaagtttgtcttagtgcctaaattctactatctagaggaccgttctaatttttttaaagaaatgtcaattcagatgttggtttttttgtattgttatcacctctgtacatttggggtgttggttaatttccagctagtttgtatggaaaataaaatttagaatgatgtgttagtatctcacttaaaatgctattgacttcactagggaagatgctattggcagtacaggaatgagtgaagaatttgtatatgtgtttatcaagaccactcaataagtgaatctacagcagaataagtactcattagtcattttcaataagctaaggaattcttagaagctgctgcagtagcagcatattatttttctcaaagcatttcaattctcaaaagtttataggtcctaagtagctagtactccctctggtctcaaaaacaagttatttaagaatgcgtgcagtcacacaagttaattttgaccataaaaatcattcaaagtatagattttgggtatataaaaatgatattcaagtttgttataacaagagctttcataatattacacttgtgtaaccttttttttaatatgtgctaaagaactaggtagtcgaagttgtatatatttgaccatggaaagtccaaaacaacttggttttgagatcagagggagtaaagtactcctggcaatatagattctgaatcttttat

SEQ ID NO: 34884 - DNA, 644 bp, Oryza sativa
ttcagtcatttgctaaaaaaaagctatatctaattattatggttgattaatgaacggctataagttacaaaaccacagggtatttagctatttgtcattattagagttgacgtttaactatttgtaattcatgtgttggatcaggtgtggtaaatagttaattgtcacatataaggatggtaaatttagagatggttgtctttcttagagctaaactagaatctctgagatgagcggctgattattgttttgattaaactagtatggtggcccgcgcagattgcacggctagtatcattatatcttctctcatataatagcatatatgttttctcaacgtattattcaaatatattaaaatgacaacataattttaaattttgtactaactttacgaaactactaatgtgtaatattcatattgtattttatatacgtgttagttattaattatttttaatatcaaactttagtaatttataaattatattcctatatggactctagactcgtctttcaatatatttttttaattccgaattttcgttacctgtaaattatatttctatatagactctaggctctttttttaatattatttatttttaattctgaatttttattatttctaattgtatttctat

SEQ ID NO: 34885 - DNA, 1161 bp, Oryza sativa
gacgaaattgaatataacgtgttagttcagttaccctgaattatttgataatcaggagctgaatagatcacttgagatactgacataagttatatatgtttgatgcttctccccatttagtaatactcctagtacatgcttaattctaaacttgtcaccatagatagttgatgccttgtatggccaaattagtggtgttgctagcatacaatatttggacaaacaaccttacaaaatactggagtgaaaagcaatgatattgtccatttcacttgattaaagtggtgtccttgcacacagaattttagataatatggttagttcagttaacctgtatgatttgataatcagattctgcaaagataaactaagaagcatcttataaactatatatacgtttctcagcatcatggtagcaggtgccaggacatttgggtttttggtcatagcaatttaatttctaggtctaaattcaggtatatgaatatttgcatcctaacgacattaaaaacagtgtgcgtgtaaaaaactaaaaattgaacaaaaggtttataacaagtgcgataacatttactcccctgtgctcccccccccccccccccccccccaaaaaaaaaaaaaaaaaaaaaaagctcctagcatcccaatgtggaggtaaatgagttggtcattgggtaggtaaagggtattgaagggataaaatttctcaatttgagaatcgctggtaggtaagaaggtaggaactgatttattttgggacaaagtttgaactctagaagttggtttattttaggatgaagggagtagcattcaaataatgactgtgcatgacgtgatattgcagacagttgttgggacaacagctttctggtctggatgtagaagacttgcaaaatttggaaagtaagctggagatgagcttaaaaaatatccgtctgaggaaggttaaattacaatttgttaacagtccatccacttctaattcttccttgacataatatcaataactactttgactaacattcactttacaggacaatgtcatgatggatcaaattcaagaattaagcaggaaggttgttaccacttagcacattcactcaacattacttatgtacactagtctacttggtccaaatcttattggagtgagataatttg

SEQ ID NO: 34886 - DNA, 1203 bp, Oryza sativa
atggttctcaagtgaatcatatgcactagcatactagaaaacaatgaaagacacagtcctcattatttatttacttttatcaatttatcaattattcaaattcatagaactcatgcacatttatgatttattgtaggttggctgaagatcataccgatgatattcttgcaagttatgcagttgctgcctcaagcttgctgcctcctgttgccaaagctagtaaaatgaacacattaaattagtatagctgggcggtttatctagcagccatatgttcttctcttcagctcatgaatttctatttatcataggtagaaagtggcaacaacattagtatgagctttccagtcaaaaaaaaaagacacattagtatgagctagcaacacttttgagtttacatgttctgaaaatgcataaggatttcagattagtgaaattaagtattctctagtcatatatattggacgttgggaggacaaaacttagctctcccaacatcaattaaaaatgactggagggagtatttgggtttttattttttaaatttctggtggtacatgtttgaatcgtcaaaccggtagtggttcctttgacatcatttgtcatccttctttaattaactagaatattcatcttatgaactactctgataatattcttcttaattacatcaattttttttcttttccatcttttgtgatgagaaccagggtttacgattccgacgaaatccggttggatttcgcgaaatttcgatattccgacgaggttcgaaagtagaaaccgtctgagatttcgagaagtttcatccaaattcaaatttgaattgataaaaaaaagagaaaaacaaataaaatcttataaatactatgatattcatagaacctattgggatataaatattcaaaaaaaaatgtattgtgtgtatttactgaaacttatatcaggaaagaaaaaaaataaagaattaaaaaaaagaaaaacacttacatgggtcggattgcatgtactaggcctagttagtagttggtccaaattacagattacagatcgaaattttgatgatttcgatcggaattttgccaaaacgactggttttcaagaacttgtcaacaaacttagggaatttgtattcaaattttgatttatgaaatttgttctgaatatagccggttttccaccggatttcgcgaaattctgaat

SEQ ID NO: 34887 - DNA, 1939 bp, Oryza sativa
agttacaattccataccattggttataaagcttaaaatataattcttttatatatataacaagtacatgatttctaaattgtttattcaagctttcttacaagtaccgtactgaattctccgctagctgcaatatggggtacgtattatatattttttagcacattgaactccatctatatatatatcgagcaggcagctataattaagaaaaaaaaaggtcatctgattaattttcagtcatctaaaaaaaataccataaattttccgtgatttttatacggtccatgcatgtcacactatataattagtgctgctaatagcctttaattatctccttacagaacacgggctaattacacgtcaaactagctaaacgtagctcagctttttggtggtgtttggggttgtgacgtccactgccgctagctgatggataatgcgcacgatctccaaagcaacatattaattatattagtagtagtttaattaagcatatgcgtattaagttatattccgtttttctgcttttagaaagagtataattctctagagtagttttcttgttttttattaagctgtaattttgtaatttatggtttttcatcctgcaaattttgtaaaagttgattatagcttcgctgaaataaggatcaaaataaattatattattaaataaattgattagtatttgtacatttctaatacggtgtcaagcggccagtattaatggtcacctccgttggcaactttttgtgataagttgacaagcacaatcgcagcacctaaaactttgcggtgatcctagagtcaccaaccacctcaatctagcaaagctaaatcaagatgggttttgaaaaactaaaccggctagcggagctgatctagatagaacgatagataactacccgtctcgtgggcaaaacggaaggttttcaggacaaacctacaaagaggtgccgcactcttgcagcggcggcggacgatttacggtgcaaatcaacaaagatggacaaactaaactagaactagaagcaaaagtaaaagaacgattcaattgatcgatagttgattgttctttacaatgaaccggccttgtctcttatataggggttagtcttgctctctacatgccctcgtccacgtccaactcgggctagaaacagatggaaacacgaaacatgccttcccgagcaaggaaacccgagacccgacgaaaacgaagtttgattcggactcggccggttagactggccacataccgccggtctgaccggcccactggcggcagtctgacctaccaacacacggcggtcagactgaccctctcagaggaaaatcggtagatcgtccaaactttggcaattttcctattttaattctagatgctaaatttgggtgtaaacaacctcctcttttggtattggatgttggttaattaattagaataattaaactaatgttgtggaacagagctgggaagggagtatactcaatgcggttttcagcgcgacagggtttgaagctaagtactcttctggtatttttattttcctttttgttatatatataggacgtattttaaaacctttcgtgaatatataggtcagatttttatccattataaagaaagaaaagaatagtttcgtgtgtaattaacctgacagaaggccggacgaagaacggcaggatgcacggattgggaactggatatatatgcagcatgatggtgacgacgacggcaccaccggcatccattatatcacaaggccaccacgatcgaccaccgggcgccggacaggagctagcggcgggccctgcatatgcccttgataatcatcaacacgcaatcatgacgtgatccgcacttatgaagaactccactatggtgatctctactcgtaataaaaagcaatctgaaccgttggggctgcaggaat

SEQ ID NO: 34888 - DNA, 1386 bp, Oryza sativa
atgcgaatgctgcatgcataaagctagggggccgaccggggcgggcagccgccggtggggatcatatgaacaagtggagtggaggggcaggcaggcatggtccaccaccggccggcctcggttcatgcgcccccgtgctgcattttgttggggccttgccgccctccgccgcaacagcatgcaccacccttttatcctttacatgcacatgcatgctatatgctaccctccggcttctagttttgtcccatatatgttgatcttgcacccaatttgttcataccttcgatcgatatatatatatctcccctcctacttgcgagcaaattaaagactcagcttaatctggagctcacattgggcctagctagccagctaggtacgtacgtaggtagtctttggatccagagacgttaactttagtctctatatttagacactaatttaaagtattaaatatagattacttacaaaactaattacataaatgaaagctaattcgcgagataaatttttaagcctaattaatccatagttagagaatgtttaccatagcatcacataggctaatcatggattaattaggctcaatagattcgtctcgtgaattagtccaaggttatggataagtcttattaatagtctgtgtttaatatttataattagtgtccaaacatcttatgtgatagggactaaaaagttttaggtcgtagtatatgtaactaggtatgtaaaataagtgagacaggagctaacatagctagatggatgtatgaggtatcatgtatgtagcatcatatcaaaacatgaaaaggatctagctagctagctactccctccgtccaaaaaaaaaagggcaaaccatgggttttcgtgtccaactttgactgtccgtcttatatgaaatttttttataattcgtatttttattgttgttagatgataaaatatgattaatattttatacgtgacttgtctttttaattttttttcatattttttggaataagacggacggtcaaacgttgggtatggaaactagggtttatttttttttaaggacggagggagagtagctcgagcaaactgtaggtacagttcatgctacatgtatatagtacacagttacacactgtgtctgtatgtccactctccatgatggatgaagtgaaatgtttgcctttgccatgttaccattttgtaacatgccatatgatctaggcccacatgcaggtgagcattttgtaatgcacgtgtccctcgtctctcaatatataacagattaaacattcctctccaaccaagtccacccaattttggccacatagatgtatttatggttagaatctaaaccagctatgtgataactaaagatcaagttctttt

SEQ ID NO: 34889 - DNA, 672 bp, Oryza sativa
tccagggattagagtacacatcgccgtaaagattgtccagaacattagtcccctaattcaagattttcaatctaacaaggcccaatatatatcggcacgcatctcatgtttatgttcttcacacatcaccagccagaagatacatggtcaccgttcccagcatgcccctctggcagatcactagattcccagatgaacacatcaagaaaacctcagctcaaaaatgatccaaggattcaccactctttcgtacttcacaaactgtcaaaatttcatggtgaattggcagtaatacggtgtatatactcatctctatttatgtaaaattcgtgtagggtcaaggtgagttctcttatataaagagatttgctcaagcatacatacctcgcaagagcctatacatggggataatatatgcacactcagtacacacacgcacgcactcacacactcatgtactcttcttcgctttcagttgatggggaagacgtggagattgattcagcaccacatagggctgctctgctcgcaaacgcgagcaacacagacgcacgcacctaaaacacctgcctgcttgcttgcctgccttcttgtctgcacagagttgaggcatcagcatcggctgcctagaatagctggaaaaagaggctcgttgagccatcaccgaacgac

SEQ ID NO: 34890 - DNA, 658 bp, Oryza sativa
tgccagtatattgtaggcccataaaaactattgttaagcatatcaatgcccgtataattaaggcccataagaactctatatattgctattattcctatgagacaatcgtactgctcagatttccaaggttagtaacatggtatcagcatttagatctgatttcaaagacagaataatttggatcaggacaccttcctgtcctgtgcacttcattttctcctccttaatgaaatgacaagcagctctcatgcctcgttcaagaaaaaaaaaagacaggataagagtaaggcagctgaaattctcaccaattgctttgtcgcatcaaagggaatataccttctagctttgttctgtgtgtaccgcatgaccttgggaggcaaaggcaaagtcctacaaaatcaaagtaattaaagatagggatgtattgtgaaaagttcagtcatgaacatgaacattcatgtgcgaggcaatggaaccttgtagctctcttgcttatcttagctatagcctatagaagcaaggtgagcaaactggatcattttgaacccaaaacctaccctaactggaccaatcatttgttcttgtaagcttcatggacaggtttttattggcactgcttgtcaatgaatttgaattcagtaaaacaaactagattctc

SEQ ID NO: 34891 - DNA, 659 bp, Oryza sativa
tcactggtttggccggctgtgctgtacttgaaccaatttctggcagtgcttgagaattaaaggaattttatgcgacttatcatggaaaaatgactatgtacaatcattttcttacttagtgtgtttgcatgagcatgattcgagttgaaatcacaccagaattcaactttcggtgtggaattataaacctccatctcctcaaaaggttctaacagcgtaccgtgtatcagttcatgtttcatgggattaacctgaaatattttgttggtattcaactaccactcttatcagaggcacaactactttaagcagttaagcataccagcaacatcgcacagctacgaaagggcatgtagcctagtggttacagtgacctgagtacccaaaggtcctgagttcaaatctcctatggagcgaatttcaaattgggttgtttgcggggctaagttccctatctcaatagccgtatatatctggttggatatgtaggccgtatacagctgcctagctgcattagggcatcaccaatgtttactagctactttgtgaataagggttactactctcacaatgtatataacctgttagtagtagtattttattccttactacccactttaaatgcacattgtggatgcccttaccagatgataacctat

SEQ ID NO: 34892 - DNA, 1264 bp, Oryza sativa
atttgtaaatatgcatatcagtcgagacggcgctacagaagcgagggggcggaggcggctaccgcagccgtcgcaggcggcggcggctgatctgctcctggacatccttcgccaacacctgccgcctcccacctcgtgcctcctccatttgctaatctgcgtctttgttgtcctcttatacgtttacacatcgctcgtccttattttcgtcgttcggtggctcgtcggagctcggggagacatgctcctcagccggtgcatcccgtctgccggtattggaaggcaatggtggcgcggtccctattgcggttgccggcggctgatccatgattgagggcgaggagcctgcccgaggaggctgaggtccggggcgatggtgacaactgacaacagatcagtgactgaaggtacagggttaaacttttgggtttagccgatttgatcggacatcactaaaataccaaaatttcggtctgaaattttcaaaattttgaacaaaatttatttaaatttgaataaatattatcaaaatttatgaatttttttaaaaaaaaaattgaccaaaataatatcttatcgaagggatccaaaatgtccgaaatttccaaccctgtgaaggcgtggagatggcgcaaccatggctgttgtggttgcagcggttctggctgtgagaggcactgaagcagcatattattatactccctccgtcctataatatagcaacctaggaccggatgggatatttcatagatgtccggattcgttgtactgtgtcccatccggttctatgttactatattatgggacggagggagtacaagataacctcctgtccatccatttcctcccccatgcagatcaagtttttttttttttgaatggatgcagatcaagtattgatatttgattgctctattctgtgtcgattgttgtaggtgtatgcgaaacctgaattttgtacgtagctgtgtattgcatgactgatgagatgaataaaaataatttactccctccgtctctaaatatttgatgctgttgacttttttaaatatgtttgaccattcatcttattcaaaaactaaactatatgtatacataaaagtatatttaacaataaatcaaatgataggaaaagaatcaataaaacgaatgatcaaacatatttagaaaaatcaatagcgtcaaatatttagagacggatggagtagcatatagaggtgccatcgcctttgactacttggcgctaccgcaagagctgggcgcg

SEQ ID NO: 34893 - DNA, 1106 bp, Oryza sativa
agatcttgtgttgaagtgagaggtgactcgagtcattgggtgtgattcgtgaagttagaatgaaatgggatacagtatgttaagcattcgcccacattgcctgctacgatctgttacctaagtgattattagggggaaatgattccagtgtttttgtcttcaaaatttgcgtgctactatctgttaactagctgtgtgttgttgcctcccttcctatgcacatactccctccgtttcgtttatttcacatcgtccgacactcaccatgcatgatgtactaagaaagtagggaaagaaggaaggaaggggcagccagctggaggaaataatcaaaggggtcatgtgtatcagttgactccggccaaccgtgtatcaaacaagtgtggaaaagaagtgatgttatttcggtggattcagacatggatccaagtatccaaacgtcggagttcggtagtgttttgtttttttctttctatggctgccggcagtttgtgtttgatatatctacgtgaccatgcatgggtggttttctgttgaaatgtcattacaaagaattgattagtgagcttcattcgcatcaccatcaactatcaattaatggcatatcatctcacaaacatactggtattgatgccccattgcaaacgttctcctactttcttgtccagcttggcatgtaaagaaagaaaaacatggtccatgacttgtgtttttcagtagtgaagacagggaccattgcatgctactgtaccagtaaatgaaagtgtttttttgggttcataaactcgttaacaacagggcagcatatctttggggtatagacaatctaaattgaaggagcaaattaaattaatactccactcggttacaaacaaggtaattagtatcgagatacaaatataatcgttttgatatcgggatattaacataggatcagaatactatcggattttagaaagtacatgtttgtatataaaatatgtaatacgttgtataaactaaagcatgtagtattgatttttgtaaatttgattggtttttatgtaaatatgagcatattatttacattatttcaaatccaccttattttaaataatatttggtat

SEQ ID NO: 34894 - DNA, 562 bp, Oryza sativa
tactacttgccgcaaagctctaaaagccaaaaagttgctaaaagtacacataacccagtctggccaacaatatcacagagaacaattgacagttctcatattgtaatgcgtccatactcttcccaaaaaagtgaggaagaacaaaaaagaactactgtgaataatatggcgtactccagtaggagtatatctatagttaacttctggacatgtttaataattgaaactatatatacacacacatactactagctaaagcagtaatcaagcatactgtgtaccaacagtgtttgcagcagtacagcaccctacaactatatagtttggtcaattcaacatatgtacgcgcaaaagaaaagtcaggtcaatttgagtagtcaacagcaagcatataaaagtttctcaagaaagaaagatcacagtctccgagaaggcaacaacagacaagtatttctctatatatagagattcacatcactaagctgtcttaccgtaacagcaacccctaagagaagcagcctccaccattaggatatatagctctactattcatgtacgcatg

SEQ ID NO: 34895 - DNA, 636 bp, Oryza sativa
tcgcggttattaagcaccgggacatttaattacacttggctagactgtaaattcttaacatgtgtgggatgggatagtgcatgatgatttctatactgatggagccatttcctgagaggagggaagatggacgtcttcagaaaaaccaatgacgactcaatggccagaagctattcttgggatcacaatggatggtggatagaaccgtcgttgtttaatgtgaacactggtactaaaatttgattagtctatgctaggtcttaggcttgtgaaaagaattacaaaacttactttgcgcaaaagaaccatagccatcctttgaatacccctatcatgtgcattgttgctgtggtggcttgctgagtacggttggtactcacccttgcaatatataaacttaatcagaggccggagatgaagcttcggaggatccctatgactattaccaggagggtgatgaagacgatggcgctcagtaggtcttagttacggtcgttgcctgtggcaatggcgtgccgctgccttaactccgctgccttatctacttctgcttttggaatgtattccggaccgctcagtccgatgatctaagactatgcctgcgggcttatgatgtaataattcgcactagactct

SEQ ID NO: 34896 - DNA, 642 bp, Oryza sativa
attattaagctaagacagcgaatggctgacgtgcgtggcatttgtctcatgctgctgcatgccactgttgcgcgtagtacagacatcacaaaagtttagttttggtgagttgtttgtttaaattaatcggctaatctgtgttcatcactgccatgaccccatcttgataattgacgactaattctggatgaattgtcctaattaaagattaattcattgcacatagcaagagagatgcgccaaaagattcctgcatgcggcgtgcaatgatattgatcgatctgtatttttatatgtcccatcaagaacactttttaggggggacgtccgatgattattggggctagctaattaagggcacaaattggtgattttggagtaagataattaattggaatctaatgatccatgtggtagagtagaaggcaaacctggattaacttgatctgattagccattggatatatatagctggtttcaggacattgttttgttgatcatcgaggaaaagaatcatttaagctgatccacctcactagcccttgcatgattagtagtactgatatttgagagtgctaatcagttctaataactgactattacggcttaagtacttcttcgtcagttcgtcaccttaagttt

SEQ ID NO: 34897 - DNA, 687 bp, Oryza sativa
aacggttgaccgtgttcacaagaaggctgacctttcccacacaggaccccatagtagttgactaaaccaagaaactacccttgggaaaactgcaaacagtattagagtgtgtttcaatcaggaaagtgtttctgagctatgaatagaaaacaaacaaaattcatgcagcaatattaggtgatagccaataacagaggttgtcaaggaaagaagagtgaatgactcttcaggtcacatatcacaagtaccaagtcaaagaatgaatagtacctagtctctcacctaagttcagttcagaacataactttttttttagaggttgttcagatagtaccatcttatcatcaacccatgatacaacttccaaacatctgctagattttacacagcacagatcatagtcctaaccaactacttgatgtatgaacaacataaagagctttagtctcaatcctagctggtatcagtggtaggacaccatttaggaccaagaatcaatcacctacagggtacagaatcatagtcatcaccccatttcacctgttcttttctttcatatccacatccatcttcaatacaacgacttcttccaaactggaagtatggagcccagaaggcaaagaattgacagagttgcgaggccaaaaaaaaaaaaaaaggaaaaacgccaagcatccatggccatga

SEQ ID NO: 34898 - DNA, 510 bp, Oryza sativa
agttctttggtatatgatatgaacagggagtagcccagattaaagtgtttggaggataatgataaccactgatgcatgctctgttttcttgcacgcactgtaaaatagtttgcattggaagtacagtattacaagtttttgctgtttcttgatgaacctaccaacaaagcattgctctccatgatatgagttggcatgtttaattagtgttgactcttgcctgttaagagagaaccaaattgattaatgccaaaaatgtatccatgttggatgttgcttatatctttagacttaaaagctcaaccttcctcctcccttttaagttgcactgtttagagttcttataactcttatttgccagtattcaaaatttctgctcaaatggacacactatgttatctactgcagtaaattgcgcctgcatatgttttcttcttaatgaagtaagaaagtgtgatctttatgttcccatacaatgtactataaataaagaattggtggaccatttgt

SEQ ID NO: 34899 - DNA, 610 bp, Oryza sativa
acgccattgatgttgcacactctcgtcctccactgtagctaggcagctaggcatgttgcaactttcagtttcacctgaatttcactttcgggcgtgtatgattgctccatgattctttaaatcagtccaaatggttaataaataagttacaagattctaaaattcaaaactgactgtggcttataaccaaagctcaaacagaccgacccagaatttatagaattcgtagttatatatactaatgtcataaatattgtataaacgaagcatataattgctcctaaaatatgtagaattcacataggaccgagcatagaagcacctctcatagtctcatagtctcatggaggacaatgatgtgaacatcggtggatcctaacaaaattcagtgtactatgctacacctacataagatccaacatgtgctttccttttccttttgccttgtgtttacactgtcagtgcaactaataagatgcaaagaaagcatgtaaggaaccctaggattaggttgtaaggttgttgcttagagcaaatcatggaggagcaagagcagcgctggtccaatccttcattactgctgctactacctagcaacagaatgagacga

SEQ ID NO: 34900 - DNA, 814 bp, Oryza sativa
tgggagctcgacaatgccaaggtaatatccattgcaccctcaagcaattctattttcattgtcggtttggaccgcgaaggtaattgttttgcttgtcggtccgcattgtcgaacttaaccccccccttttggtttaggccaccaaagtaataattactctttcctatcaatttaaagtaatacaagtagatgattttaaattgataggaaagagtaattatatagtaagcattcgtttgcacccttgtcttatatggttgagggtttttcgactccactgagagcggtcttagtgttatgtttgtatgaaaaacccgaaaccaatcttcaattcaacaccgagcttcttgaagagacattgttctagagagtgttgcgttgtcctccctatttttttccttactatatatagtagagcaagttgtagcattggccacataacatattcttaattagtgtctattttttaaaacattttttttcttttatttttttgttgtatatgcattcttagttggtgtgcaaccccaaatgtttttattgattaatggaaaattccattatccaaaaagggttgggtatgaaataactctatccatctgtccttaaatagagccactaattgcattccacatgagcagaagtcctatatattcaaggacaaaaatttccctcattaatttaaaactcttttcaaaaaaacacccgtttaaaaactaaccactctgcttaatatcttcaataatgtacaccctcctgtttagctatccagttctctgcagcaatattcatggagagagacagagagagaggc

SEQ ID NO: 34901 - DNA, 687 bp, Oryza sativa
attatctgagatcaataaaagtttccattatctaaaatttatctcattacttaatgggaaaattaatcaccaaaatagtgcctctagctagggaggttaaaacttttcgagcccatgcttctatatatatacacaaggcaaactaatgagtgctctctaaaatttaaattgtcttaagcccatccctaaaatgccaaagcttaaaagtattttagacaatttttaaaacggaattactaaccttctatcgatagaaaatccatcttcaaatcttacagattttggaccactgaatgagctttgtgattcatgctccaggccttctcctccaactccggcgacctcctcttcttctccggcattggcgacaccctagactctaacagaggaccctacgggttagggtcctaggttggagagggggtgggagggggaggaagaagaagagggagttcgccagccttagagggatggccgtgggaggaggcagcccagcggtgggcagcgtggcggtggcggtgtcgccaaagccacgaggtcggaagctagtgatggaccggtgtagggagggggggcaaagtggaagggttcttagaaggaggcggccggtggtggcacctcgctaccggagacggggaagacggcggcacagggatagctcatcgccattggcttgaggaaagaagg

SEQ ID NO: 34902 - DNA, 672 bp, Oryza sativa
gggatgatacactggaacacagcactcttacttgtgctattgataccatctggaccatgcgcacgcgaccattttgatactggccacaaaataatagtaaccacttatctgaacgtatgtactaatgcacatttcaatataataatcccatgacttaaacttgattttaaataaagagagatacagatcgtcaaacttggagacgtgcgaaatgctatatttataagcagacatacttattattgataaatgaatactgattttattaacagatttgcttcggctgaacaaatttttcaaaaaaagacatacccctacacttgcggaatacacggatcgatcgaggtgaacagctgctacgtggacggcatggatggatcgatcaatcttatgtacctgcgaagaaaaaaagttttttacgctaaggcgggaaagataatgttaagatgatgcgccaacgtatgtgcccaactaagccgtactcgctcggagtataacgtacggttgtctactgtacaagcgcatgtaagagtcgtacatacatatacgacatactctctccgtccaaaaaaaactcaatatagaagaagatgtgttgttagatgataaaacatgattaatacttgtcttttaatttttttcataatttttttaaataaaacgaacggtcaa

SEQ ID NO: 34903 - DNA, 668 bp, Oryza sativa
atctgatatccatactggagagcatgtgctaaggagtaatcgttgcgtaaatcatggtttgctgacctagaccaagtcgtgtagcgagtatgtagaattttcccagaaaagctgaaattccgtcagacacaatcatagcttgcatgtacagaattagaacgttcttttagtcttttaatccgccatgacacacaccttgagagtctcaccatgcatcagcattggacttttcctgtatgattcttttccttgctgaggcgatgcatggtggtgatgtcatgatcagcccgagagtcttttgcgcgataggtatttccctcggcaataaaatggttattagtccatgtaccttgtatatgagcaaccgtaagcgatcatggtcgtttcaatagcgctttagcacaggcaaaagtataagtatacagtcttaaactattactatccattcagagacatgacagcttatgagccgtaccagccaataccatgttcggtttagctcatcggttgtttccctaatagattaaaacatgcatgaattttatatgatatattatgagcatttttctagagtacccttgagcgaatgtgatccatccgttaggatggattggatgggtcagttataatcatcataccccttgaaagcaggtgtagtatgtgtagta

SEQ ID NO: 34904 - DNA, 5031 bp, Oryza sativa
  unsure (1)..(5031): unsure at all n locations
ggggggagtgggggtgggccctctgatgtttgctgcttgtgtggcggcaaagagcggtgggcaccatacgaagtaggccgggcatgcaagctgtcgtggcacctaggggaggaggagaaaggagggttctttgctgcttgatcttctctttcttttcttattctttacttcgacgacagcatgtggcctcgagagagagggagctagggtttccatggaggagaatggcggtcatggatgcactgcagcggctatgcgaggagctccctcattccttctcgggccaagggggcggtgctttaccaccgcgctggctgttgcctccccattcgcctccctcactggcgccggcctcctcgtggcaaccacatttaaaaatgaggtggagagagatggggaagaaagaagaaggtgtgaaatcattgtcatgattaatatttgtgatgaacaattggctttgcaaaatgatttaatcaatgaagtggtttggaaattatgtgtggatgttggtgtgagtgcgtgtgactaatgtgggtcaggttatgatatctgtgcccagaaacggttgttttgtctgattgtgtgcaggtgacttgaggtcagccttggttaatggtgaggaccgggactatactcagggagaagcagaggtctagtgctgtcggaataccatgtgagaaggtgactagagtcaggattcttagaggtcaacttcgatcaacagtggggatcgggactagactcaggaagaagttgagatccagacggtcaaggataccgggtgacgaagttggatacgagatggcatacggtggatggacaccgtgtgggagagatcttcgcaacgggcttcacgaggtgtgcgtgcaagcgtcggtgttcgcgaaggaaattgagtgataatatttggaggagtatttggttgctacagtacccatggtactgtagcgtggtgcatatgcatgccgttgcatgcatgtgtgtgtgttgcatgtacggtgctgtacatgtgctgatgtgcagcttgctgcttggctcggcctgggaggagaccaagaccgtgtgctatatggagatgtgacgtgttgacgtcggattggagggactagttggagtccggttcagtttggatcttcggcagctgatgatgccggtttcgatggagagaggattacaatttggaaattgtaatttgatttggtaactgaggttagagtcttagtggaactaggcgttatactcctactttgagtaggaggttttttattttataaatagagagggaggggtggcctcccgctatcgctttgagagcaattgagttgatagtttagttagggtttcgagtttagtcgagatttttgtaaggagtgctgttgttgcactttgtaaacacagagagaagcaataaagttgtcatctactttgagcgttcttcgatttgtgtttcttcggattcaggcggcagcaaggtggttcaaccgttggcgtgtgagcaatccgaccggcggcgacaggactacgtcaagatttccatcgatttgagggtaacttttatttccgctaaaagtttttgggtttttagtttccaatttggatttcagctaaaatctcggacatttcagtagaacagaaatttcggtattttttggaccgaaattttctaaaattttgacacaatttaactgaatttgactaaattcacaaaaaaaagagaaaaactggaaattaggcagagatattggcttgcgggaggggggggtccgaaattttggaaatttcgaaacgaaatttcaatccctgtttataagatgacaaaaaaacgtgacgacgatgacacggtttcaattttgtgtgggtacgaatagaagaatagtaatgacatttatctaaattgatactcctacatttgtaatgaacatggatacaattaacccaatatatgagatattcttaggtcaaccatgtagtcgatgttgaaggggaaaggcacgaggattgaccctttcatatatgctgtacaatgcactatatatgttcgcacgcacgcataggtaggcaagaaagagaggagagggaacagtataccaaggcgaagccggccggagttaaggtaaaacgtaccagtagctactcctaggtacgtgtgggagtcgacgcaacgtacagtgggcgtccgtccgatcggtcggtcggctggtcgccgacgtgacacatttacttcgccgcgcggctcgtcgccggccggccgtcgtgtgcgtgattcacctaatcacaaaaggagatactactactctgtagagagctatactatagcctacgctactgttgggtgggtgtatagctagctttgcagttgcagtcgttgcattgcatgccgctgacacgcatgtgcgatatgtgaccagtgcccctagctactcctagacgctactggggcctaccctattaaccgctgtaaaaaaaaaaaccggtttccgtgtccaatgtttgaccgttcgttttatttaaaaaaattatgaaaaaaattaaaaagacaagtattaatcatgttttatcatctaacaacacatcttcttctatattgagttttttttggacggagagagtatgtcgtatatgtatgtacgactcctacatgcgcttgtacaggatacagccgtacgttatactccgtacgagtacggctttgtcgggcacctacgttcgcgcatcttcttaactttatctttcccgccttaacaaaaagaactttttttcctcgcacgtacataagcttgatcgatccatccataccgtccacgtagcagctgctcacctcctccgatccgtgtcttccacaagtctaacgggtatttctttttttaaaaaaaaaacacagtacaaacacaaacgctcacaagacgcacccactcacccctatgaacgtatacacgcaccctttatctttatgagcacttccgaaaaactgaaccaacatatcttaatattgataaagtcaccacgagcgcattgttgtcgatgtcgatgaggacattagtaaaagcacccgtgttaaatttaaaatttaaactcggacatgctgattccatcacaaggaacgatctaacgggtatttaaaggacaccaacacgcttgtgttttgtaatggacctatttaactggtcatgtgtcacatgaatccatacataattagggatggataaaagtgtggattgaattgatcatgaaacatcggagtgttttttggttaactaacttaatacgatagactctctccgtttcaaaatatttgacaccgttgactttttagcacatgtttgaccgttcgtcttattaaaaaaatttgtgaaatatgtaaaactatatgtgtacataaaagtatatttaacaatgaatcaaatgatatgaaaagaataaataattacttaaattttttgaataagacgaatagtcaaacacgtactaaaaaatcaacggtttcaaatattttgaatttgaaacggagggagtatattgttaaatgaataataaaaacaggagaagtacagattaggagcacaaatagggataacacgagtcactccatgcataggtgctcatgcatcacatccttccacaaaggccaatagggtatgatagggtgtgcataggtggacaaatatctcaaccaaagtcgccattgaaaataaagcgtgtggcaatcacgcgcaaccaataatttgttgcacagaccgatgttgtccacgccaaatactccgtaactaaaaacttatattggagctattaatatattctagtgatacctataatgtaacaatccccgactgtccttttattttttttaaaaaaacattctttgcgtgttacactaagataaaccattctccttaatttgatagccacatcacattttttgctgccacagtttgttagacatgtgtttggttcactaccacagttatggcttgccacactttttcaatatcatgtcccacatgtcatagacttaattttcttgcaaactttgccacattttgtggctagcaatttgtccatcatacttttgtggctgtcacaacttgcctaacgttagttgtggcaaagtgtggccagcaaccaaacacactctgcatgttgtgtcaccgtgaatgtgatttacatatgtatgaaaatattcgcacatcttccattatcttaaaaaaaatacgcgatatatttgcgcctttaattaattactaacggtgttaatttttatgtcagaactgggtacaaaatgatgccatggatcagccagcagacatgtaccaataatcatcagcaccaaccggtcggccggcctgtgagctctcctccatccaaaacgatcaatataatggcatgaacagcacacatcacacatatacgaacgtgtaactagcgctagagctacagagaaatctctcttttctctccctttgtggtgggggctataggtagctatagcaagagctagctactacttgatgtgatttttactggtcataataattttcttaatacgggaaacagcccaattattcatctacatggctacacatgaacagtgtgaagaaacagttgccatggactattcagctgaccggtagaggcccacaacatactgcacgtacaggngaggccggccattccatacatgcattgcataaagaacacaatcatatccatgcgtgtacgcacatatatggatatctgccttttttttcacatagatatgtatatatgtataaagatatacgtctgcggtttcatataataaggctttagagcagcgtatacattcatatatatatatatatatatatacacacacacatgtgcctagattcattaacatatatatcaatgtgggcaatgctagaaagtcttgtcacctgaaacgtagggagctcagcatgcatagtctcgaaatataaatatttatagctatgaatctgaacatttgtctttttagattcacagttaaaagttgttatattttcgaatggaggc

SEQ ID NO: 34905 - DNA, 748 bp, Oryza sativa
cccgtgagagcatcaaatcttcgcccgttcaaacagtatacaccctagctctacatttcaatacatagccaagcaaaaattcttgtacatagaacgcagtattttgtttttcttgttttgtttttgttttcaggtgggcagggtggcttccagattgccatgcagttccagctgcgattggtccggaggcaaaatcaaacaggtgacacattgttggctgcgtgcatgcatgtacacgcgctggattcagcctgcctgaataacacgcatatccaactcttatccatatattgtattatgcttgcgtgcatataccattcgaccaaaaaaatattatacacgaatttatataatagagactatatatctaaaagttcacaaatggtattcaataagtttgtgctttatttgtttctattggtgttagtgccggcgtgcgtatctgccggttcggaacttttcttatatattgttttagtgcctgttcgctctgacgaaaaaaaattatcaaaactttagcatagttgccaaaattttagtaaaatttcttatagttaccacaatttgatagtaaactaaatgtagctacttttttaacaactttaccaaaatttggtaaggttgaaaatgacatcaaagtgaacaggcccttaagctatgattgtgtttggatttttttttaataattggctgtagcctatgagcaaaggctggattctattccgttataaaaaagggctgcaggaat

SEQ ID NO: 34906 - DNA, 682 bp, Oryza sativa
cgaagtaacggtcttagatatcatctatacacagatacaaaccgttcgttatagttaccagcaaagtttcttcagctagtaaaacactagtaaggacacgtacgtacgatctgatggtgatggttagtcacttaattagtcaaatacgtttcccgttctgaaatatactcactctatcccatcccatcccaatttgattatcacgtaatttttttgagatttccaaaatgatcatgatttagcaaagtgttttttacttattcgtgcaaagagtaaatttacatcgtaaaatgcattgcatgcatgtatgtaaccaatcgagtgtaattttcattggttcaacccatacaacatttaaagtgtgaattttttaccggacacgaagcgatctatggagtaccttgattgatgagtattaatttcataatgaggatgtcttggtgttcctagtctttgtgtcatttggttatatgatcaatttgggatagagaaagtaatttccagtatttaagatttatcccaaaacataataatttttacaccaatgttctcctttttaccatatcttcacttcttgaccaatcatcacattctcacatttaattatatttcttttttaatacgtgtgtttaattctgcgaacctcatattatgagggcaacaacagtatatatagcaaaag

SEQ ID NO: 34907 - DNA, 672 bp, Oryza sativa
atattgggccttgttagattgaaaatcttgaattaggggactaatgttctggacaatctttacggcgatgtgtactctaatccctggacatttgtcatctaaactgaatgaatatagactcaaacaggtctgcgattcggagtatataccctggccggttccgtgcttgcccggcttctccactgaacttgtcaattccattgcagcacgaaaagaagctttgaaaatttcattgcagcacgaaagaagatgcattattttttgtttttttaaaaaaagagaggagaagtgttcttaataagaacacaaagtctgcacgaaaataaaatactacttcctccgtttcaggttataagatattttgactttggttaaaatcaaactgttttaagtttgactaagtttataaacaaatattttaatatttaaattaccaaattagtttaattaaataaataattaaatatatttttataataaattaatattgggtaaaaatattacttatttttttataaatttagtcaaatttaaagtaattaaactttgatcaaagttaaaacatattataacctgaaacggagggagtaacaatctccgtaatgacgaggaaacgataaaaacggtaacaaaaaacataaacaacatataactattagcactacaatatat

SEQ ID NO: 34908 - DNA, 654 bp, Oryza sativa
caagaattactttaagtttctgaattgccaccattagaaagctcctgaagctaattgattcaagcgtagttgtacttagtctgtggccatttccccctaaaggccccctttgaacttggtgtgtgtaggtgtcctgtgtccatggtctcaatttctcaaagagttttcctagaagagatcagctgatcgaatgaagaaattattatttcaggttggtccaagaacatgcatatcagtgaccatcttagttggtgcatgtgcaacaactgtctggattagggaccttctatagttttagattattttactgttataaactcttaccatcattggttccgagaagtagttaatatgaatggaaattggcccccaaattatttggaacaacttctgatattttctctgtttgtctgggtccacttgctagctgccagagagtatgacaaattatttgtaagattgcttcatatgcatgcctagctgtgttcattaattctatccatattcacatggatggcaagatttcctctaaagatatacaatacaattatctgagatatcaaatataggtttatttgttggcatgatttgaaaaatgcagttgacattgaaatgtcctggtcgactagtcgaatggccattactctcctggct

SEQ ID NO: 34909 - DNA, 527 bp, Oryza sativa
tctcaaaaactgaaagctaccttgtaaaaggagcttgtggactcggattgggttattgttgccaagctcttttagccagagcagataatgcaactgattcagaattagaagcgactacacaacttactgagcgtgcatcagttgaagaaattcttcacactttgacgacttcattagttcagctatgtccattttcatgctattccctcaagaagctaagtatttgtggaataaaatccttggaaggaatggaagaaaaatatgttagcttagaagatgatccttgggctgttgcaggacttgttcttggcctgggaaactctgttgtttcactatataggcttggagcttatgaagctattattgaagtcaagaatatattgatatcatggataccagatgtggattctagctctttgttatttgatgaagaagattcggcatcgctatgtatgggctcttgcccttgcccttccatctgttttagctttttgccagaaggtggaattgctgaatgatgacttgga

SEQ ID NO: 34910 - DNA, 689 bp, Oryza sativa
ctaaacttttgtgatgtctgtactacgcgcaacagtggcatgcagcagcatgagacaaatgccacgcacgtcagccattcgctgtcttagcttaataattaattaactttttggccatgttgggtatatcattaataatagatgtatatatatatataataaaaatcaatagtaattaatatagtctcgaattggttaatcatgcacacaccagatccagcacactacaggcagcagctgatgcatgcatgcgtaaggggagttaaattaattacatgattaattaatgtggtcgtgcaagttggttaattgattactaatattaattaatcgttctaattctgattggggtagctatggccagcctcgtgatcttgtcattttagtagtatatcttctcatgcacgcatacttagacaaggtaattgtacagccttcatatgttagtttagtgcatataaaaatatttggccgccacaaatttgtcctatatgcctctctctctctctctctccatgaatattgctgcagagaactggttagctaaacaggagggtgtacattattgaagaaattaagcagagtggttagttttaaacgggtgtttttggagaagagtttaaattaatgagggaaattttggtccttgaatatataggacttctgctcatctggaatgcaataagtgg

SEQ ID NO: 34911 - DNA, 581 bp, Oryza sativa
  unsure (1)..(581): unsure at all n locations
ctacacgaatttcttaaaaaaagatgatcaaatattgaaatgtttaatttatgacaaaactagaacaataagtaatttaaaatggagagaatggaaggaaaaaaaatgataacgatagtaatcttgttctaggataggtaggcttttcaagtcttaacaatcatcttgcaccttttatataaacatcaagatgcaaagttttgccaaaagcttatcttttacccattgggatttattagctactttaatttatacccagagcaatcatttggctagtgcgctggttgattattgtatgcccatttaatgagaaaagtgaaattcacctaaaaagctaaccaatatttatatggatcgtactgaaactttttgaagtcatttggagatttgattgatatgtagcgaactttcatcgtccaattctttttttttggggggtggggggggggggggggcttantgcaatcaaaagagtgtatagtgtactagtactagacagacaaaaaaatttttttggacaagatgaaatatgcgttaacaggatgtgctaatataagggtgcttagagagaaaaaaaagag

SEQ ID NO: 34912 - DNA, 678 bp, Oryza sativa
cattgctgcgagaatttagtatgataacaataaaaaaaataacatgtaagatagctagataacatcagattaagtaaattaatgtggtttatgataatttaaatttaaatagtatgtagaatggtgattcaaacataaatagtaaggtggtatgactttatgaaagaagaaaagtaggaagatagtttgtaccgcagattaatcatctaaaggctaaaaataattgatgtgatatggcttagttagaagaataaaggaaaaaaataatttggaccatagattaatcatttaaacactaactaagtgaggatgaactatataagtatataggatattataaaacataataaagatatacattgaaatattatgtgaattatgttggatgataatttaatatatttgtatttgaaaagctgttaaattatgaaaactataaagatatagcatgtttgcatgatgtttaaatgtgatgattattagtggatgatgatgtggcatcttgttaattagtggatgataatgtgatatcttgttagtgaatgatgatgtggtatctttgtatgttaagcttaagaagttagtggaggataactttatagtaagatagtatatacatgcttctgtatacatgtttgaatcaaaatagtgtactatattttcatggcatatttcata

SEQ ID NO: 34913 - DNA, 762 bp, Oryza sativa
ttgaaataagtgtattttatgtaaaggggaaacatcatatcttctcctgttgcacatatactagtacctttctatttattagcttctaccccccatatattatgaatgatatagctaaaaacgaacaaagatcttggtattcattaaatctgtgactcatcaaaccctcgtggtggcatagctgagtagtctacctggataacttttgcctatctgacttatttgttatgccaaatttcttatttaactagaaaaaatacccgtgcgttgcaacgggtgaagtctattttaatattattattgttatatggtttagttaagatgaaattcactataggagttcgcttggatatatatatttttagaaaatcatgagctatagttaggagtccgatcgtctcaagttagcatgcgagtttttttaaacatatttcttatatgattccttctgtattaccaaaagtgaacgatcttaaaaaccgactcatacacggatgacgtaccaaaataccggtaaaaacatcttcaaattttataatagtagagatgcatatattttcatgtggtctgtcctattatgtggttgttggcaggagataattcacaagatggcaattggtcactgtttgaatagatatgccatgatatactagcatacttgaaggactgagttgaaagtcctccatttcacaatgtaagactttctagcattaccaacattcatatatatacaaatgaatctagattcatttgtatatatat

SEQ ID NO: 34914 - DNA, 570 bp, Oryza sativa
tctcgcattacttgctcaaaggggtggctcacatcaacggccaaatctagctcccagattataatttacaatctagcaagaaactgcagaaaagaaaaggataaaaagagaaggaacagtgctgtaaactaagactccattatttttccctctcctctgatctttgccgtagattcttgatccgacggtacgggagtgcgcactgtatcctcgtacctcgtaaagatgcacatccagtggaacatgcagaggctgatactctgatgatactatcattggaaatgttgcatgagtcatttgtgacaagtgattcagacttcatgagggagcatagtgcactttaatttttttttcatgcaggctttggtgctctagttctcattgtctcaaagttagatcaagttaaactgtcgctttggcacacaacctgaccaacccaatgcctgcatatgctttatcaaattgctttgctttgctttagcatgcttgtgatcagtgcattagatctactatcatctagcttggcttgcatatattggccccccaactcactgttgttaattgttattt

SEQ ID NO: 34915 - DNA, 1011 bp, Oryza sativa
tgggggcacaatcaatggatttgtttatgccagataaataattctgcaaatgatttggctcagtttaatgccgtcagctgttcgtgcaagcacaaccagaaccagttgcagtgtcaactggtctgcatcataatataaatggctctttgcagtacaccacgaactaaaatgatggctcaccatgaacattgaacatgtatacaatcactcaattagactgatggctcttccaaaaaaaaaaagactgatggcaaggtcaacattctgactatctgcttttttatgcgctacagatggagcaaccgcgtgaacgcccaaattggtgaagatgattgaccgcatcagttatatacttatgttagcagtgaatttttcagaagattcctttgcattttagaactaatacagtgcctggtggtggctaagagcgaggggcaaagaaaacctgggcacagattgctgccagattgtcctcagataccctttgtcaacagaaaaaatggaaagtgcgaagggtacagttgagctacttatctgggctaaaactcgggagcgaaccccgcgaaccttccaccgccgccgccgccgccggcggattcgaacggtgtgggcgccgcggcgccgcagcgccgccggctggagctcgctacggcgcggcgcggcggcaatgcccttccgggctccggccttcccctatctgatccttcgcctctccttctcttcttccttttagcgggccgagcaaacctatgttggcctgccaaaattggcccatgatgctgaaaagaaccgaaaatccagtctcgtcatcaggttgactcgtcatcaagatcaagaagtatttggttcgcttgcaaagtccgggcctgtacaaattgatggtatttccaatcataccattatttggtaaaattgacaattatgtggctacgcttagtttgttaccaaatattgacaatgtgtatagaattttggcaacattattaagctaattctaccaaaattttggca

SEQ ID NO: 34916 - DNA, 681 bp, Oryza sativa
aattgaaacctatggagaattactgtgtgttcctacacatcatgttgatcttttactaaaatacctacatgtactgcctttgccttgacccaatctagtactcctactactgaagtcatgttaaaaacctgcactagtacttaacacatgtttaagaaaagtcaaaagcacacatcatcagttggttgttgagggcataattgcatcaagcaaaaagaaaacccccaaaggcagcaaaattacaaaggagatggaatcttagcccccctcctttgcactttcctgaggggccttaatcatttggtgcacacacctagcttggagagctaggggcccttcacactttggcacttgcacttaatttatccatttgagtacaagatagtgattaagaaggtgggtcaatataaaattgtcctggttattaaccaattaaccaattccaggtgtgagccttgtggttggcttagggttcatgctttggatctggagctactggctactacctcagctactgcttgtctggtaggagccaagaagcgaggaggatcaaagtggtggtatattctgagcatgtatagtctagatctgaagaatgtctgcttcttgacaaaggggatatacttctcctttctatataaaaagagaaatatccacatcgatacaataacgtgtgttgat

SEQ ID NO: 34917 - DNA, 1672 bp, Oryza sativa
aaacataagatgtaaacatccaaaatttgatcaaaaacttgaaatatgatatttcatattttttatccaaattttgaaaccttttctcctaggggtattttggtcatttcgacaaatttgtacagtactaacggagactaaccggacggcgatggtaaattgtagaagttaagcaaaagtcaatggcatattatagaacatgataaagtcagtggcaaatcgtagacgtgtgacaaagtcagtggtatataatggattctctctaaaattttcctatgaagatctttaaaacaaaggattgaatcatattctaatctccgaaaatcttatagagattttggagaaaatttagtaagagtttcaatatcttaaaaactttcctttgagtctatctctcatccaactcccatgtttttctgaggtctaatcaaacggtattcctatatttgtcctatattttgcaatccactgttttggactcgtatttttattagaattctatggttttcctatttctatgttttttcattcctacgattcaaatgggcatagaagtttaagattcggttctttaatatatatatatatatatatatatatatatatatatatatatatatatatatatatatatatatatatatatatatatatatgtgctcccttttatgaaaaaaaaagaagacttatgtgagtgttcaaatacatagctaagattcgtttttttaagatggagggagctcttttttgtaaaaaaaaaaagagacaaacttattttgaagctttcaaagtcaataagggatagtaacatttagagagtttaacattgatgtcttcataaatcttctacgcaagaaaaattacacaagtacaataatattacagaatccttcttttaacaaacatgtctacatcaccttcatacaaaacataatctaagtaaacaatcaagcggttaaaataaatactactactaacaaagacgaccgagaatccgagatagttgatggtcatttcttttagggcttgttcactttactaccattttcaaccttaccttttttttataccaaagttattaaaaaatagctatatttagtttgttgccaaatttttataagtacatatgaaatcttactaaaatttaataatgccaaaacttagtaaagttcaaaatgttatcaaagtgaacaagccctcagataatgacagttgatggcgatatcaattcatccattcaaaatttatgaaaaaatttaaaagcaggtggttaatagtaaacgttagtggcattatcatgtcattgtcattaccaccagataatcccccacaaatctgaaatctatatatgctttcgtgttggaataattcacccgttcgatcccggaatatgctccgattcatcccttcttcttcttcctcttcttcttcctccatccaccatctaacattctaaccccgcattaattccttcctccccacctcctcctcccccaaaatcccactcctcactccccctcccgcttcgagatctccccctccgatccgcctccgcctcgaattggggctcgattcgaggtatcacatcccccaatcatctcggaagaatctcgatcggtgtgtgtggggattgagtttggagttggatttgattttgttgcggattcggtcg

SEQ ID NO: 34918 - DNA, 1392 bp, Oryza sativa
tggttgaaattaaagatgatgtgactgaaaagttgtgtgtgtataacaggttgatgtgatgaaaaaggactaaagtttggttctaaactttggagctaaacacagcccaaattgcaaaaggtttctgcactctctactcaacctgctttggcagcttgtgttcgcagaacagccggtagttattactggttgttgcgacatgacatgggagcaataaccaacggtcagccagaaaaccgcatctatctatctaccattcattcattcattcattcaaacgtcaggttcaagaagacgaggaaaaagaagaagaagaacaaaacgttttcatgaagaatttggtaactgaagatgcagaaagtttgatcttgctcgatgtggagtcagagtgacactgaaagtctgaaaaaataaaggctttactaattgctactgcaatttttccaatcttctgcgaatgatacagtgtgttgttccaaatctccgattaataatcctcgcatcatactttggtgggtcaaactgttaactgcacaactgttcgttggcaaattcaaagggtttcgcgtccctggaaatgatgtgatttgtcacgcaagatttatttatctgctcataagttcttctaatcaagagagcaggtttgctagttacaggaatccattcgcagtgatcaatagagattggttggtccaaaatgttcatctggtaatcgattaacaatcagttcatgttttggctgtcagcagcaaaactgcagcttgaagcagttctgatgaaattcaacctagatgcttcgacagttcgactacttataatcgaataacaaaaactgcacgctcagcaagaaaattcttccaacagtttttttctcaaagaaattattccatccacaaaaattgttgagcgatgaacaaagggatcccatgaacaaataacagcgcatggcgtggagcttggtcagccgctggatcagggagcaacggcctggatgtaagatggagccacacgaatcgggcatgtgatgcgggccggaaaggggagaactattttattgggccgtgtgctcataaattgggccgcgtcagaaggtgaagcccacgcgcgtcgtactgcgggggtggcgctggccacctgggtccgttggatggggatccgatggtttgtacgggggcgctgcggggaaagtttagtaccacatcgaaagccaacagagaaggagagcagcttataaactcgcgcgctgcagctaggtcgtcacttcggtgacatccgataaaattggaacgatacagagaagattagcatggcccctgcgcaaggatgacacgcacaaatcgagaaatggtccaaatttttttgagatttctgcccaggcccctgcagcccata

SEQ ID NO: 34919 - DNA, 548 bp, Oryza sativa
aaaaaaaaatttgacatgaaaaacaaaagaggaattaaatgactgagcccagtattctgaacaaatttcagaccgcaaactgaacttatgtacatagcctaagaacaaaaaagctaaacacacttttttttttcacattgaagcacatagaagaaaatcaaaacaattctggaattttctgtcagagtaaagcgcacaatccgttggaactaaaccaatattcacaggtgtgtgtagagaccagatattaatcgtagtgaagaaagaaattgcagtgggggcgtgctgaactcacgtacatgtacatcgacgtcctcgtagccacaggcagcgtcgttggcaagacaaggtaacgtacgaccgttgtcatcgtagacgcttcccggattggaaccgccacgtcgtggattgccggcgaggcgagctcctccggagacgagaatagatatcagtgtgcatcaagatgatgccgccgcttctggccactccggggcaaacccacgatcgaacaccttgagtgcagccgtctttcgttgttggtggtggtg

SEQ ID NO: 34920 - DNA, 802 bp, Oryza sativa
ttttggggttcttgaatacggctttctgctttcattgccccttttcttgttagtagttttgttcttttttgtgctctgtaaccactgatgtggtctattttgcccttctgtgtagcttcaatttaccttatgccctacttatatgctaatttctctcttatatgcttaataattggcacagctcctgccactgttataagaaaatgttcatgcatgttattatacctgatcaatattgatgataacatgtcaacataaaagaactctgcctgcaaaattttatgctacacaccttttggccccttacatttcagttacaacagaatcacacatctgaattatgtcagctctctgatcatgtagttgtggttgcatcaagtttgatacgaaagaaatcaaccttttctcaatcattggtccactattgatcacaatagcattgacatcagaaacctaatatcgaatggctagcattaacttaagcttgggtttttcaagaaataaaccatgttgccattgtagaatgaaactgcatatacaattcttacagagagacgataaatgaattattttaagattacacatagattagcattatagcgtggtcatcaacatcattaacttcagatacttattcaatttctcttttgcagtatttggatgaaaataaacagctaattttggccatcctggaaaatcaaaacctagggaagttggctgaatgtgctcagtaagttgcttgctaaacatctttgaaaggctttattgctggattactatatgaaatgcttctaggtggctg

SEQ ID NO: 34921 - DNA, 1076 bp, Oryza sativa
acggtaacagtgcactcgatgaaacgacagatttgcccctcccatcactctcactcacaaaagtttgcttccattggagagcaaatgttggcactctccattctgcagccatatgctaacgaaagagaatatatcatgctctctactagcattggtagtaaatttttatggaacatatattttctctaaatgttttaaatggaaaaaaaaattacagtatgtccacatgaatacgagggaagttcctttacaaagattaaggttccattgaaaaaaaagggtgaatattgtatcaatattcggttgtcatccactaatttcacgtagttgccaacaatagtatgctcaaaattgaatatcataccccttcagtttttaaatgtactacatgattggctttagacatgatgtttaatcactaattcgtcttattaaaagttattatttattttgttgtaacttattttatcatttgagatactttaaccatgactcaattttttttatattttacacttgattagttaaataagacgaataataaaatatcaggcctaaaagtcagcaatgtcctattttaaaacaaaggaagtattccatttgaaaagtgagaaaaattctaatttctacacaaaatgaattatatttttgttcttgcatgtgaaaatcctttataacatagaagaaccttcagggatggtgatgaatgaatgggtccataaatctcctcatcagtgtttaaatcttagtgtccataaatattatgtacgtataggtgcctctttaaataaaaaatcaatgagatcaaagatttaccatattttctctattttatcagaaaatgtgtgaagggatggaagtacgtgcctaaaccgtgtaagtgacctatttttctgattaagatacatatattctatctcgattttcgttagcacatttttcacacgaatagactatgtgttctgcgcgaaaactttctatatattaaaatatgcgataaattcaattttcaaattaaaataattaaaactgaattaatcatgctcttttcttttggtttttagtgccgtacctat

SEQ ID NO: 34922 - DNA, 1633 bp, Oryza sativa
taccgtttaacaatttaaaaaacatagtaatgaaaccgatgtaaaatatgtatccactactacataaacgatattttcaaatgacacccccaagcagtttacatgtactagctcataagtacctcctccctccgtcctaaaaaaatatgggactggatgtgacatattctagtataataaatctagataaatgtaggatgtgttatatccaatactagattggttttttatgggacggaggagcacatctgaaaaaaaaaaactggtttaggccagttgatggaccgttgcgacaacttagatatcaacttagaactgagaggccttgtttgttactaaatgagataaagatttcatttcatgttttattagcatgttttttaagaaaatattagcacgtttttcaaactgttaaacggtatatttcatataaaactttatatgcagaaattgatttaaaatatcaaataaattcattttttaaaaaataaataactaaaactcaattaatcatacggcttttttttattttgcatctccgtacttaatgttattcagcacttacgaacgggaccagtaatttgatcgtttagttggatggagtgtttgttgatattctcagtcttaatcgtaattttcacaatcttacgagtgccattactaattactggtattttgttggagtatgaccagaaatcgcgagccgggggaatcaagagaaatttcctaggactgaaaggacaaaacctgtgagactgtgattcgtttcccatgggaattcagctaggaacaatgtttcgtagcagacaccaaaataacaaaataatatgtagtacatatgaagcgagtgtaactcaattaattaacatattaccaagatcaagtttgaaatttaacatgaatacttgtatttacggttaattatgttttcagtgatagataacgtactcattgactgtgagccatctgtggtgatttcgtcaatttcaaaatatgttgtgttagtcttccagaaatacttataggataggtcgtcgacaataagacacccatcgtgacttcgtcaatctcaaaatatgtcggttcaatcttctggagagatgttgatgggtaggatgtgcgtgtgaatttatatggatgagtatacttgtgatgtgggcgttgcgttgttttcgtccatccttatatgtgagaaaactgtgattatactattgtaaaaagagcggatccgttagtatgatataacttgtaaaatcgcacgggtgtacgccataatgtcattttcactatttcttacatttttaagtttcattttatccgtgttcgaagtacgctggctgcaaggatacactctgcaccagtgacagtgaggccatcgatggacaagggaaagtgtcaggtctcaggctctcagctcggtgcatgggagagaaaacgaacgacacagaggaaattttgtccagaaaaatattaaaagagtgaaagattatatctatttataaagagcgaaaatggtgttgttgtgtacacgcttccatggagcatggcgttttgccaaacggattagttccatgaatcaaacaggccttaaacccttagtcatctcctaagcaaagacatcaagtctaattaa

SEQ ID NO: 34923 - DNA, 548 bp, Oryza sativa
tcctgtttccgattgagatctagaacccaagcccatcagctatttttttctctgtgttctttcgctttctccttgccgaacttcaccttgtgtctagtctcccggggatcaagaatttcatttatcttaatttcctctcaagctcggtcccccacacccgatacaggcccctcttgatcccggtcactaactccctatcaatccgtactaatctaagtaaatcatgaactgactggacgtataatcgactaggtcgtagcaatcagatgatgtggaagaaagagagggaagaaaaaataaacattgttattatatatgacaatgacataaagtagactcttagcatttagtaaatggaaactttgttacatgatggtgcagaaaagcaaagaaggataataaaataatatctatactattatattatcttttctattatagtaggatatagtctatagtgacatgaattaatacgtagactccatgttagactttaccgatataaatgcctaagtaaaataagcaacagagatcttaccattggcgct

SEQ ID NO: 34924 - DNA, 528 bp, Oryza sativa
actccccattctgaaattatgataagtcaaaataacattattaggttagtcatgaagctattatttattcatatttttaagtatctactatgaatatattgtaggaatttcaatatattgtacaaatttttattttcagatatgtttaatttttaacacaaattatgctttttaacttaatatagcatgaaaataggagagataattgaaggaaaataggagaaagggattgagggataggggcgtacgtgatgtacgtacgtacgtccaagtataggctctgggtggggccaggtttgggaggcatatatttattttcttaaaatagatctaacggttgtaaataatgggtccaccagatttaataaaaatctacggttagatattttgttttttcttgaatttccttttaatttattagaatgacacatggcgatttaagagcgtttgtagagtgccacatggcaatctaatagtgtttataggatgtttaatgaacttttagtatatactccctccgtttcaaaa

SEQ ID NO: 34925 - DNA, 565 bp, Oryza sativa
  unsure (1)..(565): unsure at all n locations
ccggctcgcggcgaacaaagtagcccattaggccctttgctataatgacactggacccacatttcatagacacagatgggcccatttgtcatccgctcggagtgtcaaaacaatnnnnaaatccccaatgtttgctatcccaatattgcaattttctcgcaaatatgcccttctaatgatcgccaccattgaaatttgtgaatccaacggagcatttgtggtctgcaacctcttcctcccgctagcgaggcagcggcggcggccggtctcgcgtcgccaatgggcaatggcgggcattgccacgtcaccgatccccgccggccggactcgccgtccctcgccgccttccgttcgctggaagtgcaacttttccgatcgaacagagcacgggaagccggaagcaaatgcatatggttggtaatggtcgccacggcgcgcgaactgcagcagcgccgtcgtaagacggcgtggccggccgccggccggtgcgccggcgccttccgggtgcacggggtgcaagctactccatcccccaaccaccgatctagttggcctcctcttgact

SEQ ID NO: 34926 - DNA, 615 bp, Oryza sativa
tatttttcaacctttacttttaggtcgctaaaaacaattatataaaaattttattcacaaattacttctcgtttataaatgtgctgggccgtgagttttttttacacctaggagaccacgtgggcccccccacctcctccccgcgttcttcgctggccatgtgggccccaacgaagacttcctcgccctccccgtacctcgtacagaaccggccactgtggcaggcgtcatcgcgtcggcctcatgcatgccgacgctgcccatacaatagtcgcttgccacctcgcctttttttcccgtcgtccgtgccgcgccaagtcgccaacaccgatgcacccggtgcaccgccttgccttctcgcgctccaactcccgcggtcgacagtccacgccgaaagtgtgagccgagctcacccacgccgcgtcgccactgtcgcgtcgcctcgcctcccctgtgccgccatgcctccttccatcccctcgaagccaccgcgtcgccattcgccatggctatagaagccacctcgctccaccatcctccatctttcgccattcccatcgccactaccgtcttcgctctcccctagtcggcccgaggcgcgcggtcgggcacttc

SEQ ID NO: 34927 - DNA, 794 bp, Oryza sativa
tttttcaggtttgatccgggtcactcatttttttccgtctgatatggtttttcttctaataatacacatggttgatctttttttttaataatacacatggcttttctactacgatccaggtcgtcaagttttttttctgtccgatctggtaatttttgttcgggtcgctggtggatagtttttttttggtttgatcttgtttttttggtcgtgttgccagttgattgttttttccagtccggtttggttttatccgcgtataacacagatgacggatgaaaattaaggtgagtacagaatatcttcaatttttataaaaggtaaatataaagattaggtaactatttaggattcaatccttcgtgtgcaccaagaaaaaaccagaaaaaaaaatcgtgacccactaaaaaatcggacgaaagaaaccagacaaaaataatttacggaagccttacttatttttaaattatatatatagagagagagaaaggaaaatgcaaatatgagctcgggtgcatatgtacctgcaatctctcccgtccagccacgcaaagattcgtgcgtacatggttaaagggtggcgccgcagcctagcttgcttaagcagagagcagatgggagttaacgcaagggagagacattcaggccactttaaatcgtaggaataaaaaaacagataatagaaaaaatacaggattctgacagaaatataattataaaacagaggattataaaacacagaaaaaacacaagaatagcgtttgattggaccacaggaaaaacacaggaatcag

SEQ ID NO: 34928 - DNA, 682 bp, Oryza sativa
agtatcgacttgctgctgtcctattattggagtctcatattcaaactagctatatgattagaacttagaagcattaagactaacatttccagacctgtaatactgtctcattttattaatggaaatggggggagcaatgctctactagttcaaaaaaaaaaaagactaacattagcaattcattataagtttgacttgaagactaaagcgtcattaaatagcattagctgataccaaatgaggaagagaaggctgtttgtggtgctttcttcctggaagaagcactacatctgcacatagttacctcaagcacatcggctctagcacgacaatggactctctcccccatgtacaagtcatatctctattggatggatggttagacatggctagagaaggagtcgggatgatcaaaactacccaaaaaaatatagagagagtaaactggtccaaagtgaaactttgacaataaaaaatggtccaaacggcaatagatactgttgatattgacatactacaatactttgatagggaatgcttcctctcaggcttactgatgaaatgcatgctgatgctgcagccggccgccggtggcggattggccatgataatcagccaagcctgaccggagaggaacatgcagatcttctccttttgttttagcaattaggtctacgatggt

SEQ ID NO: 34929 - DNA, 1342 bp, Oryza sativa
atgatgcttgtagtgacctgcaagacaattgtgaagaaaaactgataagttgcaacacagaatattgtagtcatagcgcaaagtagagataaagctataagagagtgataatcctaattcgtgcctggcgaagaaagtagtcctaatccatacatgtaaacatggcttgtcatatgcaacttctgagcgttgaaacgaatcatgcctcatgaattaggatttcagatgatttagtgaggatgacaaaagtttctcagcaacaaattcttgcaaggtggaatagcacatttttaatgatataagctagggattgattcaataagtatctttatacattttaattttaccatatggccaacacaacacatgactttttagacgttacgagattttagcaaatatcgatatagcatactatgattcttattatttagtccaactaaaactatagattacagtaacattcggatggagtgggaatataacaggaaaagcattaaagttttcatgtaaggacgcgagtataacttggtaaattagacagctacttctgagagttgcaacttcgaagggggatcacatttccaagaatgactaaaggcaccattaggccagcctactttggaccaacttttgcgtttagtattatttgataattttaagcaatgcatcggccgtcctttatttgaccaggacacaatctactaactatagcatctctactgattggaattttggaacttagccaatcttgtcccaagttatcctaactcatttccaaagatataatgaaaacatgcatccacatcttatctctcaactgactcaaatctcaagtggacttgttggaatccacagggtgtgggcaaacagataagtctagcccacaaatgggtccacaatataaattaaatcaattcaacactatttttggaaattttagagggccaacataaacaattaactcctagcactatttctggactttgtctggagtaacatatcaatagataaacaattactggggagaaatgctaaaagatggtcatattttgtcaaacttcatgtcatcctaatttaggacaatccaatactgaaaggaggtgtagtttgatatataacatggaataagaagctcacctacatgaggagaattttgccatttaactaggttcacatcaccaccaagctccagcagacgtcgaccaaatttttgaacaattgaacacggagcaagttcatcgtcttcagaacagaatatgagtattggaccaacatgctgaaagtacaatagaccaatgtttactcagatatccacaaacacttccgttgacaatcagat

SEQ ID NO: 34930 - DNA, 698 bp, Oryza sativa
attcctgcagcccctaccttcaagtttgacacggttagaagtaaatgatgttggattgaccacccttccaaggatatatgaccatcatgttaacaacatggattttgaaagcaaggaaaccaagctaatctcagttatcatcagcaactgctcaaatttaatttctctggaggaaagctttctactgcaggagcaccatatccgaagtcttcgtatcctaaggattgttgattgtgaaaagttgatccgagctcctttgttattttcagaaatggataatcttgcagaatttcatattggtaagtgttaccggttgagagtgagggaaaacgatgataatgtactactcccccgcacacttaaggaactctccatggtgcagtgtggtgacctccagcttccactgctggagtcactggttggtctgactaatcttacgtcattgagtctgtgtaactgcggcagggtgaggtcccttccacagtcagacgtgttccggagtctcaggtcactgcgagagatggctgtggctgattgtactagcttggcatccttgggtgggcttggagccctttcatatctcaattggctggaaatcacagagtgcccgaggcttcaggggtatgccagatatgatgaagtggatgaagatccggtgttggagttctccctggaggtctactctctctgatacatac

SEQ ID NO: 34931 - DNA, 657 bp, Oryza sativa
aaattttggaagtttttgtcataggggtattttggtcatttcgacaaatttgtacagtactaacggtggctaaccggacggcgatggtaaatcgtagaagtttagcaaaagtcgatggcatattgtagaacgtgacaaagtcagtggtaaatcgtagatgtgcgacaaagtcagtggcatataatggattgtctcaaaattttatataggattgaaatcctctaagggccttttgatttagaggaaaaacatatgaattttgaaagatttcaatcctatagaaaaaagttctatggatgcctttgaatcaaaagattgaatcatacccaatgctttgaaattcctatgaaatggacattcatatataaattttggaggaaacttagcaagagtttaaagctagctcttagaaaatttcctttaagtttatctctctcatccgatttatccgatctatgtgtttttcctacggtccaatcaaacgatcattttttgtgttttttctatattttgtaattctttgttttacactttcatttatgttagaatcttatgtttttttattccttcattttttcatttttacaaatcaaaagggtcttaaaattgtagagtaatgtttttcctccgaatcgaagaccctcgatgtgagcagca

SEQ ID NO: 34932 - DNA, 651 bp, Oryza sativa
gtggagtttgagtccagcgacatatgtcccccccgcttggtcattgtctagactgaaaattttgtagttagtctcgtactccctccataaaaaaaaacaagtctaatagggttctcttttagcacaacgaatctggacaaatcttttttaggttgggtatttttaagacaaccttaaaggatccctttctagtacaacgaatctaaacacactctttctaggttggttttttttggacggagggagtatgctccaatggcttgctcccgggctaatgtactattatttggtgtttggacacgcatatgcatctcttccatagttggaaaggaaaatttctatctattgaaggagggctcacactaattaacttagtgtttatcacgtcttaaaacaagacccaatctaattgggggatgtgcacgaccaacttggtataatggatttagatataaaggtatccagatttgttatactatattctttcttttgtttcataatgtaagtcattctagtatttcccatatttgtattcatgtatatgtatatatatatatatatatatatatatatatatatatatatatatatatatatatatatatatatatatattcattaacataaatatgaatgtgggggctgcaggaa

SEQ ID NO: 34933 - DNA, 1569 bp, Oryza sativa
ctttcgtcttcttgtgtgactcacttcacagtagttgtgcatcatctgcttctttccctgcacagcatcttgcctcttagatgtgacaatggatcatcagatcaccttacaggtgtaatggtgccgtcgtgtggatgttgatttacttggcacttggcatcaggatggactttgattgattccaataataagtacttattccatttaaaaaatgaattttattgctcgaaatttatctaaactggagtaagttgatttttagtctcccctttggttcttaggtagataagtttttatcttttcggaattttgctaggaatcaatttattttaagacttagagaatatagcactatctactagcataacaaatatcgcttagttagcacagggtttcctggtcatcatcgttggatttagaatgacatatttgcaacaatacaatggttgtgtttatctataattacagtagaacagttaaatagatctctgtcatattgagtagagaaatatgataactatatattacgaatcttaaagcaaatctaacgacaattgttagaaacgtacatgtagtatggatggttttcctttttagcctacgatacaatacttcaactataatatttcacttgtataatgccaaaatgaaaatgtttctataagataaactcaattatgtaaaagggcatgtagcttagtgattgcaatgacctgagtagcactttaaagtactgagtttaaatttccataggagcgaattctagattagcttatttgagggctaaattccctgattaataagcaaagtttctaattttaaaatgatgtatccggttggatgtatataaactcaattatgtcattattcataccacccaccttatttgagggctaaattacctgattaataggcaaagttcctaattttaaaatgatgcacatatccggttggatgtagataaactcaattatgtcattattcataccacccaccaaatccacatgcttaaacacacacattaatgcccaagatataaaatgatcgccctgcaccctgcatacgtacaagatatatactccctccgtactcgtaaagaagtcgttttgaacagcgacacggtctccaaaacacaattttaacttattgtttctataaaaatatttattgaaaattgatatatgtatacttttataaaagtatttttcaagataaatctattcatataatttttacattttcaaactcaacaacttaagagttattcatgatttatattcccaaggtttgacttaaacattgtcctaaacgacttcttttacgagtatggagggagcacatgaatataaaatcagaaatgctgtaatccctgccatctcaccacgattatataattactccctttgtcccaaatataagatctatacctttttttacacgatcttcaatacacaaactttaacaattaatttattccatgttttactctcaacgaatacgaaattagcatcacatagtttattcctatattttgcgacggagggagcatatatcaaccgtcgacccacc

SEQ ID NO: 34934 - DNA, 1331 bp, Oryza sativa
ccaattgatgtagggaagtcatgccacttggacacttggtaggtaggaaggtgtttcatgacaaatagacagaagttgtctggttccaaataggaaaatatctctactattcttgtcttttatcaataaacagtaatatgctgtactttggtattagatttctgcaatgatttgtgcgatgcttgcagcgttggttcacatcgttctgattctaattgtcatcctaggaaataagcttttcctttcttctttataaacaaaagtatttgcagaaaacacaaaagccaagcgcattatggatcatggatcgactttttgcctgtgtgcttgtggttacatagagtcttggagctaaaaaaaatgaccaactaatcatgtgaaaatcatttttaggaaataatagtttcaagaaagaacttaatgtgaatctactacctctagaaaactgaaaagtatccactttcacttattttttacagttgaaccagcaagtgacagacctaatggacatggaaggtgtgaagttcctgtttttgttggcctgcaactgctggggctttgagcaattggagtgataatgttgggtatgactcttttcttgaacctcttcaattagttatatggttatgatttgttcagtactgactgtattttactgaataaatctaaaactagaaagtttgtaagtattttctttatatcacgccatattctgattgtaatacttttattatatatgatctcttttgttctgcctgtagtggtgggatcacatgctttaattatttatgggtagtattgttgaattgtaaaatgaatgttaatacttaatgggtagcattcttgatgctgatgtaaattttactggtatttttaaaattttgtgtgccattattatcacaaagagttttcttaacttattcgcatgacaatcagaatgatccaggctaccagggataaatacgtgagtggtaaccggctagtaccatagctacgagtactgatatgctatgttgtttcttgtacagttacccattcgtatgtgttatttggagttagaagttcagggaacctcatagaagattgagagaagattttacatttgcattgttgaatagtgattttgacttttgagcatagtcaaactgggtagtaattagcgaacaaaattatttgatgactatgtccatacagtagtaaaacttgttaccgctagtaactggccatgaaatgttgactgccagggtactgtattttttcctcaattgattttgaatagttggattggaccactttgtcatgcatgaaggttactgttcattcattattgt

SEQ ID NO: 34935 - DNA, 611 bp, Oryza sativa
ggaggtcaatagaccaagagccattttttctgaactgcgatgatactatgcagttggggttgtgttgacggaaaacacgacaacctggggaaactgcttaactccagtgcaggtcaaaggtttgcctcgagtgtgctaagggcgtaccagctggtttgatcctgcaaccagcaaggaaacaataaagcatgattagtcagccgatagccgatcggccgataggccgatagcatattaatggtggtctcagccgatgtagaccaaattggctatagactagatagatcaaagaatataaaaccctaaacatgcctcatcggctgtaacattgctaatcaagtttaataaagaagttcaagacaatattacgaaaatagccaatgaaaccgtatttagagcagaaaagatagataaagatagcgtaccagctaatactctagtacaaacctatatatgcaaatcaatctatagtaatatatcaagtagggatcaattgtcaaattgatagcccagccgatataacctagacttgatatattcctataaggtgatctgtctatatgcatgacaaatatacacgactaaggatgatgcacctcaaagtatgaaaa

SEQ ID NO: 34936 - DNA, 798 bp, Oryza sativa
  unsure (1)..(798): unsure at all n locations
agccatgtagaatatgtataccggatcgacaccggcnggaggncgntntgaactagtggatccccccagaacggtcttttcnnatcaaagatatgctgtganatggtnattanacaagttaagtggcaagaaagaagacagccaagaagtgaatgggagaaatgtgccaaactacatacaaaagaggcannctgaggtcccccccccggaatgattgcaaacactcctatataatctaaattcaagtgaaacaagacaaaaacattcaaattacgtttttgacaaattcttgaagtcactttacctggattgcggaccaatgacatttttttggtagcccccttgctgaattgacggccttggtctgctaacatgaacttcaagttgagcaagaatgaacaaaataaggcaaacaagaaatgaagggacgcaatgagccaaaccacagacaaggtactagtatcacaaattaacattgtaaagcgttacctactgaaaagagggtataaaactagtatgaatgtaccttacaacccgcttagcaatggctggttgtggtggcctttggaatttttaaggtaacaagttttcttgtaagttcctccagagaaccatgatgatgggctgccattatcaactattactataagtatcgaaaaatctaagagcagaaaagataccccaaaatactgtaacagattaataaaaaaagcgatttcttcgagaccatgttagtaccttaacatgtaggttaacaactgtgttattgtttagagagtgtctgaacaccagaacgac

SEQ ID NO: 34937 - DNA, 1891 bp, Oryza sativa
  unsure (1)..(1891): unsure at all n locations
ggtgagcttcaaaaggcatacacagtgtcaaattgcttatcatggtactgtatgtacctgctggcttcaaagcccaaactgctcccagaaaccattttgatgtccaagaaggcctttcaagatgctgttcagtgtgctcatgaaatgctcagtgattgtcactcctggcagagcatatacaacaagcttatgaaagaggcgcagaaagctcttgttcaaggtacgcatggtctaaatctgagtggaaacatattgcaacaaggtgctatactggctaatgaactcatcaagaaggaggaccaaaaatgtcgttgggagatcctatctgatgtgtgggttcacttgcttgtgcacattgctcccagttctgacgcagcagctcttgccgaggacctcaaatccggtgtcgagttcgtaaccgtcatctgggctttgttttgccactgtggcatcgagaagagcaaattatggcaacagcagaagagtgcaaatttcaggaacagcactcctggaccatctaatcagagcagtgatgtgtctacccatgttcaggacacagtcagctctagtccacctgctgctcgatcttcagaaattcatgtagaggctagtcctacttctggtatgtcctgaaacctgaattgctgatggctgatgctctgctcccctcatggtttcagttttgtcggtaaaatttgcatctcatcatgacatttgaacactagtatttgtttcttgtgtgaatgttttctgtgttgtgattgtaacaggggaatgctcttgatgcaatattatgtgttatgcactttttagagcgccatattattgtgtgtgttgtgattgaattactctggaaataatttgtgtagttgacgtgcactcgttatttggaaataaattgttttttttttttgagcaaagggcgatgccctccatttccattaaagaaatgtaaagattcttacaagaaacagagtctgaaaagcaaaaaagacatcatgcctaaagcacaagctagagttttcctaaagagaggcctccacttctaccacacagagccaaacagaagatcaaactacctagtaagacaaaagcccataattgactatctccagtaaacgccatcagccattgagcagtcttctctgtccaagacgccacccaaattgcgatttaaaaacttcacttgctatttgctttagcaattgtactccccattgcaactttccttgcctttcctccgaactctgcaaaatggcccaatccaacattagagagcaggcattatacaagatatcaacaaggctatttggtaaaatatgatcaaagcaggctttatttcttgctttccaaatagcccaggataacagctgccacacccactaacatcagttgttttgttgttttatcacaagtttgaatccaatagcttgaaaataaattgtttagttgatatttctttcctccaacatattacataatatttcttgtcatattgggcactaatctacccacaatctaacccanaagttaattttcctgtagaactcaacttttcaggaaatgatcatatcaggaaactttccatccagtctgtttgtagcatagatggcaaccatactgtacgaccagtagaatgccatttaccatcgtagacctaattgctaaaacaaaaggagaagatctgcatgttcctctccggtcaggcttggctgattatcatggccaatccgccaccggcggccggctgcagcatcagcatgcatttcatcagtaagcctgagaggaagcattccctatcaaagtattgtagtatgtcaatatcaacagtatctattgccgtttggaccattttttattgtcaaagtttcactttggaccagtttactct

SEQ ID NO: 34938 - DNA, 883 bp, Oryza sativa
tgtgcaattatttttttcaatctatatttaatgctcgttaataaggtcgaaggtcaaagcagaaagggtttgagcttctttggcaacttagctattctttggcaacagagctatttgcaaatgtccaaagattcgatgtgatgtttttagaaaaaaaatttggaaactaaaccaggccgaaggttgatgctgctataggcttaactctgcgatgctagggactttgaggatagttacaagttacaacaatctttattatcagttgctagtaaaatacaatcacaatccatatgttttgcatcagaaaggagatacatgtaagaattatataattgtatggctaagtatatttcttaactagtctggagttatatggtacaaaatggaaatgcgaataaatttatgaagtatcggaaatatgtcagctgttaacaacttatgataaaatactttagccactagaagaggacaaatcagccaaaagaaatattgtatactccccaagtattaggtagtaggtggaactaaacgaaaatattgttattgattgagagaagaaaatatatggagaaattgttatattttaagataaattttgaatgctacgttgttatattttaagagggagggaatactttctagtccctatgcaattcttaaaattgctaaaaaaaaagctattgatggaaaaaaaatactacacatcattttgatctgtgtttttttgtttttgacaaaataacaatgtaaatattttggtaaaattatcaagcaacaaagggtgcgacgcaaactagtcgaaagcatctatttgaagctaaaagcccaaaatagatagttgtttcaacaaaccggcagattgaaaagtaaaatataaaaacca

SEQ ID NO: 34939 - DNA, 2080 bp, Oryza sativa
attcctgcagccctaatttcgaattttagttatttgtaaattatatttttatatggactctaaacactactccctccatttacttttgatagtcatattttatcttggcacacagaccaacgataagtgattctacttatcatccatttaaacatgctactagtcattcctcgtaaacaagcgattcattaatatttacatttttctatgcccatgtaaccaatcttgtgtgcaagaatagagggtcacgcattaaatttaagaaagtcattaagatgataagttgttagattgaaatatgcatatcaaaaataaatttttcaaatttggaaatatgactatcaaaagtagagggagggagtactttttattttattatgtttattccgaattttagttagttttaaattcctatatgtactctatactctacttctaatattccttattttttaattccgaatttctatttttttttcttaattgtatttctatatggactctatactccacttctaatattccttatttttaattccgaatttctattatttcctaattgtatttctatatggactctatactttacttctaatattcctttattttaaattccaaatttcagttatttcataattgtatttctatatggactctagtctcctcttctaatattccttattttttaattccgaatttcaactatttctaaattgtatttctatatggactctagtctcctattctaatatttattattttttaattctgaattacagctatttctaaaatgtatttctatatggactctgcttttttatttttctccgattaatgtgagaatttctaggtcatgagagcgaacgtggaggctctttttttttccgaatcttagttagttttaaattcctatatggactctatactctacttctaatattccttatttttttaattctgaatttctatttttttttcttaattgtatttgtatttatatatggactctatactctacttctaaattccttatttttaattccgaatttacttctaatattccttatttttaattccgaatttcagttatttactaattgtatttctatatggattctagtctcctcttctaatattccttattttttaattccgaatttctatttttttcttaattgtatttctatatggattctatactctacttctaatattccttatttttaattccgaatttctattatttcctaattggatttttatatggactctatacttctacttctaatattacttattttaattccgaatttcagttatttcctaattgtatttctatatggactctagtctcctcttctaatattccttattttttaattccgaatttcagctatttctaaattgtatttctactctagtctcctcttctaatatttcttttttttaattccgaatttcagctatttctaaattgtatttctatatggactctgatttttctttttctccgattaatgtgagaatttctagaccatgagagcgaacgtggaggcccgaatttcagctatttttaaattgtatttctatatggactctgctttttgtttttctccgattaatgtgagaatttctaggtcatgagagcgaaaaaaaatttataatatatcactccaaaaaatgtaagttcaaattaaacttacacagataaaaacaaaattaatatttttaaaaaattttaggcgatagaaaatcaggcgaaaactttatattttttttgttgtcgggttggctttggagatttgagtgcaggatggagaaaaaaaatcaaatgtgcccattgttagataaaatgatatgtaatgtgatcttatcacttgtagattgtaaccacatggcatggctggatatgatgattgtaattcctagttagttgcatatcttatccagcaataccatctactccctccgttctttaatataaaggattttaacattttgcttgcgctgttggaccattcgtcttattaaaaaaactttaaaattattatttattttatttgtgacttactttattatc

SEQ ID NO: 34940 - DNA, 1618 bp, Oryza sativa
atgtagataatgcatcaattataaatttactttttatgcttgaatagaaaactacagtttttatttttgctggtttaattaaatccgtagtttttctttttggcaaagtagcatgtaaatatcttggtgaaactaataaaagctcaaaatagagttgcttcgacgaaccggtagatacttaactaaatgaacaataagtaaatttatagagaaaactcattgtttctccataagaagtgtgcttactatatcctcattttgccgggaaaggtaatctacctccggtgaaggaagttttctttctgtatcctcagtttgccggggaaggtactctacatccggtgaaggaattattctttctgaatcctcagtttctcggggaaggtctacctcaggtggaggaattatttcgtcctgcgattaatcatagctaagcattcttactatgtatatcatggtttgaacttttctagctaggctcttgaggaggtacggagagcaacctgaaagttgttgaggttccctctatttctaagagcacgtaccatcgccatccctgccgccaagaatacccctctcatctccatcagattttcttggtaggtgcaaccgatcgggatcgattttgatttaagagaaacaagcccgtcgaaaaaaaagaaattttagagaagctaggcttgtatttttggatagcacgaggtatagatctgtagatggacaaaaaagaagaaggaaaggtattgtttggtcgtcctgactaacacacattcaacacgccaaccgcttgcaaattgcacttaacatttaagcaacaaaatgtaatttaatgcaaatggttttaaaaaataaaatgggctcaatagtattgaaagtttgcgttatcagttttataattctaaagttttcaaatggacttttacattttagccctttcaaaagttattttataaacagaccctaggaaacttatgagaacgtatcatatgcacacattgtgcacaccaattaaaaaatatcataaaaattctaaaaaaatgtacatatacttttaatacaattatgtgtaaagttttatttttaaattcatcatatatagggaacaccaaaaggacaaattctgacagatttatacccacaaaattgtcaaatttttatctattttgttatgcctaaaatataatgaatttgagtttaaaactttacatataggtgtaatactaaagtacttgtgcattttttttctagatatttttggtgaaatttgttagttggtgtgtacgatgtgtacacgagaaaccttgtgtgcgcatgatatttttcatgaaacttttagtataaatttacctgggcatatgcactagagtataacaccgaggttacaatcaactatgcggattaaacataaactagaaaaaacacagaccaggctcgaccgctcgagcttaaatttgcatagctgtatatactgaacctcagctaacatattgcgaagttttacagagtacatgctggttcagaaaatttttaaaaaaagtatacatgatacctaaagaattttatctatttggttcttggcaattacattatttagaaaaaataatttcataccacaata

SEQ ID NO: 34941 - DNA, 690 bp, Oryza sativa
gctgttcagtgtgctcaggaaatgcttaaagattgtcactcatattgcgaacaagaagcttatgaaagaggagcagaaagctcttgttccaggcacacatgatgatgatgtaaatctgagtggaaacatattgtaacaaggcgctttactggcgaatgcactcatcaagagagggcaagcatgtctctgggagatcctagctgaggtgtggggtcacttgattgtgcacattgctcccagttccaatgtagaagctcacgccaaggatctcaagtctgatactgagttcataaccctcatttgggctttgttttgtcattgtggcatcgagaaaagcgaattatggcaggagaagaagggtgcaaagtctgggaacgacactcctggactggttaaccagagcagtcctgcttctggcatgtcctgaaacctgaattgctgatggctaatgctctgctcccctcatgttttcagttttcagtaaagtgtgcatctcatcataacgttcgaacatttgtatttgtttctggagattgtaacatgtgtggatgttttatggattgtgattgtaacaggggaatgcccttggtgcaatattatgtgttatgcttttttttttagagaatcatattattgtctggattgtgatcgtattactcggaaataaattggggtacgttctgattgtgg

SEQ ID NO: 34942 - DNA, 1403 bp, Oryza sativa
agatgtagttctcctgattccatttgatgagaaaatttgcaataaattcaccaggactcatttttagtcttcccacagaaaagtatgtagccaaaaataaccccaggccctggtcaagttaaatttacaaaaagtaactttagaaatggttaccagaacatatggcaaattaaatgtattgaaaggttatgctgataatgctatactggatcattgcaacaagatttacatgcttcaagaaagcatggcttcacaggctgcccatatgggacgggaagggtggtggtgctaacaactgatctgtatttgatagtagtgaacacaatattgattaatgaaatagagcacaaacaaactgaggctttccatgaacatactttaaaaccagaaaatattttattgcagaccttgtttgaaaatattcctttacaggagcctgctacagcagcagctctgtttgtgaaagctgagtatgttatactccttgcaatctattgcttcattgcttgtaattgcaagaaaaataaaacggcgagtgtgatctaataatgcaatgcaaatactgaaatacaatttcttaccaatatccaggattcagtagccactcatggacgatgtccacagcatgagcagatgtagagaactctagctaaggtattcagtccttcagctggctgacagcactgacatatggaaattgagaggcctggcctattgattgtttaaactagcgatgacttatcacacttctccggggtcttagctagtgagacagccagtatggtgtgaattcactgtgacagattgtgagctgaggaatgtctgctgatgctgcagccgcaccggttgccggttatatagcactccggcggcagattggccgtgataaacagccagggttgaccggagaggaggacgacgaagcatgccttttccttttgttctgtagtttggtctacaatggtagatggcatggaaattggcattcttcaggttgtacagtatttggtcaatgctaccttccgtgtgaatggaaggtctaacactttgtcaggaaacacttgtgattaatttactcctcaaatgatcaaattgatcattgtttaggtcttttggctaatataaacgtggtgataaacgagcaagatggtttggatatattggagccattgtctgctagtaatagacattacactcctaccatcaacttgctgctgtcctattcttgtactaatagatattacattgtacctaccatcaacttgctgttgtcctattcttgtagtctcctattcaaacttgtactaatagacattacattgcccctaccatcaacttgctgctgtcctattcttgtagtctcaaattcaaactagctacttcctccgttccacaatgtaagt

SEQ ID NO: 34943 - DNA, 1632 bp, Oryza sativa
cacgcggagtccggctatggcgacggcgaggagaggagagacgagaagcggaggggaggaggtgagtacgatggagacgagagaagtcggtttggtagatagagtaaatgagaggaaatgagagagagaggaggaggatatataagagaggggtagtatagtaaaatacctccacgggcattttgggttaggggtacttgttgggccattagggatatcctccattgtagggggacagtggcggattcaccgcccggctagagcgggcagttgcccaggctcagcgtgtgatccattgagatccgagtgatttatgtgtgttgatttgctgcttttttggtaaagtgtcagttaatcacctcatctagtaatgtatttcaacgaaggagcttgattctagcaagatgggttcttgattcttgctggtgcatgcatacaagttcggtggatatcgtctatttgtgcatgcactttatgccagaaaaaatagttatgtgaattaagcagcattcaagcatcagtagaggagaccaggcatactaacagtccacttctataataatttttttgttattttaactgtacgttgaatatgtgtggcaacggtacgttttacttaggtttgcccgggcttcacaaaatttctagctccgccattgtagggggagtttatcagagagtaccctcagttagtgagggcacctatagagtgtccctgattatagatgccctaatatatgagaaacatatagccctcgattttcactgagactgcacgcagaatgttgttcactttgcttgtctatcagactgtccctgatcggccgcccgtgttttcattcaaatttctctttatcttagtttccaatcacccctcgtttgatgaggggcatgtagatcatcttcttttctgttaatttgtctttttaatgttaaaagtgttttttgttcggaaaagaaaaaaacaaatgtattttaggaattaggatggaggtagtagaggcattcttcaagttgtacacattagttggttaatggctcaatgctgcagccttgttttagcggtaagctacaaaataggctggtgaagtggtggatggaaggtgcaacacatttgaggaaaaacttgtgattactttggtcctgatatgatcaacttgctcgctctttttttaaaatcttttgactaatatgatatgatattgaagctaaacaagttggatgatcagcatttggagtggttgtctgcatcaataggcattacataattcatagtcccccatcaacttgctgctatagctatatatattctgaagtacacgctaccaaattcacactagactgattgaaggcatttatagtagtataatcatatgatctgaagactgaagtctcattgaatatagcctttggatccaagtcctttaacataatagtacatgctaactgcttgctgataataaaagatgaagagaatatgtgatcttcttcctggaagaagcacatctgcacatgcatatgcattatgcatttcatgatgtctttgccagtatttttgtaggttgcttgattgcaccaaactgagaccactcacgattgtggcttctccaaactgaaactgggctgcaggaa

SEQ ID NO: 34944 - DNA, 616 bp, Oryza sativa
catcaattggatcggaaaaatgtttgattaattatcctgagcagttcggcaccaaccaaatccatttataagctgtactcttaattacatttgaaatgacctatcaatattaactttagcaaatgctctgaaccagctcggatcactgtatatatacctaatctatataccaatcaagagttcagaaatagtctcctttcccagttatcacccataaacaacacgtcaaatatcccaccagaaaacaaaaggagacaaaacttataatcagcaattcaatcagcggtcaaggaactcaatcgaagtcatacgaggaattttccggttgtcacatgttttcctaatcagttaattgcggccatgagacgacctgtctgttcatgtatccgagaatgcttctgtaatttctcctcctctttcaacggaaaaaaaataataaatccaaatatagtgtaaaacacacagctcaacatatagaaatcataaagtctacaatctaggtagtgggtaacaaccttactccaaaagaaggttactgttccaaatctaacgcaacctgcctctccaccatctgcatccttttccccactaaaggaagaaaaacgcaagctggttg

SEQ ID NO: 34945 - DNA, 1716 bp, Oryza sativa
ggggagggagcgagagagagagagagagagagagcgcccagggagagagggggccggggaagaggggaagatgggccgagcgagattcggcccatcgacctcgggggaggcaaaatagacttttgcggagaaatttgattggaaggatttggattcggaattgaactcgacgatagatcggggattgagatcttgagatggcacggacactagacaacaagcaaagaaacaaatttcgcaattagggtttttaagagataattttcccgctaggcgccacgacggaaggggcgctacaaggcgccggacatcgtcgttgtcatcgcagcttgacgtggacggcagcgacagtgtgcttgacggcggcggttgtcgttgcaccggtgcttgtgggcgatcccggcaaggtcgtggcccggcggtggcgtttcccatcactgtgtgcgccccctcgatcggattagggttttgtggggtggagttgacggcgccggtgaacttcgtaccttgtgccgtgccggcctccacccctcttttatatggcgcagtgtgacgggggcccaccagccattgggctgggcgcccccgatcagggcgcggtcaaggcctccttgagccgttgggctcaaggggagggagatctatctaacatgagtaacttttgtaattaacttttttaatatatgcactataggatactccgctacagtattctccaaaagaaaaccatgagaggtgaccacgggtggaggtggcgctacgcaggagtgcaggagggcggcactttggcgagaggcgggttttctatcttgatccagacaagcagtgtcgtggcctcgtaggttgcataatcaatagagatagtactccctccatctacttttgatagttatatttcatcttggcacacagaccaaggataagtaattctacttatcatccatttaaacatattactaatcattcctcgtaaacaagcgattcattaatatttacatttctcaatacccatgtagccaatcatgtatggaagaatgaagagtcatgcattaaatctgagaaagtcattaagatgataggttgttgaattgaaatatgtctatcaaaaataaatttttcagatttagaaatatgactatcaaaagtagatggagggagtataaaccaaagctcttgccttttttatccctcctttttgtttacttttctgccccccccccaaaaaaaaaagaaagaaaaagcttaatgcaaggatgggcaaagcttatgcctattctcgaaaagaactgaattcatctgcaaccacagtgaattatgttctctcagcacatgggagtaccttagcaagatgtatcaacttcgcacatgtttaaaaaatgttccaactgtgagtttgcaagattcagaagaatttccccacgtgtatgcttgtttgaaattcaaatattacttggacagaaaagctgaagtactacatgaatgatccaacatacaaggcaaatactcaacaactgaatatatgcttaaaccacgaaagtaattaataagctacttgtacctgtactcagtagtttgcacctagcagctaatcgacgatgcccagaaccaccgatacaatgatccgttagaactcctgtgaactccagatcgcagatcgctctgttttggagagagatgttgtccagggttctcggtatcgcataaacagttggatta

SEQ ID NO: 34946 - DNA, 560 bp, Oryza sativa
catttagaaggctgcatccaaataggcagatcacattacgaataattcaattaagacaactagacaagttggtgcatcaaagaagattagaaatcttgcaaccttcttccttgacagatgaaactagcatggcaaaatcaagatggaatgagtaatgcagatgctcaactgttaaactaatcttgttttttcccccaaacttcaaaagaattttctgttgtgaagtgaaagatccaacagtagtagaatactacatgctggtatcactaggatgattttcatgccttggggtagttactattcagacaaaaaagatgggagctaagcaggagttccttcactagaaggtgtaaaacgaaaatgattgttacacttccaagaacattaaatttaaaacaactatctgcccacaaaaacttatatcttcatggcatcatgttacacgtaggcccaaactccactgaatgcatgtagataggaaagatccatcaataaagcaatgatagatcccttataggacttcatagtagcacttggatagaagatcaaactcctcatcc

SEQ ID NO: 34947 - DNA, 804 bp, Oryza sativa
ttaaaaagaaagcacattctaacgtggatgtgaaaagtgaaagatcggtgtttccatcgtccgtcaaacaaaccggacgaaaaaaaccatatctgtccgataaaaaaaccaggtggaaaaaaggaaaaaaaccaaacctttccaataaaaaaaggcgtaaaaagaaaaaccgggcgaaaaaaccaaatctatccgattcagaaaaaaccgggtgaaaaaaagaaaaaaaaacaaacatgtccgatcagcgaaaaagggggaaaatcggatctgtaaaaacgaatccgtaaaaatgaatccaactccttcgacgttgtaaaaagaagaacaaacaaaaataaaaaacgaatctgtccgattctctatccttctctatctctaaacgggaaaaaaaaaatccaactctagatccgattcccccttaaaaacgcacctctgtagatcccaggtaccactccgctaggttttaatctataccgtgatatcccatacatcttggtgaaaaaattaatgtgccggattggagatttgtttgtaaaaagggaacctacatgtcgagagcattctatttttaaatgattttaatttttgggtatgtacttttgtattttgagtccctgtaatttttatatttacatttaagtccctataatcgtgcaataaggtatttgaggttgtttttgataaatagaataataaaagggagataacaaaggcagaaaggtgcaaaaaagaaaagaaaaaccgcaaaaaaaagaaaataaaggaaaaaacaaaaacaacaatgacaacaaaagtctgatt

SEQ ID NO: 34948 - DNA, 1028 bp, Oryza sativa
aattcctgcagcccggaagtttgatgtgaagaaccaaatattgtagaatgatattcagaaataagatgataaggtctggagtctggacaatggaatctggaccacacacaggttctgacgataaggtgtaggactgtatgccagaacttacaagttgttggattatatgcctacaactacaattgcaaggtaaatggcatagcagcaattttatttgccaacctgttagttgggccaggaacaacatttgatatcacactttgacagattctgttcttttaatcaaacttcatatcaataacgtatcgcaaattgtagagcagaaggccatcccttccaaacagctcagcaccacctgcatttgtatgtgataaaacattgattttgtttatgctgcaatgaatcttgaactagaaagctgcacagtagcattcacccttttttactgtaactgatcaatgatcacttagcaattcctacatcttcatttatgtttctgtgaacttactgaatttgattgcagcgaggcagacagaagtcaattacttctgatctcaatataaagatctgggtggttggacttgtcagttttattttaggagccttgtatggaagtagattgatccgatgcaattatgtttacttcacttcttccacagaacatctccttgcttattcaggcctctgtcgttactccaattcatcgagctgctacctcaaacaggctagagaatttgaacattattcatatgtatattcatgtatgaaaatttgcagatttccatatagcacagctggggatttagtctagtggtaagatattcgcttagggagcgaaaggtcccgagttcaattctcggaatccccaatctgaaatcccttttgcaatgcatgtcaaagttttttcttttccagagagagaaatgcatgtgaaggctatctatatgtttgtatgattttcagtggtctggactctggagagatgaggttttggaccacaagtttgatgaggtcctgaggttcaggta

SEQ ID NO: 34949 - DNA, 1128 bp, Oryza sativa
  unsure (1)..(1128): unsure at all n locations
caaatcatttacacatagaaaaacttgtccttgttctgtactgctcatttgctgcccctaactgttagtaaataatataaattgtcgctcgtatagtgaaaactccatccgtcctaaattataaggcttatatttttttacacggtcttcaataaaccattaatttattccatgttatgttcccaacaaatatgaaattagaatcatatgaaagtactttaaaatatgaatctagtgatagatataacatgcaaaatacttagcatatttatggttagtatgattgttagtcaaactcaccgagttcgatttttcttaaaaagagggcaccctataatttggaacggagagagtataaccctatagtgttgttgaagaacatacattaataagtctgttttctacagaattattttcttttacaaaatggtactcattatatgtggtacctatgtaagtatttccagaattttcttttttgctttagtatttacagctcattacataatggggggtacttaaattctgtcatagaccacaatgagctgcaaatactaaagtaaaaaaagcaatataattgatcagctaactatccaagatccaagccctttcacattttcactttatgctgtaggagtaagcacaatgaatccccgcaaaaagtaggaaatcaaattgtgatgattgctgacagcaaaacgaatcatccagctgtccaacataaaatcatttcagtcattggaaatctgccattctttttctttttctgagaaaggcatttgacgttcttaagaatattactctttcttatccactttgcatgttcatgcttctctaaatccatggttggtttgtgtatgtgtttctagactccctttaacctttgagtgtggaactctttcatagaaaagaatgtaggcctcacattttaatacattttnnnnnnnnnnnnnnnnnnnnntctcatcatttgcaagaaaccatgaatgagtgtcactgctctcccgcttctggcctccagtcctgcttgctcttacataggcaaaatagtgcccgccatccaacttttgacctccgtgcacaattaccgctacaaggcaatatttgtactcattgtccagatatctg

SEQ ID NO: 34950 - DNA, 3427 bp, Oryza sativa
gattttgatgaattatacaactttgttgttgatgactttttcagttgaaatcatttaatatttgaaaatattgtttgaagttattataatttgaaattcaaattcaaactattcaataaatgttatatagagaaatgaccaaaataaaaattgtaaatcttgataagttatacaattttgttgttgatgacttttctatttgaaatcatttaatatttgaaattattgtttgaagttgtcatattttcaaatttgaattcaaactgttcaaaaaaaatgttatatagaaaaatgaccaaaacaaaagttatagatcttgatgggttatacaactttattgttgacaatttttccatttgaaatcatttactactcgaaaaattatttgaatttcttatattttaaaattcaaattttatatcgtgcaatcaaacccggatggagaaatgaccaaaataaaattggtagatctcaatgagttctacaactttgtttttggtagttttttcatatgagttcatttagtatcataaaattcaattcaaaatttatttttgcctagaagtctgatttgcctcctcatcatgttaatacttgctaaatatatatttgatccaattaactcggtttttctagtgaaacatgtgaaatatgtgaatggatgtgaaatatgtgatcaaaatgaatgttatgtgaatgtggttgtgttaaatatattgatggttgtgtatgtgaataaatgtataacttcttctccggaaaccgatcaccaaagaactttgaggttaagcgctcttagggtggagcaattttgggatgagtgaccgatcgggaagaaaagaccggcccgcggtcaccaaagaactttgaggttaagcgctcttagggtggagcaatttcgggatgagtgaccgatcgggaagaaaagaccggcccgcggtcgtgcctagtaaaggcttgagaatagctaaaaaaagaccaaaatttatttatcttttttggattatactcatccgtgacgggctataatttaggcccgattgagatgagagtcatccgtggcgggctataatttaggcccgattgagatgagaggcatccgtgacgtgctatagtttaggcccgattgagatgatagtcatccgtgacgggctatagtgttggcccgattgagatgtatgtcatccgtgacggccgcatgcccgattgagatattttctcatattagtgacatttgcttagtgacgggggcactacccgatagagatgaggctttaggcccgttacagatgaccgaacctgttccagtgttttaaaggtaaacattaattctcaccattaatatttgttctgatcgatcgataatgacccgccaaatcttctcaaccatgcaacagtgcaacacatatatatagcttcaattaattccaactgtacgcatatctctgctgcatttgtttgtttcagagttatataaattataccatgacctttcaattaattcaagctacgaccaagcaagaataaatatagataaattacacttatgatatacaaaattatatggtggatataaataaatatagcaacttataaatttaaacattcatttatgtacaatataataacatgtttagtccatgcaaacatatgtagattcaaacatatagctcgtagaggactcacatgtttattttgagatagagaaagtacgtgccgcgctagaaatttgtagtattttttgtagaaaaagaaaaattccaatcttgcatctcccattactctgcctttctgacttgtcatagggtagcacaaactaattgcatgaagagcaaaatcgtgatcaccggctggaacagtggaaccacactggaaatttgtattttgtagacaaaaaaaattcaatcttgcctctcccattactgggtcgtccttacttgtcataaaggaagatgcacttatagcagtgcagtggcaagggttagtgcgtggtttcaatcctgaaatctagagttcaatccccaatatgctcataatattttcttaaaataatgtttagaatgatgtctctttctctaaatctcctttcttttgtacttgtcacaatagaagcccagattgattgcatgaagagcaaagttgcggtcactggtggaaaccacactggaactgctaggctgctagctagcatggagccatggagttttacttggcaactaattttccacacctaatcttaaggaagtcataattttaatagatagtgtttggttcctgccacaactctactttatcctcaaccctagttaaaaatgtatgacaacattagtcctcgagcccaaattctccgatcaaaaatagccattgaaaaatacagggaccttaaatacttagataaagttacattgcaactttgcaagttacgggtttttttttctgcaaaataacaattaattagtactatcctgctagcatgggttggaacgtacaagcgtgttatagagagcgtcttgtaagatcatattcacttgagtggtcggtttaaactaagttagtacggactaagcaagttgtcacatcgcagaaagtgtttcgttgcacttatttgtatccaccttaagtttaattttactcaaggaagaattaatgtgttttaattgctggaaaatataacaggcagataaacataagaaggtgtccatcttaaagaaacaagagtacttgatcaactttgtttttttaaaaaagcatatataaatgctaattaaggcactgttaacttgaattaaacatctacagctataggatagtgctatcacacaagcaaagctcggcagctctaagtggtagcattcatcagtgggccaatataattataatttgcagtgggccatggaccatattttatatcggcttcaatcctattaccaatattggacgggccaatcctagcccatcaaaagccaatcctagttttcaaaaggaataagttcacctaccttcccttaactttacatcgattttatgacatcctcaatccccaataccagaaatgtctaccccttaaatatttgaaaccgtgcaaaataggttccatggcagtatatatgggtggtttcgctgacgtggcttcctaattagcaaagagggaataaaaattgtagggcccatatatcatcctcactccaattctcttctctgtatcctctatcagccaggagcagggcaagcggggtggtgtcgggcggagcagccatgcatgaagcaggcaggaggaacgacgatagccggagaagacagcgggcggagcggggtggcggcggtggggtatagaggagacccgggcaacacgccttctaccatggtgagctcgaaacgcaggcagcatagctccttgaaggagcggagcacctccgaggatgatggc

SEQ ID NO: 34951 - DNA, 2510 bp, Oryza sativa
aaaagtcaacggtgtcaaacatttcgaaacggagggagtatcaattaaaggttttctattgtttcatcaataatcaccatttgtatcacaatcctctgtccagaatttaagaaaggtttaaaaaatatgtatggccatttttggaaagaccatatttgaaagagaaaccagcaatccgttgcaacacatgatacacatctttggcgacaccaatttctcatagtatgccatagtatgccaaaagaaaatccaaatctcattctgttggacatacctggtccaaatcgaatttctagaaactaatctagccaacaatgagcatttgtttcttttgcaaggaccgctgaacaacttacagaaagggcatatcaaccattaaagtatccaagtaagaattgttttagactgagagagctttgatagccacccatcaaaggttcaaggcacttttatgaattaagaaggcatgaaacttataaaacaagatgcacatctatattacatccaaaccaaggtctctaaaatactactacgtagttattagccaatgcatatccacaaggaaaaaataacgtgaacagtgatttgacaaactgatatttgcactcaaatatgatagacaaggttcagcaaaagatattattaaaccctgatcaatctagtttgtgaaattatctgaattctgaagcgctttacgcaaggagcagatcaatgatgatatatgccatattcaagtcactacttacagtgcttctcccctacttacatactcacacagaactcaacacttgttgaacactgcagagatcacaattcatgtttcacaattctgaacattaccgatcgatttgacactcttgccggaaccatcatatagtttgtacttcctccgtttcacaatataagttattttagcattttccacattaatattaatattaatgaatctagatagatatatatgtctagattcattagcatcaatatgaatatggaaaatgctagaatgacttagattgtgaaacggagggagtagaagtgatattagcaaatatagacaagcacggtataattaagctagcacatcaaatggtttggtctaagagattttaccatgtcccagcaacagagcagcacctcgccatggttcgtgtggaaggctggaagcccacctggttgtctgccgccgatttggacggggatgctgctcccgtcggcagtggcgatgctgctggtccggttggaggggcgcggtccgcggtggccgtggacagaggtgtgacccacgcgatttggcgcgagatgctatgaggcgaccagggcaaggaggcagagcgtcacggcgtcgatctggcgagggcacagggctaggcggcggcggcggctactggttgaggactacgtgagggcggcttcgactggggatcggcagcgttctcgatgacgactgcaacggcgacgagccacgacgcttgaggcggtggattcgacggggattgacggaggaagacagcgcggttagggattagggagggagcgcgtgaatacggggagggggaaggacgtgactgcagtttgcgctgggtcctggcggcggagcgaatcggcggcgggaaggcctgtgcgacgacgacttggtggagggcagagtgcgaagggcggcgcgggatgggggtctgactgtgcgagggccgcggttgacgattcgacggagggcggagggccggcgtgcgaaggaaaagggagtgcaaaccgagcggtgatcccgcatgcgcgatttttcgccgggtgaccccatgtgctacgtggctggttgtaatgcgttagatgtaagcgagataatccggaccgttgagcgaggaatgaaaggtgagtgatgagtgatgagttaaatcatttgttgaactatagggtagattagcatcctattaaagcgtgaaaaaagggcaacccatcacactaaagcccatctaactacttacggatcgatacaatcaaagaaaccctaattcccacgctacacatcgatccgccgccaccccaactgcgctctttccgccgctcgccatgctacacatcgatccgccgccaccccaactccgttctttccgccgctcgagtccgtgtactgattccacgcgcggaggtcgcggcaacctttctgattagcgccgccatatcccactccggtcttcctctctgccctagccgcttgcttttccttctctagcgttgtccatgcttttcctcatctagtgctgctcatcccctcgcctgtagaggagaaacaaccatatcttactagtcggcgccgctgctaacccgggggtgcggggacccggaaggtgtgcgggggcgggtcttgttttgcacccgatctgtgcttcgggggcgggaacgggggtgagagtcagggagcgggagcaggggcgggggcccaggttcacaccattctcctgcctcagcctcccaaagtagctgggactacaggcacctacaaccatgcctgg

SEQ ID NO: 34952 - DNA, 1546 bp, Oryza sativa
gggcaacgagttcagtgcggcagatgcaacagcctcccgagcagggggaaatcgcaacggcgaccctaggggaggtaggcaaatgcagggacgccggctcaactactactcgacctcctcctcccttctttctgtgctagtacagtagaggcagtgatcgtcggagtggacgacgacagcggagacctattggatgtcggcggcggcggactgtagtcagtgccgtgctcctcccaactcccctcagcgcctccactcaagtcgggtcgtcgggagatgttgaaaaagattaacccgtccattgattagttcaatcggatttttccttttccgatataggtgtatatgtttgtttgcacagcagtatcgcagagggcaagatctggtttgggaggtattcacgtgttctccctcgaatccctacccattcaatttttcttttgtcttttctcctctttctctcgtgctcatgagaagacagagctcgcagtccatggcgactgcctcgatgcgccacggcggcgcgacggcctcgatgggcggtggcagcggcagcggcgacagcggcctcgatgcgcgatagcggcgacggcctcgatgcgcgacggcctcgatgggcgatggcggcgcggcgtagacggccggcaacctgatacggtagatgagagagaggagacctcatttttgttagcccgattatacccctcttaaaccaacggttagattagattggtacctcgtacctcatagtacctcgtggtacctcttcaagtatgggaaagatgctaatataaataacttgtttgttttcagacaatgtaaatatgatatctgatataaccctttaaaagggccaagtggttcggttgtcttctggagtagtttatcttctagcttgccaccttagctaatttccactttatatttgggctgttatcttttggtttaggggtgatagatttaaaatgttctatctgttatctccttgtaaggtggtgtcctctacagttacctagtggtaccaaaaaaaatccttactatgtttctttcaataaaagcatcaaaactcctctcctttttttcaggaaaaaaaaaggggaaagggggggcaaatcagttgagaagggcacattttatcagcatcagagtttgtacagttatcaccatatatatagagtagatgataggggagcaatccaatcagaaaataatcaacattcttgctggttgtcagctaccgtgcaagaaccaagaagaaggccctgtattctctgtttcgccttcatctaatccatctgattccaccgccgcttctgctaataacttgttctctttgattcgattgatcagagcgacagatcgatgggtcgacggcgatatctgaatctgttggtgcacaacaaccaccacgacctgtatttctgcaccgcatacccggtacccgccaatcgtctcttctacccatcaacaacagcagccgaagtagcagccatggccaagacacaagatgcaaccaagtcctacatcgatcacgatggcaagaggc

SEQ ID NO: 34953 - DNA, 990 bp, Oryza sativa
gccgatgccgacgcctccgaatcccacagggaaagggcccccgtgcccctccattccaaggtaataaaggaaaaaaacaaacaatctttccttgctcgctccacgctattcttgggttaggttacctgacgcacacgtttcatgatatccccttgctagaggactaacgctttaatcctactgcttaattcctgctacgagccccatttacccccctcatatggcaaataacaacattgtcttgtctttgacttctagtttgctgttgctggatatgaaagctagcgattctaggaatgctttcttcttacggctgaaagaaaaaggaaaattaagtgctttggaaatgtttctggcatgcctaattttcagataaatcacaaccatgtttctttttagtgcacacaacatgttctcttgtttttctttttacacagctgtacttcacttcactacacataattgactcatgaacagcaacaacaaaaaaaatccaatggctttcatgctaatttttagattcatggcttcattttcggtcatttttttcaggcttataacaattagaacaaaatgtttcagtacaatattgttgattcctgctgattgtctagagcttggaggttgaaaaggaactaacacccgtcattccaaacttatatactgcaaccactgttataatgcgataagcaaagatattgcctgttcttattccaaagaaaaaaaaactgcatgcaaattatcaggaatcatactaaaacatgagctaatttgaagtatttctatagttgcagtatgcttgataacaaatcttacttaaacagcgaaatgtagttggctagttggcagtgcttcttacattgtgttaaaccatggtatcatggttttacattgtgaacctgtccttatggattatgtaagcataatagtttatacactggagatgctggattgttgaaagaagtactagggaaaagattgggttgttgt

SEQ ID NO: 34954 - DNA, 1977 bp, Oryza sativa
ttgttgtatgaaacacttgaatatttctttgttctttcttttaaagaatgtattcttatatatttctatatttaatatggaactatggattgatgatgatatcatattaaaataagggattatgtctagtggttcttggtaacgctccactggcattccgaagtagtattattagctagaaagaatgatgacgctgtagaaattaaatgtactgccaatctggaacctgtttcaacagtccttgtctggctctcattctttgggatgtttcgcggtcagcatgaggatgtgggactgtatattactcaatggttgagagtgcagttcaattgactgtctgtccaaactaaataactgataagaaccacgcctgaatccatggatggatgagtgttgtttatgtgaaatttgttaactggttgtttcaccatagaaaaatcaatattgtttttaggatatatatatatatatatttacactgtagatgtctgacacatttgtttagaaaatgtgttcagttcataatgttgattggtttgcctgcatctcttttgactttttttgtgaatgacagaatgatgcatgctattggcttgttggaaaaactgttttatagttcaaacaaaccaagtttcatgtttgacggagccattgtttcgcttattcacggaataagcgaaacggcatatttgcaaacgaaaagtaatttgtgaataaaacttttatatatgtgttcttagcaatctaaaagcaaaggctgaaaaataaacttcgatgaaaaaatctcaaaatcagctccaagttcaaggttggaaattcaaattttggctgataagcataagcataagcgaaaagatgaggccgtgaggcataagaccaagcatcaggtccaagataatgaaaacttaacagggtttgcttttatacttcggtgtttttttgtggagttggtctgacatacagaactgttgccatgtaaatagagcaggcatgatagattgatgtaatgttggcaacttggcagagaaatcagttatgggctcactgttcagtttctctagcaatttgtagctatctttatcaatacacaagcttttgtgattagactgccatttgtttttcttttaaaagcaaaaaaaatgcttgttttctaaccgggttgattttcgggggtttaaggtaccctgttgaactgtaaacaaataattgaaagccactaaggacgttcctttggaaaccaggtgcaaagattttctcactagttatatttgcaatgaaaggtttagtcatttagtttgctgctttatctgctggattcaacttgtggccattgggctgcattatgtgatgatagttagctgcattatctaagcagtaagcaccagtaaatgcagttactagatcatgtgtgggttatgcactggccaggtgatatacaggggtttccaatgtgctaacgtggatgttgttttgaattgtttattgttgtcatcacttgaaactgccgataaattcatcattcgttttttcccttgcctgtactgctctggtgggttgaacagatatgggatttagtttttttttttttgacatatatgccttgggcctaactattaactaagaaattgaatgtacatggtctgagctaaacaatgaatatatcctcgaatagttgggttggacgagttgctagcttggaactaagtacagggccctatacaaatggaatacatgatgtgtaatccttgttcttttaccctttcctccccaccttggtttgtggccgttggggttttatggttggctcttggctgtactgcattttcagaagttacatggtgaactgtgtatacctgaacttttctggtattctttgacattgtttggtgttgaaaatattgttctaggctactaataataatttgtatgctgcaactgatggttcaatttttattacatctgttgactagtcatgca

SEQ ID NO: 34955 - DNA, 675 bp, Oryza sativa
tttttttgagaattaatattatttttatggaaaatcgcaaaagtagtggtcaaccggggaaaatcgcgaaaataggtccctgtcgaacgggtgcagttcgatagcccgcctatcgaacggccagagcgcgactggcgacgagatcggaaggctgccgttcgacaggacctgtcgaacagcccccgttcacaggcagggctgtcgaaaggggccccccccccccgcccccgttttttcccgacaggctgggctgtcgaactgccgcagttcgacaggatgtccgtcgaactgccgcagttcgacagggtcgcgttctccatttatttgtaataagttattttttttaataatatgtaatttattttagtgtgtaagaaaggaaaatatttttgtaatgttatatgtatgtgatttagggttttgataatgtttggtcagaaattgtagtatttatttgttggttaaaatatttgaattatttagtttcattatttgtatatttgaatgataatttgtcatgattcattcgaagggtatgctactgagtaattatccgaagaagtttatgaaatagtcctgatagtactaagttaatcgtaaagtgtttctcaaatagtacggacagaacataaatgactaaaagtttaatacaaatagataagtcaaggacgatca

SEQ ID NO: 34956 - DNA, 4434 bp, Oryza sativa
ggggggggggagtgtacgacggattggccgagtgatgacggccgtcgttgcggagaagcgcggacgcggctcgtggaggttaacgacagcaagaccatgccaagggagcgcgggtgtcgacgctatctcctctgacattttcgagtgacactccaggtaggaactgtgtctagtttccctgaacgggtgaacgacggtgttaacgttatgttctataaggtcttgtttctatatgtctcacctagctttaaacggttaagccgtcgcttttttgagtgaagttgttgagcaatctaaacccagctccacctttctaattcattttataagactgtttcattcagctccgcttctattttaggtggagttgaaactatttggctgggctctagcttcatgagaggtggagctaaagctagagctgtgtcaaacagaaccttagtggacagacacaactggtttaaacttataatactttaattaggtgaaaccccacgcgttactactggagtttatagtatgattacaataaataaaaataatgtgtaaaatagctagaaaacaaaaacttatgtacgtcgatgtggtttatgataatttaaatttaagtaatatatagaatgatgattcaaatgtaaaagtaaggtgatgtggtttatgagagaataaaaagaaggaaatagtttggaccatcgattaatcatctagggttaaaaataattaaggtgagcatatggtttaatgagagaagaaaattagggagataatttgaaccatagataatcatttatggactagaaacaattggtgtagtattgaactaatcacaataactagtaggatattataaaaaatgtgaaaagtatattgaaatattatgtgaattatgtgggatgatgatttaacatgcttgcattttaaaaactctaaaatttaataaattataaaattatagataatataatattatatatgcttgtttgtatttaagtgtaataattgttagtgaatgatgatgtaatatcttgttagtggatgatgatatggttccttcgcatgttaagttttagaatttagtgagttgtaacttgatcataaaatatatgattagataaatgtgttaatgataagatttcttctcgaccacttttgctttatataccgatggcatagaagagtggcaaaactggcccattttagctaaattgtggttagaaacttagaattccgctcaccaagtcttagacaaatcaactaaaaaaattatgacgagcttagttgaattgaagtactcaatcaaataaccccttttggttctcttttattggctattgtttcatgagcagtgaagttaagttctgctaattgttttggtgttatatgtgagctttttggtagatatggttttaattaggtggtcctgtccttaaaactctcatgtaagctagagtcccatcagaatttgttgtgaaatcttttcagcttccatatttctagcaatattggtggatactatggttgagatgaaattactttgataccatcagagtttacttgactggaaaatatcacactcaacgtatgattagaagatactttccccattttataatataagactttctagcaagaaagtcttataacctaaaggagggagtagtactttagaaatggacatattttaaacactaaaaatagattttaatcactagactgcctacctgatgagtctttatcgttctttgatgccactcgatgcgaagtactcctactgatccgtgtctggtacaattactgtacaaacaacggctatataatgccaatgtaaaagaagcacaggcggaaaacgtgcgataacaattaagtagcgatcattactttcttcaagtctgtatcaatctgctgcattgctatagattatagttgaggcggcaccgccatggaaacattttgtgcgcccgtaatgtccctcccgtatccacgacatcagcagagattcttcagaatcttgaaaagacgtcggagtgaactataacgatgccatactggattatgctccttttgcccataaggcaggtatggagctgacgagaaatgatgatgaaatcgtgtcgattcccaactaatgctcccactgatatctctttccaggatgtttaaatgcgatgtttcttctgccagtttccaggaagctactccttacagactaccgtgatgcggtgatgcttataagtgtccctagggctatattaagtactcatccattctaaaatactactacttgtttcatccgtctaaaatattatatatttaaatcgatagtattagaatgtgtctaacgttgtactgacttgttacattttaaatgaagacagtagtcaagtacaatgtcaatcagaatgctgaataataatagtgggctgtgcagctagccatatagtattgattcggaccgtcttatttgatttttttaaaaaaaaattaaaaaaaatataagtcacgcataaattattattcatgttttatgttttatattagtaacaataaaaatactaaccataaaattttttggaaaagacggacgatcaagttggacatgaaaacttatgactatacttattttggaacggagatagtagaaggtaactaatgatgatcaaatggagagtaaaattagctggagaaattaggtgaataattctcctacatgagatggacaggcacgatctcctgcaatccgcgtgttcataattaagcataacatctagtattacatgtcggcaggaccgtgtggaaattcatgcatcgtgtcgttgatgcctactagaccggccccattgtttggcttatttgtgaaataagctaaacgatatatttgtaaacgagaagtaatttataaataaaacttttatatacacgttgtgttgttagcgacctaaaataaaggctgaaaataaactttgatgaaaaaactccaaaatctccgttaaaaaaaaactccagaataagcttcaaatttatagttgaaaaatttaaattttagctaataagcataagtataagcgaaaagataatgtcgctaatccttgcagcatttcaactaggggtgaaaacggtaacggtaattaccggccgaccggcgttcgttttcgactttctaccggccgagccatatggaaatggtaatcgaccgaaacaaaaatgaaaatggtaaaaaatatggaaatgaaaatggaaatgattttgctgttataccgatcgtttccgtatttaccgtattcttgcggaaattaccgtttcttataatatggtaattaccgtattctaaatatgtcgatattataggacatgtttatacttgacccacagcttatagattgaatgactcttcaataaaatctctaacttttgtacatggctaaaatgaagttaatttataatttatatagtataagcttgaatttatgtatatatataacatacttatgtaaagttaaatatatgtttttatagtttaatgtttccgtatttgttaccggtttccgatctgtaccgacatgtttccgtccgtattgttccgtttccggttttccgatatttccgatatcgttttcgtttccgactttaccgtttccgatttcgtttccgagaaaaatatggttacggaaatggttgaggctgttttccgatcgtttccgaccgttttcatccctaatttcaacacgtcaggattgcaatcttgattcttgcaggatcgtcctttttcatcgatcagactatgactgtctgtacttgccaacggtgttaaggctaggtcgttcttctcaactttcccaccctctcctttcgttttctacgcacacgcattctaaaatattaaacattgtgttttttataaaaattttcttaaaaaagttgattttaaaaaatagtaattcattttaaagattttggttaatatttaattaattatgctttacgcattctaaaatatataaaaatgattttaaaaatatactaattcatttttagtttgttttaactaacacgtaatcaattatatgctaaaccacccccatacacagctcaatgagctttgaccgcttgcctcttgattagggatgataatagaccaaggactataggttttcttaatcttatttatacttcatatttccctcatatattttaagtcaagaatatataaacaattagtttaccctattttagaccagctcttaaatttttcaagctaaaatttcgaagccattaaaacccttactcttgactattggctaacactattggcatctggacaagtaaattaacactactagtggtgctacagaaatccttatcgttaacttgtaataaccctcatctataacaaatatgatcaccgttatagattaatgcttactaatgtggaagctt

SEQ ID NO: 34957 - DNA, 8034 bp, Oryza sativa
atcatttttttcccaaaaccttgcaaactttgcataacatatcaaacggctaactggtttatgatataagaggccttactatatgtaaggatatgctttatttaaatggtaccttggttgcagtacagaaaaatatacttttctaaatttgtcaaactccaattcttcacaggtatgcatgggcgcatggcatcagttggccattgacattgcaaggtaaacgtccatattggatctagtattattatttttttttgaacgaatcatatttgatctattatgaaatttaacaatgtggctcctaatcagaatttgatatcttgtaatgctacagtaactgtacagtcaaacaactattgccttggaatatccatctttctcagcttagcaaagattctaatctgttccatatttttcaaagatgtgttagaagatctaaacttgtggccgctaacttgtagtttgtaaactttttaccactcatcacttgtccgttgtgacagatgagaccagtctgcaataagacagtggattgaacaatggaatatggaggcccttactcatctgaggcctgtgacagatgagacccgaaatctccatgtacagtggatgccggaatatcaggtactaacaaaataatccctcttctgaaaccactgaaccatcatttaatatcatggtattgctgtgacacaagagcagtcactgctgtagtcctgtgccccctcactaaaccgctcttcactttgacgtgcaaattctggtgcagtcgtggatagataatgagaaccttatactactcttatcttgcacacaagaattatgctcaaatacctacaactgagttcttttgtgtagaacttttccaaactggattgggcatttaggcaaattatgtgctgctgaccttctctctagccatgtccttagtagatggaatactgcagctacaaaaaaatatgagttccattatatgtacgacccagttgtataactcatgtacaattagagacgtgcaactatatatcaattaaacaagagcatgtccatatgcactgcagccgtttaccgtcggttgatcaaattcagtcgtacatgagttggacagtcggaacgtatgctaccaaaaatatattgtgggaggctgggagcctaggaaatgaagtctaggacgatatcacatttgcatgaagtctccacctggttttgcattacggttcattgtatcagaaatgctagacgactttgatatctggatactcaagggcctcatcttttcgcttatgtttatgtttatcagccaaaatttgaatttttaaccttaatttgaagctgattttgagtcttttttattgaagtttatttttcagcctttggttttagatcgctaagaacacatatataaatgttttattcctaaattactttttgtttacaaatatgtcgttttgtttattccgctaataagcgaaacgatggctccaatagaagagaaaccgtaaaaacgtccacagaaatcctcactgtggcagtgcttgtggctcagttgctgcaatggagcggccatagcgccctgtcagtccacagaaatcctcactgtggcagtgcttgtggctcagttgctgcaatggagcggccatagcgccgtcagtgccaatgtatctttgacggtgagctcagagaaggaggacggttcacggtcgtgtttttggcgcgaaaaaataagtgggagggatggataaggctggtattggtaccacctactgttaaaatggggcaggtttttttgtttgtgcaggtatgcagttggaggctttcatgcgttaattgtttttagctcttgtgtttatcccatggtcctgccggcacaggatttggttaaaaattattgaactcagctgatgcttgctagtactggttgcatgcgccaggagatttcaccggagcaagcataccccagctcaattaaaaccggtgccagtacctttggtaccgtccatggttgcatgggtcatcaaatcctgggatccgaaacaaatctctacaataatttcccggccgttgcatctcatgctttgctgcccgatgcatccaaagccagcccaccctcttgcctagtagctcctgcaactctgtcgctcccagccttttttgactccatgtctgcctggctgagcctgaggtcaaagaattttccattggtactactagctcgatacacataaaatgagtaataaactgtggaacaaaaatggtatagtacgagtaggcagagaggagggtccgaatacgattttgtgtacaggtgtatactatgctgtgcggctacttctttcgatgtctcttttcccgtgcgtgtcgaagcatggcgaactggcacagtgcaggagcagcggctgcaatcccttttacccttgcttcccctgcggctcggttcagatctttctggcacatggcccatgttgcctctgccgctctgccacttcattggaaatgctaccccgaaaatacgctcgtccagtcgtcgtctctacgtgtatgtatgtctttttttctttttgcatgcccttctctactccactttgattaattacctgcacttgtcagctgaacctaaggtccttagactcctactgtacccagtggcgaacccagaacaaaagttaccgggggtccaatacatactaattatctaattattgactaatatattaattaatatagtgtaatttatataggatttgaataatctacccggtgtcctgtgacaccgggtagtataacctaggcacgcccctgactgtacccgttggctggttgcactagctgaaccagtcttgcatcaaagatcaaactagacaagtcacatgattaccgacatgattaggattgtgtacctacatttatgtgatggttaaggttggccaaggaacgaatgggggcggccttgtaccaccgaagtgccgagtccgtagaagaaagtagggaagctatcccgataaagtttgtttggaaaacatgcacatacctcgggcagaacgcgaccaatggtaaagctagacctgcattgcaatagaaacaccgggtaaaaaccacagcagttaatcgcagtcaccgaaatgacagcggtggaaagaggttacgacaagaggctgaggtagggggagagtaaaggaaacaaggggaaaaggttaaaagttggcgagagagaaaagggtttggttgtctcgaagaaattccagaaacggcccaaacttggctcatctcgtaatcaccaataatgcaatcgcttcgctgagcccactgccaagacatcttgtcctgtccacaacgacgccaatcgaggaggagagattgcatcacatcgctcgctgccttggcgtcccccttgtaccgccatctgtgtgggcgtggctgcgtccccgtctccctcctgtccggccctacccaccacctccggcgttctctgccttgttactgttaccgtgtctcctgtgtcatgcattgcaatttgcaatgcaacacgcccgtatcacctgcatcgtttggtggaggggcaagagcagcatgggcattgctgcgccttctgccgttctgcaccacaggtttctcgcgctccaggtactatctgaagctcacggtaaaaatttgaatccccttcctcacacttctaaggacttgtttagtttccatggaaaaaatttccgccatgtcatattgaacgtttagacacatatatggagtattaaatatagataaaaaaaattacacagattgtgtgtaaattgcgagatgaatactttaaatctaattgctccatgatttgacaatgtgatgctacagtaaacatttgctaatgaagaattaattaggcttaataaattcatctcgcagtttacaggcggaatctataatttgttttgttattagtctatgtttaatacttcaaatgtgtatccgtatatctgatgtgatatgccaaaactttcactcttggatctaaacacagcctaactttgtctcaagataagtgcatctgtttagttcaaaaatacattcattttagggcggagggagtgccggtagaatgcatttgtagactgtactaatattacccaaaaaaaaaagtagttgtatgttttttttcatggtgatcgatcgaagcacagtgtagctaaccaactatctccaaatctgtcgtagcgcaatttgttcgtatgtacaatcgtcgtcgatacgtacgtagctttcatggaatcagctagcatccgcccgtctccaggcctacatgcatacttgcagctttgatgatatgagcaccacactgacactgcaagagacgaggcgagctatgatgcatggaggattggaggcaagttgcgggagcgtgacgacacgtactcgcctctcctcgctggctaactgactagctcagccccagctcgatcgttcgttgtatccaccaaaaagtcttgggctttccactctcatgcatgccaccactccgtactacaccgtccgcttaaatcatgtgtttcttgcatttcttgtatgcacgattgcattgcacgcacgcccaatcgattccgctgaaaacggtgggaacctgctgctacgcccgcgcattcacggccgcggccaccatcgagacgatcgatcatcgaatgccccatgcttacgccactatagatcacttcatccccggcaatgtcgccggccggttgccatgatagcgcttatttgtgtgtctatggtggcgcatcgcgtgctgccttttggtctcgccggttttgtgcttcaattccatccctttcgatcgcgtgctatcttttagctaagctacatggatccgcctttgacgccgtccctcgtcgatcctgacaagggcttgtaccgtgtgtacggtttggatgcacgtactgtccaaattaacgatgcaatatgggaaggtgtattccgatacggtgcatgatggtgtacgtccagtattatagccttcttagtttttttttcccagaaaacgtcacatcgaaattttggatacatgcatgtagcaatatagataaaattaaaaactaattgcacagtttgtatgaaaatcacgagacaaatcttttgagcctaattagcccatgattagccataagtgctacagtaacttacatgtgctaatgatgatttaattaggcttaataaattcgtctcgcggtttccatgcgagttactacctccgtcccaaaataagtgcagtcgtggggaaccgtgtccgacgtttgaccattcgtcttatttgaaaaatttatgaaaaatttgaaaaaaaaattagtcacacataatgtactattcatgttttatcatctaataacaataaaaatactaatcataaaaaatttcaaataagacgaacggtcaaaagttgaacataaacagtgtaaaattgcacttattttgggacggagagagtatgaaattagttttttcattcgtgtccaaaaaccccttctaacatccggtcaaacattcgatgtgatacctaaaaattttcttttcacgaacaaaacaaatcctatatatatattcggttgcgatgatatatagagggagcaaatctgcacagtagctagcacgaggatggagtccaataaccgggcgggcgcggcatacgggtacaatgtgtgaagaagacagcggtgggcagtggccatccgatgcctccgacgaaaaatacgaaaccctgcatgcaggatgtggtccggtagccgatcgatgtggatcgttagttgtgtgtgtgtgtgtgtccgtggtacgcatgcacgtccatgtgctgacatgcatgcgtagagaccgttcagtccatggaccgaccacctagctacgatctacatactgtacggtacttcgattcgatcggcgccatgcatcatgcataatgcagccacaatacacatgcacatttcttatgatattttagtttctgattacatgattacatcgaacctgccagtatactacagtgcacaactgtgaatacacctccttaacatgaacttaatcggtatagtagttctaaatctcccaaagatatccgtactacagctcacaaaattacgtatgcaaagcgttcatggtccaatacgtcaagaaaattacatgggccgggtaggggtgaaaatgcgcccagccacattatttcgggacaaattcgggatccgggatatttcacggatattgggtccgaatacgggtattttatggcagatatgggatcggattcgaaaatgtagtatcctaaggatatggttatccggtaaaaaaatcgggtatatattacccggataaatatacagatattatctatattatgtttttgtgaggcactttttagtattatgtattggttctactatgatgtattgtaccctatttatttcctatgttcctaatgcctaatataatcgtattatgtatatatggaattgttaaatggttattgtctatgtgatatataagattgttccttcgacttgatatccgaataaatattcgtaatcgatagtgtacgtatctattttggtacgtattcattccgtatttttacccgacattatccgagtttatatccgtattcggcattatccgtgtccgacccgattcgtcacgcaatttacacgcaatctgtgtaattattatttttatatatttaatacttgacgcatatgttcaaatattcgatgtgatatggtgaaaattttttgcgtgagaactaaacagagcctaagataatcaacagtacgggtaaagacattaatgtaactgaactgaccttaattaatgcagcagatgcgctgacagcactgttacttatctgttcccggactactgctaaagggttgacacagcagtgatgatacgggattagtaattaaataatcaatcatgtgtcaacaggtatatataaaacgggaataatcaatcatgtgtcaacagcactgttactctactacttgctcgctaacaccgtcgctaatcagttgcaaggagtcgagctcgcaaggcggccgggaggaggaggaggtccaggccccacggtggctgccgctgtcgccgtgccggacaaatctgcaaatctgccgcgcgcgcgccaccaccctcctctacggcttcaataattcactctcacttgctcaaatcttcatcctcgttacctggcctaccaaaccttacaagagacagccatttcttctccatccaatcgtctcctctccctcattctacctcaacctctctgctagctcctcacctctacaacaacacattaattgacatagacagcagcagctcgtcgtctgcttcaattgggagcaggaggaggagaggagaggagcgagggggttgctgttgcagctgctgccccaggggctcattactcgccagcgcagttattgctaccactgtagtataccttgccactaccaccaccaccttcctcttgtaatggagaggatgcagctgcaagggcccatcggctcgctggtaagcttccctggccggggacggggacggccactgcactgctgctactagtagctagtagtaattgagcaaccatgtagcttccattcctagtctctgcactgcagcacatgtaatgcgatgcgatgcaattcggctgtattaattgcattctgctgcttcttcttcttcttcttgcagctgctaggttgcaacatctagccctgtccgcgctcgcacgcaccattcaatgcattctcgcatgcaacctgctgcagctgcttgcattgtgctgtcttcttcttcttgcatttgcatccatctcttttatggcgttgccgctgtttctgtttcttgctaacgtgctcaactctgccggttcatggcgatggcgcggcggtgcgggtgctaatggaacagtgggcggcggcggcggcggcggaccacgcggccgccagcgccggcgctggtcagatgccgtttctcgcgctgctccacggcgccatggaagcagacggcggc

SEQ ID NO: 34958 - DNA, 754 bp, Oryza sativa
atatatatatatatatatatatatatatatatatatatatatatatatatatatatatatatatatatatatatatatattgacccaaaaacagtgagggagacccccactgtaaatatatatattaaagaaaatatatacaagagaagcaacaaaaagagaatgaaatatattttgcaagcaaatgaccacaatcaattaatgcattttttcacaactacaaagatatgctcaaatgcaatgtgcctcattcaattcctttctaaggactaccaatctataattttcatgtggtagggttttgatttgggatctcttcactctaggctttgacactagtttcttttgagtacatctcagaatatcataaccattttgtcaaaattatcagtttgatgcaactttagctaactatttccaaggtccacatgcaagacactcataatagtgaaaattctagtaaaatcgtccactacgatgttgtttggtgaaatgtctgtctaaagttgtagcaaaattctaattttgactaaatagttgttgttttgtgaaactcttcttttgaagattgaacaatatatatacataaaacctactaaaataatactattataaaatacctttcgagacaatccacgtgtaggattttcatgtatttgaactacgtatttaagatgtcttatgagggcataatcgtcttagatatgaccatgcctatgtttacatattaattaactaaaggcacatgcgttct

SEQ ID NO: 34959 - DNA, 667 bp, Oryza sativa
tcacaaataaaataaataataattctaaatttttttaaatgagacgaatgatcaaaacagtacaagcgggttaaaatacgttatattagaggacggaaggagtactaccgattgattgatggatcgggatggctttgaggacaaatatctttgctatttgcttaactgcagtcgatcgagcagttaactaattggtttctactccatggagtaaaaggaaaaggaatgaagcatctattgttctctgaaaattgacaacagcttataccactaaacacgctaagcatgtgcaagaaaaataaaagaagagcgggtaaacatatactctctccgtcttaaaatataacaacaatcaattttgtatgttcagatttattggattagaatatatcctattcagtacaaagtttgctatattttgaaagagatagagtagcagtacttaaagcgctaagcatgtttttagtaaaagaagaagaaaaaagcgactaaggtcttaaacttatgcttaacacgctaacatgtatagtcccaacagtccatgttttagcggcacctttggaaaactaggggcacctttggaacgtttttatattaaaaaaaattggtgaattaaaaacacataatttttacagagataaaagtccgaacaaagttcattaacata

SEQ ID NO: 34960 - DNA, 595 bp, Oryza sativa
  unsure (1)..(595): unsure at all n locations
atggcttgaattgcanattaagttcacgtctcctatacggcgaattcgagctcggtacccattaaaaagacaaatcacgcataaaatattaatcatgttttatcatctaacaataataaatatatgaattataaaaaaaattatataagacggacaattaaaattggacacggaaatctagggtttgtcttttttttgagacggagagagtatggtacagtggttcatgccatgtcaatgccggcctcacgaggacggctagctcgccgtgtcgaccgcgccaccgcgaacggggcgtcacggcctgaaactgcaagtgtgttccttattctcggttagaattcagaaattactgtatttcctctgaaacctctgcaggtgtacgtacgtcgtcgcgcttggtcggtgacatgaataactagtccagtacgtagtccgtacgtacatgtacgcggatgatccccgtgctgcgtggtccgggtgcagcacgtcatctccggcccagccagcctacgctcgtgacaagtgttgctcgatcgttcgttgcaattgaccttggagctagccggtcgggccatggcttcgcttaagaacg

SEQ ID NO: 34961 - DNA, 1211 bp, Oryza sativa
tgaactcacgcttctggacaaatgcccacctcttcaccgcatcttgtaagtgacctttgtcatgaaacatctgtccaactttcatctgcttactatcataacaccagtgggcatctaaaccatcgtttaccttcatacgactcattgatatggtcgtccaattatcgggtatgtaagtttcgttgtcccacagtgttgtatcttctccttccactacaagcgcaatgtattcctcgttttccacttccatctgatccactaccgcctcattctcctccgctgcatcaacacgcataggcgaatccggttcttcatcgtccgagtcgttggcctcacgattagtaccacgaacaatgacctctccttgtgtattaccctctactacttcttcccctcgaccttgctcagtccgccaaacatttttagcttgtccaccttccaacggagtttcttccaccacggcatgacttgactcccccgatcgatcaacacattttgtcttctgcaccactattgccgggctatagcctttctcccttactttactaacaaactttctccaactcccagttgacgcaacctccactactctccactgccatccatgttgacccctcactggccacacggcatttatgacaaatttatcctgtactggatctaccccaaacatattatacaaccaccctaacacgtcgttcaaacccatatgctccggtgcattcagactagtatcatggaaggcatatacagtcaaatccaccccgctatcacatatttgtataggagcatcgccataatacagacgaatgggcatatcacctgacatcctgataaaacatgacaaatagtctcacgtttaatcatttaatcattcgataattaccctattacaacttatactacattgccgtgtactaatttacaactattagtaacaaacaactagtttaataatccaaataaaatataacacctttgtacatattttaacacacaacatatcaataatatgtactaactaagaactaatttaaccgtacaattacttaaatacctctaccaacatttagcaataacaaatatgtgctaaccatacatactaacatcgaacaatgcgaaacaattaacaactcttaaaccaattttttattaaactttcatatgcattggacttaaggattactaatgtataccttaacttcactgct

SEQ ID NO: 34962 - DNA, 518 bp, Oryza sativa
attcgatgtgatggatgaaaaatttttattttagcaactaaacaaagcctttgtgctacatggctgaatattaagtctttcgaagtggtcatacaaaaattctcgtttgagctgtgctgcaagaaactctgcatctatcgccctgacacgcgcttcattacgatgaggttggcaagcctgcaggacatcctcgtctagtcgtttgcacatgatgtagcctgtagcctgtagccatacaagagagcacgaccaaattactggagtatggtacgttgctgcaccgcgtactgttgggaatggaaggcgactaatcaacctcagaggccacatcccatgtggtcctcttcttgaagacgtcttttaccctctactggaacggcagcagtaaatcgcattgcctcccagtagtcaatggccatcgatcacgagcaagcaaggcattgatacgcgcgtacgtacagtcagtcctacacacatccgtagtggtatatactccctccgtaccaaaaaaaaagaca

SEQ ID NO: 34963 - DNA, 610 bp, Oryza sativa
aaatgtaagtcctttaaaagcaatgagttttgtttctgtaaataggggtcatagatccatgatctattgtcgcaagtaaccgcaagataagattcgtgcaggagccgtatccttagcaagatactaaatcaagtcagggctagctcagagtctcgatcattaagaagggacaattgccgctaatccgacagcgatcagtagcctgtcctttctgttaccagtcgtggaagagttcggattctccccaatttgtccaaatggagtggtatatcaaggtaagctgaagagagaggccggcgtttcatcatccattgttttttttcctgctgtatcgaatcgtacaaagaaacaaggagacggtctctttctagtatcgattaggctgtgacctcccataagtgatacaagaaccggcatgctgacatttcaagaggatgcagatgcagactgaaaactgaattattgacatatatgacgacatctatgtacgaaaaccttgagcaaattggctaagtgaaacagcgaaatctaagatctttttcggcggattgatggcgtttcgagggtggccaagggcccgtctttgctgttggttacggtcaaggtataa

SEQ ID NO: 34964 - DNA, 614 bp, Oryza sativa
tgatcgatggccattgactactgggaggcaatgcgatttactgctgccgttccagtagagggtaaaagacgtcttcaagaagaggaccacatgggatgtggcctctgaggttgattagtcgccttccattcccaacagtacgcggtgcagcaacgtaccatactccagtaatttggtcgtgctctcttgtatggctacaggctacaggctacatcatgtgcaaacgactagacgaggatgtcctgcaggcttgccaacctcatcgtaatgaagcgcgtgtcagggcgatagatgcagagtttcttgcagcacagctcaaacgagaatttttgtatgaccacttcgaaagacttaatattcagccatgtagcacaaaggctttgtttagttgctaaaataaaaatttttcatccatcacatcgaatatttagacacatacatagagtattagatgttgataaaaataaaaaccaattacacagtttacgtgtaaattgcgagacaaatcttttaagcttaattatgccatgatttgatactgtggtgctacaagaaatatttgcttatgacggattaattagacttaataaaatcgtctcgcaatttcatgggga

SEQ ID NO: 34965 - DNA, 511 bp, Oryza sativa
gttatttactcttgaatgcatgttgtcaatgatcaatctttgtggcttgagttgccggttctaactgctgtgtcagtcacactttttattgtgaataagatagcacattacagatattcgatactgaatctgctagcccatttcagttttaatagataaatacttgaattagagaagaatgtttttgttgtgatgaaatatattttataaattcattaatgatattctagttctctggttaaaggaagcctttgcagcagtcattcaaccatgacacgtcggtaataaaattgtcataaaataattgttttcagttgattgtgggatcacatactctaacgaaatacagatatgagtgactaatttggcagagtcttgtgtacttccactcaagctgcccttagttattcaaaacctgaggcaacattcacaaatttaagcctttctaaacatgcccttatgattgcttatatttttgccgggtcggccgaaagatttggtcgaccaattt

SEQ ID NO: 34966 - DNA, 591 bp, Oryza sativa
cctatagttttctttcatttttcttttgtggagatggtaagcagcatgcaatcaattttttactgaatacctgtacctgaaatctggagatagttcagtggacaggcctgaaagcaaccaggatgtttggtggttcggcctggcctgccaaaagattaggctaggaggaaaaaaaggacttaacagaatgctcatacaaaattgtaataggtacacatagtgggtcagagcaaagtctctgaggcgaaaatactaaattatgttgattcatcattaggaaactccaacctctagtccaaatagatgttgctctagcatgtgttattccaaaatttgattgctaaaattataaaagcatttaacttatcaaatcaattcaaggggactcaactatgaaggtgtaagatcaggtttagttggtctttccagtttgccggctaggccctggctctctgactctaaaccttttctgctcttcctcataaaggcatactccaagagaaaagtttgctttgaagctataaaaatgtaccagaacaaaaggttgtaagggaactacttgaaagtaagctgggcaaattagccataatg

SEQ ID NO: 34967 - DNA, 518 bp, Oryza sativa
tccccctctgtcaaaaaaaaaaaaaggtccaattctaaggacaaatctggattctgaatacatgcaatccagatttatctctagaattaattttttttgacagagcgattaaacttgtagtagaaaaataaaataaaacatgggccaactaataccacctaagtactccatccgtctcaaaataaatatagttttgcactattcatgttcaatgtctgttcatcttacttgaattttttattagtatttttattattattaaatgataaaatatgaatagtactttatacgtgagtcttttttttcataattttttcaaataatacagacagacaaacgttggatacgaatatccatggctacacttatcttggaacgaatgcagtatatactaactccgccccgaacaaatataagtttaggttgtttagcatgtattaagatttgtgaagaaagattattatgcctcgcattaataataggaaataattttaatgataagtaaatgatgggacaat

SEQ ID NO: 34968 - DNA, 609 bp, Oryza sativa
  unsure (1)..(609): unsure at all n locations
tcaagggtgcccaaaagtacacgtcaaaacccgatcaaatccgagtctttgactgacctgcatgcatgatcaggctgcaaagctacccttgccggctccgccgtccggccgccgctgccgtgattaattaaccgcgcctagcccatggtaacttattaacatctctagtcaactactaactccaaatcatctagagccaatataataataaattcatacaataattgcttactatactattaatatttagtcccacctattatacacacgctacgttttgaagttcgtgctacagctgactacagattctatagcccgctgctattctctcttttttttatctctttaaactatgtttatagctggcttaatattctgttatcgtacttgctctcagctgcgaactactaatgttaatgtacttaccttacatcatttagctggctcnnnnnnnnnnnnnnnnnnnnnnnnnnnnnntctatttttttcttttaaaattaaaaatatttaattttgtatggaaggtgttttcaccctgcctcagctcgttatgaaacaaaatagtaaaaaaaaagtaaatcatgattttgttttcgaagaaagcttgat

SEQ ID NO: 34969 - DNA, 585 bp, Oryza sativa
gtcgcgccgcattcgaggcctctgcctccttatccctcatcctgcgcgcctccgccgcgccgagcagcgactggtattgccgccgcctcgccttgccgagcacgcgatggagcctctccgtctacaacaagcaagcagagctacaccacaaccatcagaaaaacatcgctgaacaacatagcaataacaaaacaacacgatcaacgacgaccctcacatgatcctgaaacagatgcaccatctcgttctcgtactggtcgaattgcgtgacgagctcgtctcggagaggagagacgatgcggaggaggccgtcgtcgacacgtgctccgacccgccatcgtctaactcgagactgagcaccgtcaccgccggccgcttgtgcagctgcgcgaggctcactaccttgtgccccttgcccctgcgcctgcggctgcaacgacacttctgcatgcggcgccaccatgcccgccgactttgtctgctcagacgattcctatagttgcccccatctgcaagccagggggaagaaaaaggaggggaacgaaatgatcaaggggcgcgccaagagtgtgagcctgtgagagg

SEQ ID NO: 34970 - DNA, 838 bp, Oryza sativa
gtgaatttagatttgcagtatataacttacaaatgacacctgttgccctgttggaacacaggttctccaaaaaaattggaatacaaaacacagcatacacacaagaggaaagtcacacctacttgatgatctgagatgctgttgttgaagctactcttgtctggtgctgcaaaaggaagaacagcaattcattatccaacaaagcgcagcgcctaaggttcaaaccatggggcagaatgtaatgtagaatagacagtgttaaaccccccaaaattgcatgacctataaacaattctgaaatagcccatgaccagccaattgaaatctctcctaccatccaccatctctgttgactaacaaacaaattttccggtgagccagtgcagatctaggaggaaggcactaggagggcaaggactcgtaccctcgggggtgtcgctatcggagaactccttgtcgagcacgcggccgaacatctcggcgatgctgccgtccccggtggcgttgcccgagccgttggtgaccagtttcccgtagaacttctcccgcatctccttgtcgggcctcgccgcggcggagcggagctgcaccccgaggacgagcgcgagggccaccaggagcagcgcggcggtggagcgccggcgagacaagggtacccgtcccgcggccgccggggccatcggatcggtccggcggcggctcgaccgaccggccgaggcggaggaggcggaggaggaggccgcggcggcggcgggagggggagagattcgcgggtggcgcgtcggggtcggtggattttgattccgcgggaagattggtgtggttggcgcggtggcgg

SEQ ID NO: 34971 - DNA, 782 bp, Oryza sativa
ttgaaaaaaaatccaaagtgactgaaactgtcaggggcttgggatcacatgcaagtgggacacccatgttatttttcaacttacatggtactgagaacgaactattcatgcattaacatgtataaaaggtgaagtacataagaaatatgagcatgaatttatacatatgaatgcaaaaacaggaacagaaacaaaaaataacaagctaattcatctaacctgcgatgatagctgaatcatcagtttcaagaatcgaggaacaaatgaccaagtcatcatatatgcaacagttataaatacggataatacaagcagcctgcatattagagatatttgaggttactgatgaaccaaacaggcactaaaacataggcatgcatcaatatgataatgaaatttagattttattttaacatagctattctgataatagccatacagtttagccattgacatcacgcctccaaaaatgccactagcaccacccagaactggaaggagagcaaataatagtccaacggcacagtcctggagtaaaggaaacatggatgtgacctccaaaaattgactatttaaattccatatagaatattaaaagggcaatgactatttaaaattcatgaagaatattataagggcaaatgtacatatttgttgattatcagcactttgttcacatgagcagtatatatgagaattgcccaggaagttctaagtaaaggcatcttattttattatattttctgttgaaaagagtgagaacaaacaggggctgcaggaat

SEQ ID NO: 34972 - DNA, 588 bp, Oryza sativa
tgcaagtggtacaaatggaatgatattgatgatcatcaacactctgctgcagtagtgttatgacttatgagccaagtgttattagattaccacatctcagtgtcaccggatgtagctcctaacaaatgatgtggccccgatgctacttaggctgtcagaactctgtaattgaaggaccaattattatttagaagctatatatgaaagtgaaatttcattcaaattgaaataaggaccaattatactatttttaaaaaaggtacctgggacttgggagatggaaacacgttccaaaaccgaagcgtttcatcaccagcgccagttactatagtctgttgacataaaatgtcaaaaacacagctatgccaaaatattctagatacaataaacagaattcagtagattcaaagactcaagagataacttcacctgtccatctggggagatggctaaatataataccctatatgtatggcctgtcaatgtggcgagctacaaaggagaaatcgagcacaattaatacaagaaaaaggtaaagcgtactgagttaagaataagcttgcaagcatacctttgacattgttgggt

SEQ ID NO: 34973 - DNA, 694 bp, Oryza sativa
attcctgcagccctatcgcagccatactttgcctgctctgaatcattcttctttttatcatgtgtaatgacagctacagtctccagaacagcctgtaccaaaaaaaatgtttctcaacataccttgacataaacaaactaataagtcaacattaaattctatgtaatttgaatagggttcatttgcaaattggaacatagtaggcagctttcctcatggtgtcaagagtacatattaagagtatacttgaggaagagatttagtaacttgacacaacacatagagataccaaactaacataacaggagatcccacataaaaaataacaaaaagtgtatcttggctcttggcaaggagtcaaccttaaatacttgtttatcagcaaggccatttaatatacatgcagatgtatttgcaagaggaaatcagttctgattgaagctttcgtttgcttttagttcacagtataatggaactccctttctcaaataggctttccatattggtaaaatgactctgggtcgcaaactctgtagcgtagcaaggttgtctggtaactttctgttgtattaactcaagtgatctattgtgcttgcaggtagatcattaactctgtatattatgctgcctctcataatgcagaaacacctaaagctttgcatattccccaaaaacttcagttaaatgactaatg

SEQ ID NO: 34974 - DNA, 637 bp, Oryza sativa
acatactctctccataaaaaaaacaaatcctggtttccgtgttcaacgtttgaccattcgtcttatttgaaaaaattataaaaaaaataaaaagacaagtcatgtataaagtattaatcatgttttatcatctaacaataatgaaaatactaattataaaaaaaattcatataagacggacagtcaaatattggacacggaaatcaagggtttatcttttttttttttatcggaaggagtatacttgcatacagacaatgtcaacattaacagcatttgtatgcttctgtcttggaatgatgaacctcgggctttgattccatcagacattacagctggttccaaatttcagttgtatagagttgttgaaatatactactcgtactcacctgcacctttgtctgtggaggggaactttcaacaaatctctcctgatcatgtgagcgagtctctacttgtactataaatctttgtataatacagtagcatcgtgtatgtgtgatctgattttctttataatggataaatatctggcccctatatccacttgtgatctgaatactgcagtatatattggtagtaaatcttgttgtaatttatgaactgtctttttcctggacgatcgattgattccaaa

SEQ ID NO: 34975 - DNA, 768 bp, Oryza sativa
  unsure (1)..(768): unsure at all n locations
gcgtgctttgananctcggctcggtacccgatgctacagtaaattttttataattatagattaattagacttaaaaaattcgtctcacgaattagctctaatttatgaaattagttttttattagcatatttttaacactccaaattagtgtccaaacatccgatgtgacacggactaaaaagtttttagtcccatctaaacagcccctcattactccctctgtttaagatggtataaattataatacaatgtatctggatatacctctgtctatatatgttgtattagaatatgtcacattctattttaggttgttttttttttctggagggagtaggcacgaatgcacgatgcggatgcgagctgagtcatgcatattttggaatggaattattctcagatcatcagcaattggtgtattggagattaaggtctttcctgaagctggggttatctcgttgccgctgggtgattggccaggttgagtcaatcgctgaccaagctcaactctgatattgaccaagttaggtaaagtagggtagtatatcttagatacactcgataatacagtaatacaccgataagtggaatgtgatttcaaccctaaaatttcgtatttaattctcaacacgcttataatttcttcgtgaaaccctttcaaatctcattntaggtaaagtagtgtatcaagtaaaaaacaagccaaaaggaaaacacttgtttttttagtttggtccgtcgatgatgaagtacccacgttccactct

SEQ ID NO: 34976 - DNA, 1140 bp, Oryza sativa
  unsure (1)..(1140): unsure at all n locations
tacgcgaaactccgaaggctaatgaaacgttaagcccacgcgaatgttaagnaatattgccaagtttatgcatnncctatctaccnncnnccccaagaggtttgtgttgatgcncatccncanccnannnagaggaccccgaaagcgaaacaagcnaaaacaagggcggncaaacaaaacaaaanagcaaagcaaaaaaaaaaagcaaagccaaacacgcnaaaaaggggggaggaccaagncaaaaagcgaaacaagcaccaaanaaaacagggcgaagnagaagcacaannccccaaccagacaaaaaacaaaggnaccaaaaaaaccggaaccacacgggggcgcnanccaaggcgcccaaccagaaccccccgnacggaaaacggaacgagccaaaagcgggggaccaaacaaggancagccaacccccgnnccaaaaaaaagacnaaanngagccccccaaagaaaccgggggggaaaaacccncccaaaaaacgcgccgagaacaggncaaaaagcgnacgcgcggaaaacgagagaaagggggnggaaaaggggcggccgaacacaccctaagcagaagcaaccaaacacgggctagccgagaaaaaaaaggagaaacaaaccaaacacggataagggaaacaaaaagcccgaaaacaaaacacgcgctcacaaggataaaaaagaacaaggtaactaaacatgtactaattaagttaaaaaagtccaaaacacctagacgttttactactaaataaaattactaaccaacatgttatcaatacatgtcccaagtaaaaaaaatggcaagcaactacccctctgtcaaaaaaaaaaaaagggccaattcttaggaccaaatctggattctgatacctgccatccacatgtatctctaaaaataaattttttttgacaggagcaattaaacttgtgggttgaaaaaaaaattaaaaacatggggccaacctaataccacctaaagtacttccttccggtcttaaaaacaaaatatatgtgttcgcacctattcaatgttccaaaggcgggtccaattctactttgaaattttttttctagccttttctaattatttatttaaacgggataaaatatggattagtccctttctcg

SEQ ID NO: 34977 - DNA, 663 bp, Oryza sativa
cccatgtaatatggaaaaatatgatactagggtgtgttggccaacccatgttcctaacctctttctctcgttttccacgcgcacgcttttcaaactgtaaatgatgtgttttttgtaaaaagtttctatgcgaaagttgctaaaaaaaataaaattaatccatttttttaaaaaaatagctaacacttaattaatcacgtgctaatggattgttccgttttgcatactggatgtttggattgggaacctggggtgccgaactaagccttaaaagttttgaagcttacctaatctataagatttgtgacacaggaattttaaccgctaattctcaaccttggttggatgtatcccaacatgccaaaaaccaaccgctttaattaggctccagagtttaaacaaccgtgacgtggacattggctttggcacggggtggtagctgggctccgcggcacaggtcgagcccgagtcaagccgttgcacaaccagaaatttgacctcgcagctaccacctcgtgctgtcaccgctcagcacagcaagcagcaacagcaaagtgatttgattcctcctcctacccaaacagatctgaggctgctgccaaattaatccccttcctcgcgtggcatgtgcacatccctactactagcgtagaatattgcttt

SEQ ID NO: 34978 - DNA, 679 bp, Oryza sativa
acccatggatgccgaaaacatatagggtcacgtaaggttttttgttaagaacacaaaggtcacacaagtagcttacttttgttggtgtattcaaagcaccctctattgatatgggatgcataaaattttttgtcggcaaattcacatatcactatagcaaagccagccaactaaaggggtaataaatcaacacatcatgagataaattaaaatttattccaacctcaaagatatgtagatatcaagtaatttcatcaatgcttgaccatgcattcaactgatccaaggaataagaaatacatgctcaaaagcatgaaatctgatgcaaccaacgtagcatatagactggtaaaaaatgaatagaaagagatgcagaggaaatttacttcttgtagctgaggtatgatcttcccatcagcaaacaaatcaacaacaatacctgtacacattaactagatgttgttaggccagaaaactttgagatgcacttgatggtgaagttgcaaggagtgtgtggtttcaaccccgacgttttttgttcaatctccaacacgctcacaatttcttcttaaaaattgtttggagagatgtctcttcctccaaactcttattttttaggccagaaaactttcaaagcctttgaaaactcaaaaagaaaaacattaatctaacagtacat

SEQ ID NO: 34979 - DNA, 769 bp, Oryza sativa
  unsure (1)..(769): unsure at all n locations
cgtgcgctttgaaancgttagacagctcgtaccctaccaaaatatagcccttctggtgtactacttgtcccatcaccccccccccccccccgaacacacacacaccaaaaaaaaaaaagcttcccatattacccccaaggccccaaccatacctcatctatgagggggcatcatagtttcttttctattcacttaatctttgctaaaaccctagaaatgcttatattttggaatggagggagtattgttcttacttctttatccaacagctagcattcgtaccacagcttacagagaatatatagttgtctcattcagaaagctgaagaattttgctaaaatacagggaatgagatcattcagctcacaacattacaaagggacgtctcatcataggcagaagcagtgagatcatttaagtcataacattccaaatctcctctggtagctagctagctttcgtctctctgactcttctatcctgtaattgtgcccattgtgcattattctgcattgacgtatgcttgcctttcgctataggcttttcctgctcttctctttaagatagctagctagtcttcagtgattgtactgttcctttcttgaaaaagaaacgcatatacagtctgaggataagatattgagatgcatgcacacaaatgcaataaaaaagaaatgttaaaactttggagaaagaaaaaaatatgagagagagattgtccggttagcactttcccttcttctttgaaggtcaaacgggggacaaagg

SEQ ID NO: 34980 - DNA, 1798 bp, Oryza sativa
acacagttggcaaccaaactaggagccggtaccgcaccgcatcgcacctagaacgactcaaggggtcgaatacctgtgggctacgattataaatagtcacttcctatggaaagaactcttcacccaaaaaatttcccgtacaatcgctatagttgaaggcaagagacccttgtaatttccaaaaatattctagatgggaaacgatggagaaaaggcatcaaaactatgcaaggaggcaggagggcctagcctagattcaagtaagtgtaaccctgatttattctcagaaatagatgatgaggaactctaacaaatttcaaaggtagttcctcgtagaatacattgactgattaaccacctaaattaactcttgcagatcttgctccaaccatcgggctagcgctcaccaccgtccccatggggtgggataaccgtaggaggaaacacggtattttcttttaatcgggacatctcttatagtctcttttgttgcggaccgatatcaatatggctctatttggcacaactctagatcttagatccacacagaacttgaagagtatattaaattatattgttttcaaaattattttctactctaaaataggaacaaaatgattcatccaagtgttatcaacgtaatcatagatctagatctatggatttgtggagctaccgatacccaggtccaagaaaccttggatctgaagttgtgtgaaaaagggccctaataaaataatacaatagtcctttgctccttgtaaacttttatccaattcaaacgttcggctataacctgtactaaaatatgcctattgtatcaaactcatgggatcaatacccaattctatcacaatgaaaataaacatgattatctctaatcatgagattcaatgaaatttacacttcgttttatacactttcccgagacaaattatgaaaaatatcaatcaacaattgaccattggcttccatgggagagggtaactacggttagttgaaagccataaaaacataatagtttttattagtaactatcccaagtagtaactgaacaaaattttaggtacgacaaaacttgggtgattatttggggtgattgttctccttgcgtagaactttccctgactttggcatacatttatataggaagtacaattttaatttttgaaacttgaccaagttttagcccaaacaaaatgatatttactaggatgatcaaaccagccccaacatcccaatgaggaacccctagagcataattcctcaaaatctacagggtgaagctgccatttcacaacccacataaaggaaacctaattgtgcaattacagcaaactctaggtcatctatgcaaaagcatgctcattcccctcctataagaacatctagaccccatagagcaaacattgtattgcccggctatgagaatttccaacgttatctagagtattttcaaacaaattctttgtagcctaccactataagcttaatccctcacttgacctttctttcatggtctcgagcgcaaggggttactaatcctctatttctttactctagcgagtacgataatgaatgcacgtggccgaggggctaggaatggaaacgggcccaaccgggggcgtgggggtggaagggctcattcagatgtggtggttggagcaaacaccaccgtactagcaacaaggaggtgggttgggttggagatagattccgtgccaggtaatgaggggcaacgtgacattgtgaactactacctccgttgcgccactggcgttggtaatggggagaggga

SEQ ID NO: 34981 - DNA, 664 bp, Oryza sativa
gttgtaactattgtagcattgaaaatgtagtatgactggaatttggatgcataaccacccatttggccatgatgtgatttatatgggcgattttacatagcactgtaattcagtggtagacccagtataaaattttagctatgtcggaactatatataatctcaaacatgtcgatacgtgataagatcccttggtaatgaatttaggtatatataagtaaaatttaaggtttatactataataataaactatacatattgaaatttctgctaaaaagtttgttggtaacaaatagaaaggtaaacaacatgatccataacataaacaattattaatattttctcgacgcctcaaatagctttataaaaaatgcagcagctgcaatactaatgatagcagagtggatagaacaaataaaagtttaacgaggttcatgaccaaagcaactcaaataaatattaatctgattcactcaatggtgctccttctttggcagtgtaaaaaggcttgaactatgagctatttatcctacgatggaagacgcctaaggcctcgtgtaatgcattcacccacgacctttctatagacataagctagcttgagtgataggctcctagcgtacactcgtttctcacccacaataagctttctgctaacgccacat

SEQ ID NO: 34982 - DNA, 522 bp, Oryza sativa
gaaaagaataaaaaaaatgatgtacttcatggatagatttgtcatcagcatacctgtaaaaaaggtgcgttttttttcgtagctagatgcaaaatatatttcatcatgtcctagcttctttcttgacagtattagcagttcaacaataacagcaactataaagttgcaattaatcagatgaactcactttaaccctgccagttttaccaagggagcatgatcattgatcagattcttcagtcctgtactggtaaaattctgcttcagctgaaccaaaagcctcttcgcaacttcctttgcttcttttttcatttactgctaggcgtaaatggtggatcccaagtaaattggagatcgtgaacataatgaaaaactatatttcatcgaggttattcacatcaatcgatcacacagaatgtctaaaaaattggacctgaaacgctgctgctgctaaaagccatacctggcggttcacggtgtcgaggtaagggcagtcccggcgcagctccacttgcctcggcc

SEQ ID NO: 34983 - DNA, 2183 bp, Oryza sativa
tgtcgagctacggatacccaactccaagaaaccttggttctgaagttgtgcaaaaagggtcataataaaataatagtcatttgcatgttgtacacttttatcaaattcaagtgtttggctagaacttacgattagaggtgggtattcggtttttccggtttaatcgcctcggtttgatggctccctaaaagatcggtttctgtagaatgacaaccgaagagcgtacgaataaaacaaaaaccgagaaaaaaaaagaccaaacaaaattggtttggatttttcggggttcagtttttaccgactaaatgtatgcctcgatctcccatcctcccatcatgcaaagctagccatgggcccaaaggtcgtgggctccaccacccacgcccacaagataaagcaaaattacgtgaaacaatgaggcagattcactcagagcctcagaaaccaatcctgtgcatgtggacttcaatttacttcggtttctttggtgagattggttgacagtaggcggaggccaaagaaactaccaaccactaaactgtattaaaacgaaaaccgcgccaccagctgaacactgaaaaaaaccaacacttcagtttggttcggttcagttcggtggtcggttttcgagaaatttctgcccacccctacttgtgctaaaatatgcctaatggatcaaactcatgggatcaattcccagttccatcgcaatgaaaataaacttgactatctctaatcatgagattcaatgaaatttacacttctttttatacactttcacgagacaaaacattttcaccaacaactggccattggcttccatgggaaagagtaattgtggttaattgaaagccataaaaatagaattatttttattagtaactatcccacatagtaactgaacaaaattttaggtatgacaaaactcgggtgattatttggggtgattattctccttgcgtagaactttcccttactttgtcatacatttatatagggagtacaatttgaatttttgaaacttgacccaagttatggcccaaacaaaatgatatttactatgcatgtgaaattgtattggcaaatttcttgaggctgatcaaagcagccccaacatcccacatgaggaacccttagagcataattcctcaaaactacatggtgaagctgccatttcacaacccacataaagaaacctaattgtgcaattacagcaaactctagggtcctctatgcaaaaaaaatattcattcccctcctataagaacccctacaagattaaagtcttcatatggctgcttttttgtggcagactaaacacgagagatatattggatagaaggaattgtgctcctttgatctcacttgcgttctttgttcgttgcagcaaagagaaactccgtttcatctgtttttctagtgtccatttagtagaaagtgttggcataagcttggaatatcatggaacacctctttggaattctttcagatgttggtgctggcaagattgaggttcaggaggaagggctttttggaaatttgctttattgcgtgctgtcacatttgggaacaacgaaataggaagatttttcagaatatggatccttcttttgatagattcttctacatatgtgtagaatgaatgatccacttaggcaatcggtctctgattggttacaaactttatagttctttagggaggctgtagccttttgtaatttttcttttttgctgtaaatactttttctccttttttataaaatacactactgggcaaatgcctggtagttttcctttcaaaaaaaaagaacccctacaacccatagcccaaacattgtattgcctggctgtgagaatttccaacgttgtctagagtatttttcaaatttcaaataaatatttgtagcctaccactataagcttaatccctcacttgaactttttttcattatctcgagcataaggtggtcactaatcttctcttcctctactatagcaagtacgatgatgaatgtatgtgggccgaggggctaggaatgggaaagagcgcaaccatgggcgtgggggtagaggggctcgctcagatgtggtggttgaagcgaacacctccgtactagcaacaaggagatgtaagggcttctaaacacatttcatcttattatccaatgcgctgcaatttcatg

SEQ ID NO: 34984 - DNA, 785 bp, Oryza sativa
ttgtcatccagttgatgttctgcattttttcttcttaaagcagaagattttctgctcgtcatccagttccatgtactgcccatatatatagcatcatcaaccggccaaaacaagcagaagatcatgcacttgcatgtgctgccccatctatagaatcatcaaccgactaaaacgagcagaaggtgagatccacaaccttctgcctatattaatttccatagaaccttctgttcatattaaccttctgccctatacgcctatgttaatcttctaaaccatctctatatggttattaattttcatagggaacgagcagaaggtgatctaaccttctgcctacattctggccagggagcttcatataagaagatgggatttagttacatgagcagaacataatgttgtttgtacctaatcacctattagctagggagcagaaggtcctgcatgcacttgatattcgacgaattttttcagttgatgttctgtcattttctgttgagacgctgaatttttgtagttgatgttctgctgttacatggatttttctttcgtttgatgttctgccgtatttagttaatagttagtttgagaggcagaaactccatgctagaagctagtttgcatgcaaccgttaattaagtgatttattaaactatttagttaattgtttaatctactgatttattggatccttgcttataccactaacccactaagggaagggagtagctactcccggtagtaggaaataggcgtcctatatatatatatatatatatata

SEQ ID NO: 34985 - DNA, 1086 bp, Oryza sativa
acacagcgcagaagcagctgaatagatttaggatatcctctacatagccagatttatcaattgattaattcaagaataacatatattcactgggctggggcatcttgagaatattttcccaaaacaaatttctcttgcctaaacaaaaatggacatgtgtggctgaatgctcagcagaacagatcagtccacaggttgatcgatgctgccaaaattcttgccgtcacaattctgtatatgatccattacacaaaggatagccaaaaggcaaaagcaaaggtctacagcaacgaagaaaggaggcctacacatacatgaaagcaacatggataaggactaaaaaagaggggaaaaaaatgggggggtgacatcttgtgtcacccggagcaagcacgcatgcacctggcaacttcttggcaagcattttgcaccatgcatacaggtattggattggatgtccatgtgatgtgaggcagcatgccctccacaagaggtagatcattgcaggccacagggcatggcaaatcatagcaacgtgaccaaagaaacgaaaaggctgtagccacaaatgttgaccttgtaagctgaatcctcgtacggcaagggtgatctttccagtatatacagcataaaagtgcacatatggtgtatttgacatgcgcaaccggtagttgccctcatcatttgacaagaccaggagaaacctcatgcttcaacttaatcattggagatacgattgagcagataagagcatattgtcctttttctaagtatgcgcactgatgcagattcagaacatttggtctctgagctgcacaaatttatatacccatgaatcatgaaactggagcaatctgaagttcctgctgcacaagatttttcttaactgtgccctcagttggtaagattccttacatgggaaaccaaacatccgaactagcgaattgtgcctcagaattcaatgatttaagtggattttcatgttggcaccatatgcaagaaaagattccaagaactcgcacgcttcttttgcttcctttgtgtcatatcactcacggttatgtgtgggttagcgagcaagccttc

SEQ ID NO: 34986 - DNA, 591 bp, Oryza sativa
ataagacgagtggttaaacgttacaagtaaaaactcaaaatcccttatattataggacagagggagtacaagtgtacgagtatttcaattcgtctgagtggtgaaaggtaacttcggtgaccattttgggatgagatcgggctgtttacattgcatattgcaaaacttggaatatttttatttgcacttgggtatggtgcttccttgctagcccttaactaataattggatgaagggatagattatacatgaacatgtttgtacataccaggagcgaattctgaatttgcgtgtaacttttgttattggtacaagatatccatcgtgttgcaatgccactgtttttctttaaccatttatcatttatgggtcacattctcaaaaatttctttgaatgacctgtccaagtatgattggtgttaacaatttacaaactttgcgtgcatgtctgttgcatacgtacagtggattatcctttggcagtatgacctgtttgtaatacacatcaatcttgaatctcatccgcatgaaccagattatagtttaactaaactatttgcattctaaaaaaaaaaactgctatggaagact

SEQ ID NO: 34987 - DNA, 653 bp, Oryza sativa
ttttttttgaaatttcttatttctaatcaaccgtcaataagtggtgaagtatttcatgaaggttggattgaagggttgaagagaacaacgaagagctgctggaaacttgactgacgactacccgtaaagagaatggtgaagagttactggaagggggtgctgtgatgcatatgctggcaaaaaaacattcatactcctactttaagtaattatcggacttcttgttgatttttggagaaacaaaagagatatacgcaggtcatacttatgagttaaatttaccttttattatgtgagagttaaacatactaaaattaatgattttatctgaactcgtctgaaaaccagtagcttctcttaataattcagattatgaatgtagtccaaacacatgatgatttagcttttaccttgcaatctacggtctaccttgcccgttctaactacttttaagcaagtcacttcttccagtttaataacaacttcgcttttgatagatgagttgatttattgtgtacaatttgaaccctaatctgattggaatatatgactctagggtgtcatacttttgtctatgtgagtccataagctggtgatgctggggagaacactatcatttatgccacctaagagcacatgtgatcaagaatgga

SEQ ID NO: 34988 - DNA, 904 bp, Oryza sativa
tagatcatccgttaggtcatgtttggtttgaacaagccctataaaataggcgaagaaattctattcttctatttaccatttattggctactgttgatgcttttatcatttctaagaaactgatggaggatccaaggtcacaataatcttattaaacttccattttcatcggtacctgtgagctttaataatgtatccatagcattaggattggatactactccctccgtcaaaaaaaaccaacctagaagacgatgcctagtacaacgaatctgaacaggttgattttttttttggacggagggagtaaggatacagatctcggctgtgtcatgtattccattatgcatagtagatgttagctattgtcccagttccgatagagaaggttagaagggaatgtaagagcaagtttaatagtatagcccactactagctccaatttatataatagttgcttactatattattaatatatggtcccacctgtcatacacatattgcgtcttggagtccgtgctgtagctcgttacagatttctatcccgctgctcttctctctcatcttttatcttattaaaatatgtttatagctgcctaatagtctgctattgtacctgccctaatggtgtagtagaacttttaactcaacccatttaagcaatgaatgcattttttttagtttacttcattcaatatatgcacgtgcaggctactaccaatagtagcgaactttttaactccattttgtactcattttaggccgtgtgcattttcatttaggtgaaatttggtcaatatgtatcccgctgggtatgactcgtagtcaatctctggaggatatggaggatcataggataggctaggtaaccttttcactattcttttttaaaggtaccttcaagt

SEQ ID NO: 34989 - DNA, 623 bp, Oryza sativa
attttttttagtgttttttactacatggcgttcctttaattacttttatacagataagctttgagatagtggctcgagagaaagaaatgtgcaaacctagaacatgcaaaccggattccccaatatgttctcagcaaatttggaaaataacgtaggctaaggcgctaagcagtatttggttcggattgatagttaaattatgaagccatgcaatatttagactgaagaattttgacgtgtatagactaatctgatgcgtatggacaactgcaatatatgatgatgatgcatattttaaggccattccaacattacctttgtaaacattacgtttgatgattttcgaactgtacttttagtcaaaagcatgccatagctcatatttgataaacattatggtaaatcacttgtaagcagctcatcaaattatgctcaaaccatctaggctatgtttggataatgggaaatgaggggtgggattaggattgagaaatgaatcaagggctaggatgaaataaggtggagaaaatagatggttaggatttaaagtaaggtgggaaatcatttccttttcccattattcaaacggtgccctacatattatgcttaaaaactcaaagctg

SEQ ID NO: 34990 - DNA, 558 bp, Oryza sativa
taaatattgttgttgttgttgttgttgttgttatgaactcagaaatctgcctggtggaagaggaagaagggtgatgcgatacaatgacaaaggttcatgccaaatctaactctgggttaccagcagtgaccaacctcagaagtctataggcagtcctcatcacttccaagttgccaatagtaactctgtgatttactaatgagaggacatacccctggtaatcctgcaatactacagttaaaagacaaccagaggaatccccagcaaaaattgattcttgcactaaaggaaataagaagttgagtaaagctgttactttgaggaaaatggacttaatgggacttgctacgttggcttgtcctaactttgtatttctttccttctacttaatggaatggcatgcagctctcctgcgttgttcgaaaataaaggaaaatagaacttgtttggtgccttgccaggtttggattatagctaacctacaaaccaactaatattattagattgtaccttcatagcaagcaagggccagtatgaaggcaagtgctagcaagtgac

SEQ ID NO: 34991 - DNA, 2406 bp, Oryza sativa
tcactcatagtactttaaatgtgatttgtatcttatatatttgcataaaatttttaaataagacgaatggtcaaacatgtgagaaaaagtcagcgacatcatcaattaaaaaacagagggagtaaaagattaaagagaatagcagcatgaactctaagacgcaatatgtgtatgacaggtaggaccatatattaatagtatagtaagcaaatattgtatgaattagttattagattggctatagagctagtaatagggtatactattaaacttgctctgaggaccaaaggactctggctcctcatgacagatcgggtgacgtgagcctctgatctcctgtgcagatattaagtgtccattggactttatttatgcatggcaaggcgttttttttttttgaggctgcggctttgctgcattcagaaaactgtttgaatttcattgcggccgttcccttgttgagttttgaatggaattcatgggatttcacaacattcatcacccccaagagagattgaagatgatgactgcttatcttaatggaagtagtggaaaatagtttggtggtaaaactggattttatgataaactttatactccatgttgttctaacttctagaaccaaagttgagtggcaaaaataataatgaaaagaacttttaagtcatactaaaattcaaaattggttacgggcttatgactgaagatgcctgtgcataatttagatggattaggaggttgcatagtgcacggaacgcgcgatttgagaggctttaacttttgtgcttggacttctctggttagtgggagaagtgtgctgactaggagtgacaaggcattggcacacgtggcccaatgtaaactggaggcaagagctttgcaactggtatcagtagtagtgcaggttagagggccaaaaagtcagcaacaaagggtacaaaagagaggatggagcctccaggaagctctagccttttttgtgcatcctatgtaaaaacatgatggttgaagataagcctcatgatggctgcaagacaaaactggaactaacaaatcaagaacaatatcttgatgggaaaaaaaaggagggggagaattgcagattgcgcatgcgaagatgggagaggaaatcctggtgcatgttgggttgggttgagcatggaaatactttgggtcaactcgtggggttcaggttgaccaacacatctgctcttttgttagtggggaaaccatgaacttctccttctggttgatgctgcaaatattttacagatattcaacgaatgaacgagaaatttcatccaatgcaaagatgttgccagaagtcaaaacccacgatgcaaacttttttcttttcttttttttttgaaaaactataccttagtttgagattcctccctaggttcactttctttttccttctttctgtatgtgttatataacttggccccgtttaattcgtgaaaagaaaatttttggtgtcacatcgaatgtttgcccggatgtcagaagggatttttagacacaaatgaaaattttttttcataactcgcctggaaaccgcgagacaaatcctttgagcctaattaatccgtcattagcacatgtaggttattgtaacacctatagctaatcatggactaattaggctcaaaaaattcgtatcgcaattccctctctaaccgtgcaattagtttttttaatctatatttaatgctccatacatgtctaaagattcgatgtgatgtttttagaaaaaaaaattagggaattaaaccaggccttagcacatctttctcaacaaaacagcttcacaccaaaacttattttcgtcgtctttgctgagaaaccagtcgcccttcctcatgaggcaagcgcaacagcccatcttccgataaccatgatgttcaagcatggagactcatcacactgcccaacaaggtttaattgggagaatctcaaaccaagggaattaggaaggagatatttgcaacaaattgtcttataggagggaatctcaaacctaagataatatttggagtggcttttatatttttcccaacaaaaaacaggagagggattttacagcacgtcctcaaagtgcaaagtgcaaacttccaggtgaactagcaatatatatatacttggcaccaaagtataagacacaaagatcacattccactaacccaaaaaagagaggaacgaatagcttaacgattaagtccaaactatatgcacgtttttaatacgggaaccattattcgacaaaatgaatgattaaggcagtgcttggggtagataagacatcaatcacaagagcttggccaattgcttcatagaggttagactacaaaccgaaattaagctgaagcaaaatcccaagggtacctggtgcacagtgcggtg

SEQ ID NO: 34992 - DNA, 513 bp, Oryza sativa
ttgcttattcctaagctgaagcattttatttgagcagaacatgttgtgaaaaagatgacgcaaattgtatcgctagtctaattcctatttgagcagaacatgttgtgaacaatgagtaggatgagtacggagtgtctcagtacgcaaattattccatcatatctatatctatactaatctctatctctactattctaaaaaattgaagatgcttctactgtgattttggtatgttatttgtgtttgaattggtttgtaattttatctctatctattataaaaattgaagataattcatactcgcggtttgtttggtacattatccgactaagattctcgcttgcccttgcgtgtggtgtgtcctttgctttgcaccatcatcagctcgtgcgtctgtcaatccactcgcttgacacgctatcatctgtcgttgcgcaatctggatcgatcccgccctcgtgaagtaatccaggattccaaatcgattctggtgtacccgcagcttggtggtgg

SEQ ID NO: 34993 - DNA, 629 bp, Oryza sativa
agagttctttcctatggattttcatttgccacctgatcaaaagttgccattttgtttccatacaaatgcgcatttatccaaagtaacctatatagtagctattcaagtatatgttgcttgctaggttgtagacagaattcctcagagcatagcaggacagaggcataagagggaaacgtcctatcgttatgtacgtcttatgattgggaagattttcacttcatttgtgcttctattatgcaaaccaatggatatgctctctgatttggtaatcgtccaataacgagcaacagttgtgcaataattatctcaatttaccagtatatatatcaaacatcggatgaatgaacaagatattcgacaggctgatagatagaaatgagcaaatgattgggaagattaagattgcatatacatggtgatttccacttcatttgtgcttctattatgcaaaccaatggatatgctttttgttttggtaatcgtccaataacgagcaacagttgtgaaataattgtctcaattaaccgtaggcattgaatggtaatttctaattgccaaacaaaaattttagggccaccatcattcatcaccgatgtgtattcttaattgttgaactactgccatct

SEQ ID NO: 34994 - DNA, 551 bp, Oryza sativa
ttatatcgaaagttttcggacgaaattcaacgattaatagtttgaaaagcgtgctaacgaaaattgaggtaaaatctatatcttaatcaaaaacagatgaaaacatttagtagtttcattaaattcatcgttcgatatgtttttatagtatatttacaagtttattccaagttaaaaatgttgcttttttaaacttaagaagatttgatttagtactccctccatcccattttaagcgtacccataagtttctgggttcaactttgatcgtccattttatttaaatttttttaattaatatttttattgttattagatgctaaaatatgaatagtactttatacgtgacttatgttttttattttttttaaaaaattaaataatacagacgattaaagttgcacaaagaaacttatggttgcgtttaaaatgggacggagagaatataaccataaaataatttatgatatgaaatggagggaatagcataatttaggcacacaaatgactagtactcctactacgcgtagctgtttagcatgtactcacct

SEQ ID NO: 34995 - DNA, 651 bp, Oryza sativa
agacctcaaaagccaaatcagacaggagccaccaaaaattttggaaaatgctgagtattgcttcaactctggaaattctttaccaaaattgaagataagatttttcattgctcttcgacagcatacaaacagacgaagtagccccatggaattacaagattcataacgatggcataccattgccaatagcagcagtctgcaagaaaattgaaaaaatgtcattctcagcaaggagataaccaaaagatttcagttgcagctaagaaatgtgcaatgtgcatatcaccatgcactttcccaaaattgttgtcaatacagattcccaggacattttgactaactaggatgcacgcagttcaccatcacaattcgttgcatcaaaaactgatcataggccttattaacaaaaaggaaatactgaaaaagactagagaaccccaatatcaataaagacaacacaaaatccactagaaataacccagagaaacaattatttacaaagaaagaaattaagttgtaataaacaagaagttcaactaaaaagaccaccaagatcttcataagaacaaataaacattggacactttctctcaagtctcaagtgtttcacatttgtgccctccaattactgccatgagacaaataattaac

SEQ ID NO: 34996 - DNA, 687 bp, Oryza sativa
cattccaacattacctttgtaaacattacgtttgatgattttcgaactgtacttttagtcaaaagcatgccatagctcatatttgataaacattatggtaaatcacttgtaagcagctcatcaaattatgctcaaaccatctaggctatgtttggataatgggaaatgaggggtgggattaggattgagaaatgaatcaagggctaggatgaaataaggtggagaaaatagatggttaggatttaaagtaaggtgggaaatcatttccttttcccattattcaaacggtgccctacatattatgcttaaaaactcaaagttgctttgaataatgcaataaatgaacaatgtgctgaaaattttatcaaacacatgatcgattaagaatctttcattgaggaattttaacatatggtgggcagccagttagagcaggtacaatagcaggctataagctaactgcaaacatattttaaggaggtaaataaggagagataagagcagcgggctacagatttgtagccagctgtagcacggactccaagacccactgtgtgtatgataagtgggtccaggtattaatagtataatatgtaactattatatgaataagctattagattagctatagataaattagagctagtagttggctatactattaaacttgctcttataggaatcgta

SEQ ID NO: 34997 - DNA, 714 bp, Oryza sativa
gtggatcccccacacgagcacctgcatgggctgaccctgctggctgtccatcttgctgcaaacaaaaagctataatgtaatacatccaaaatctgtaacttaacgaatcaagaatcagctcgtgaagtgcaacgacgggatgcggatttccgatatccaacgggaatacattcaataagctgctgacgctagtggccacaagtaaaattaagaatatctagtctaaaaaaagtttattctgtcaaaacattcagataaaaaatcaacgggaccatatgtaatgagcagttcaggaaaaaaaaaacaatccatctgctttcttgaaccacaaaattcaagagaatcgccatcaagctccttgagttttcatgtattgaaaatttcagaaggaacaaaacaaaggagctcaagaaaaacatggctcagttgcaagcaaatgaacctctcaactagcggacccatcgtgctgcccgcagccccctgcccatgtgggatcgatatgccatcgacgaggctgacccatcgcaacagaactaaagcttgtatacccttcatcccaaaataagctcatttataggtttctgtatccaatcgagcttaaaaaagtagctcagttgcaaccccaacaaagcaaagcttcacatacacacatacgatgcgttaattacgtttctaaaattactcccgcatgacacaaccgtgattagatttgag

SEQ ID NO: 34998 - DNA, 738 bp, Oryza sativa
gcggccgaactccactagtggatcccccgttccatttgaagtgcatctacaaatttccgtgtctaacgtttaaccatccatcttatttattttttttataattaatatttttgttgctatttgatgataaaacatgaataatattttatgcataacttattatctttatttttttaataattttttattttaagatatacggtcactgcatttaaaatggttcggggagtactagtagtactacaatacagatggctctgctcccatgtggacgtacgcctcgcgcccccatgtggtgtcttggatttggttcggatttaggcgtaccgagtccatgccaatcacattgtttttccacgccaaattgcgtctcccagaacaccaaacatatggtggccaagaaaatgattgatacgcacggtggatggatggatggattggtggcgatcgatcgattggtttgatgatgaaaagaaaaacaaatccgaggagcacctggaatcggggacatgcgctgaaccgggacaaggaaacagccccttgttttgcgaacttgtagttgtagagttcgtgtggagttgctgtttgctgttgccgtgttggggtatttttctgccgtttcttggagtctttgggcagtaggttcaacagctaaaggagacaaacctctctccggccgtgttgcgaattcgcaatgcaaaatgcaaccgacggtctggtctggtggtgttgctagtc

SEQ ID NO: 34999 - DNA, 759 bp, Oryza sativa
ccccactcgctcgcttcccgaactcggctaaccaggagaaggcaagttgccttttcgcagaatcagttccgaagaacagttccaatcctaccctgggattttacaaccaagccaaggagatctgcggagcggagtggctctgatactaaattttgtcaacaacccacaactcacacccaaattacagagagaattgcaacgatgagagaattagagcaagaggaattatggcaactcaatatagtagtcttctccgattccaacaggaatggagccgccgccgcctacgccaccgtggttgccattcaagtttccctcgagctcgctgatctgatatatatatcctatctctctcttctttccccttgttcacgctagcctattacaatatggacttctattacatggcccagttaggcccacagtacttggggttttgcttaacaggccttgtagtacgacgcagattgcctccctttgactgcacagctccagcttgacgatcttcaacttcgtcagagttttgctccccatcttcagtcaatggaacatcgccaggtaccgcctgctccttgacataaacatgcttattttcttctccgttttgttaattttgccactgaatcttacagatatatgttgttcatcccatttagtagtgcactgtgatagcacatcatcacaaactaggagagccgttggatctattcccaatggcttgattgcagtctctcatgtaacgggcacgtgtgctcttgc

SEQ ID NO: 35000 - DNA, 763 bp, Oryza sativa
agtggatcccccacatatgtatatctagatcaatgatgttcatctatcatttttacatgtaaaaaaaatcctgtaaaattcgcatttacacttgtgattattattattatttgtgaaacacaaattgttcgacataccatattatgacctgaaactataagcaacattggtggttcttttagcttattcggaagttaaaacaaactatatatttgtggatgtcatgtgttctaatgttccaatggatgatggattatacatgaactaagtttattacaataattcaaggtcacaacaaaagaatagatattcattttcctttaaaaaatatattgtagtgagtgatgaacctatcaccacctactcccaccaccacctgatatatggggtccattgaatagtgaatcatgcagacagtcgttccttctcaaacctaaacatgttcaaattgtttgtagcaacgcacgagtatatttacctagttaacactagatttgaaagattgatttaaaaggctctctaaatattgatgaagaagacttccgtataaatcgtaccatttaagaaacaccatgggatattttggccatgtacaacactccaccgtgggtagtggccacagcactctagctaagcgatgggtaaattcccttaaacctactctattcatcatgcgctaatggcctaattcgttttacgtattttcacagccttctcctctcctcttcttttatactcccttagtttcatattataagttgct

SEQ ID NO: 35001 - DNA, 752 bp, Oryza sativa
actagtggtatccccacgacgacggtggtggcagaagaaattcggcgaaatttgcttgatttccctagttaatctactcatcaattgggatgaattggaccacatggtttgatgaatctaatgtgtgtgctctggtcagtaggttcgagactttgggttgactgataaagtgtttttgcagccatgatgcgagatgatggaatattttactatcttcatcacaaaatatataaaagattttctacaatagtaaaaaaatacttggatcgtcttctatttaagagtttggtaggataacattagcattggttatttttcagttacgttagatagggtggtatgactaaaagttcatattaaaaaatagtctactttaaaattagatatttaaaagttcaaaaacaatacaaattctcagattaagtcgattccaagcggaattttaatacaaattctcatatgaatgttgttgtgttagtatacgtatccgtgatgtatttgaacaaataccaagttaggcatctagaataaattattatgttttactaaatacaaatatgtagtacatattgtggacactcgagtttgctaaccgtgtttaacacgtaaggttaaacaatatcatcgtcgaaaatagagaaaaatgagaacaaaacaaaataaaatagcgaaagaatactgagatatttacccccagtatagagaagacaaatttatattaaaattatgaaattttaatgattcattaatct

SEQ ID NO: 35002 - DNA, 764 bp, Oryza sativa
ggcggccgatactccactagtggatcccccttactgcagcatggcagaatatgtgcatgctaaggtgtaattggcatggtgttttaatcgatgcatgcattgtgggagaatgtgtgcttgatgtcttgattgatgtgatttaaattatccttggtcttggtgcataagcatatatgatgatcaatttttttttgagggagtatttggtcagttttcattgagatgattgttggtgtttgattttccaaagttttatagtatgtccaattcgatgtagtccgtttctcatttttagcttgttaaaaatgttgtaaaagtcaaatttacacttggtttttctttttcatgaaaaaaaattgttgaatcgaccatattgtgatctaaaattataagcataaagcatcgatgcatcatttagcttactcagatgcgagaacaaattgtaagtcacattaatcccatctcaggtattaatgagtggtaatggatagatattaatgagtggtaatggatagagtgcaagtgaaacctgcatttggaggagctaagttaagtatcatatcatatagttggctaaggccctgagctatagtcaacaacaaagtttataaaatactaagagaataccaatctattgcaaaggatctaaaataaatacaccattagttccaactttaaatagaaaaaatatttacactaccaatgtgttgcaaaggatctggaaatatacagtttattccaaactttaaatgtaaagaactaat

SEQ ID NO: 35003 - DNA, 623 bp, Oryza sativa
ctttccggattccagacctattttcgaaaacggaatctggcggtcagaatttttttggaatttttcggaaaccaaaatgaattcggaaatattttctcgcaaatggaatcggaaattataagcgcagtttccatcggaactcggaatcggtcggaaactttccgaaaattttctcggaatttttggaaattgtctcggagttatcagaaattttgtgactgcaataccctggattctttttttaagcactaaatagcgaataccatagtgtttggctgttacctttttcaaaaatatttgttatgcaaatctaaaattacataagaatatttttttcctacattgggatttattaacaacattactcttttgaacatagataatttattcaattggatttatcagtttgagaggttttttattccgataaattttcgttaccgtattcgcgccggttcgttttagctccgttttttgtttcgataatattcgattctgttttcgtatccggtgtttccgattccgattctgattcccgaaaaaaaatatgaaaacaaaaacgataaagaggtttccgtccgtttccgtaccgttttcacccctactctctaccgtctttcaac

SEQ ID NO: 35004 - DNA, 583 bp, Oryza sativa
atgtgacgggcagatcaaatttgtcaccttgtggtttcaatgttaaaagaggtttacttgtaagatctttattatttccaatttgaattttgaatatttagttcccaaaagtgttaaaacagtatttaagaaccaaattcttcggatgcatcaaattgttaaagccctgacattctgaaagaggaaaatggcagtgcaaatcatgttgagtttccacacacaaaataacaggtatataaatgaagcatgtaccatataaaaatactttttactgcaatatcaaaaggtttctttcatcttgccaattgccatacctccaaagaaaaaataaatcacagtttcgaacagacaacaggtatcagtaaatcaaaggcgtgggacagacaactatgaactatcacatcccagataaataaacttattgcactgtgaaactaaataaactaatgaaagatgcattttatattgacacattgtgaaatcatttcagctggctcaccaatttttggttttcagttcagcaatttacaaatgcatcagtgtagaagcactgaaatattaaacttttccttacatttgaggg

SEQ ID NO: 35005 - DNA, 500 bp, Oryza sativa
cttagacaagttctacaacctgaatctgcattttgagagtttagggatctagataacacaacactacaagtttaaggatctcctatgcactttactctcttaggtcaattttcatctttccttgtcactcataataaaaatttgaaataattgacgggatatatatattaacatgagatatcgtcacagaactcttaatagggaacggcttatatattgatttatttaaatccggcagctatttatcttttcccgccttcgctaggtgagaaaatataatacagtcacctttgaacaatcataggtgccggttctatacaaaaccaacatcgatactattagtattttttaaaaaagacacatttaatatattataaatttataatatcggttaattaaaaaatctacagctataaacatattacacctataaaatctgagttgagctaggcgagctagccgggtgagattctgatttatccccacaccaagtcaacaga

SEQ ID NO: 35006 - DNA, 627 bp, Oryza sativa
aagcccccgttggccctttaaataaaacgaacccacaagaaaaaaaacacaaaagtacatatgttctattttgcaaaaaaaaaaggataaaattgagacgctgagcaacaatagtggccccaggtgacagaccagagcagcagcccaacgtctgacattaatcgcggggtcgcaggccgcagcacccaacaaaccacgaggacgcttgcctgaccctctcggggactcctaatgggcgcgtgtgcgctggctgtccagctcgcgcagccgcgcacctgttctactggttatgttgattagttttaatgatatttattaatgctaatgataattatagtattagttttttaaaaaaaatacataaacaaatctttcaactcggacttgaaaacattcaagtcaaagatttgaaaattttaatttaagatttttttaaaatttccaactcggatttaaaaatttttaagtcaagatttaaaaacttttaacttagattaaaaagctttcaattcggatttgaaactttcaattcatacttgaaaactttcaactcagatttgaaactttcaattcagattcaaaaacattcaacaaggatttgaaaactttcaactcaaatctaaaaac

SEQ ID NO: 35007 - DNA, 561 bp, Oryza sativa
agaaacccaataaaatagaacaaataaaatgccatgcataataaaatatgctaataaaaaaaagatacatacaatgggattgtgaaaattgacagaagaagtgtcaaccaaattctttttcacttcttgaacaatctacaaatatgaaattgagcaacccattaaacaatataaaattaaattaacacaagtcaacaaaaaaaaattcacataccattttcctgagcacaacagagaataaaccatcaatttcaccatgttcaggaccttcatcaacctaaaaaaaaagaaaaataatgtaataccaaattaaaggtaaacttaaacagcataatacaataataaaaatttaaaatataacttacatcattaccaacttcataatcaacatgtaaatcttcacctccatcagaatcaacttcaatgggatttttacccaaccttgatgtttggacacgaggcatctgaaaaaacaataaataaacatcaacttggacatgagttaaatgaacaaacaatacaaacttcactttacaacaaaaatcatacataaaaaacaca

SEQ ID NO: 35008 - DNA, 753 bp, Oryza sativa
aaatctatcttaattccggttgttgttaccaaccgggagtaaagatatctttactcccggttgttctcaccaaccgggagtaaagatattttcccgctatttccaaattcttttttaaacccggttagggttaagaaccgggactaaagataatagcactgaatattgaatttcgttgaatatgtgtttctaaaatagtaaataatgcattaaaaattctaattaacatatgtaaatcccacatgcatgatttaaaacttttaaaaattctaataatcatatatcattagcatatgcatgatattaaattgttaaaaattctaattaacatatgtaaatcccacatgcatgatttaaaattactaaaaattctaataatcatataaaattagcatatgcatgatattaaattgttaaaaattctaattaacatatgtaaatcccacatgcatgatttaaaacttttaaaaattctaataatcatatatcattagcatatgcatgatattaaattgttaaaaattctaattaacatatgtaaatcccacgtgcataatttaaaattactaaaaattctaataatcatataaaattagcatatgcatgatattaaattgttaaaaattctaataaacatatgtaaatcccacatgcatgatttaaaacttttaaaaattctaataatcatatttatttagcatatgcatgatattaaattggaaaaatgctaataacatatgtaaatccacatgc

SEQ ID NO: 35009 - DNA, 795 bp, Oryza sativa
ggtggcggccgctctccactagtggatcccctggctccatgatctttttatatcatgaatggaaaattaatctactcgaataattttacttatgctgacaaagttagtttacttcacttagcattcatgccatgtgcagtgacaggcttaaaagataggctacaatgctaaatttgacagcataatatgtttttctactaccttaaaagcgcaaccattctccttctgtcctcttcccactgtgcgcagtcgcctgctccttcatgtgtgcgtaaccaccgtagcatccagtattttatccttaatccatccacccagccaatcgcccaatcctcaattgtatgagcttggtacgttgcaaagcactggcatattactagtaaaaagaagaaataaaacagtaaaatccatatggccactacccaaaatgggttgatacatcaagtttgttgatactggcatctatcccgaaacgaactttaaacatgtgtaggtacattgatatttgaattttgaggtttatagttcagcattctttctgtaaaccaaactcccaatttgttgtttcacaacattgcaagtttcttatgcagtgccaaaatcttggctgcagattttttccccccatctttgaagttaggaacatttgaaatgaaaattttcctagttactatgtatatttgaatattcacaacccatgtaggactagcaatccagcattccagttacacttgtggcatcatggcagatacctatagcctaggtatcacaccattgaccactatgcacgagtga

SEQ ID NO: 35010 - DNA, 878 bp, Oryza sativa
ttaattatgtgccaaagataaccatgctagggctcttttaccatgtgactatttgtgaccgtttttagactcattgacaatttgacacatggcagagtaaatcaaccacctatttttatatttaatttaacaaattaggttcacatttattttagaacaactaggttcatattacctttatggaattaagatgcctgcactacatcagcacgataatatttggttttactattgcgtttcacagaattaaaatgacttccaagtttatacacacccccagctggtttatgagccactgtttagtattgtaacagagcaatatttctgcagtcgtaaattgaaatctttgattaaattagctaacaagtgtgcggacatcaacagctgaacagatttcagattgttcaaaggtgacctgcagtctattttacaaacaacactgacctgacaagtgacaatcaccctcatgtacaaaaaaaggaaaagaaaaagaaaacgacggcgcaatgtgcaatctattacgattagaaagagctgcggaaaagttacttcatgctgtggaaaatttgactcaggtagaagataaaactcccatttcaatcttgttattactcttcaagtttttggtgcttttgaaggaacacctttgatcttatatcagcctagcgaaggatgaaacgaaacgtcaaattagtacccaagatacaacgtgctgacaagatgaaacttgaggtatactatttacaaaattctacctggcgaatgggctcgggaatgcgataattactacagaacttcactatcccaatggctgagtcaagtgaaatgcgatgcccaactgagatgggggatccactagtggggattcggccgccccc

SEQ ID NO: 35011 - DNA, 775 bp, Oryza sativa
aagatgacgactcgatgaggcataggtggggaggagcacgtggacataatgagaataatcctacaatgatacaggttttagtgtagatgctacttaacaattcttattcacgggaaccgaaagattcaattcgtactttgtagggctggtgttgctgctgtctgcgtaggctactagtcttttatgtaccagtatctcaccgacgaaaaatgagagataacatactttttttctaacttttttttttctaaaacaagactatagtttaaattcaattgatttttaattagcaagtgcatatattgttatgtccatgcagcgtgagagctacacatgaaagaaggtccacgggaagaactagaattcggcattataaagggggtagcgcacgagacctaaaagtggatggatgcggagacaagaatttaaaaaggttcaggccctctcaatgagaggtaataccctactcctatttagggatttgaattcgtcgggttgtagtattgatctgacgatcggattgtgaatctctgcccatgccccttggagggggctccttgcccgccttatataggttggggggcagggttacaaaggaaaaacctagccggacacgttatcagtatcctaatctattactccctccatcccaaaatataagcatttttggaccctgacacggtcttcgagatgctactttgactaacaatatctatagaagtaagatgttttaaataaaaagagttgggggatccactagtggagttcggccgcc

SEQ ID NO: 35012 - DNA, 797 bp, Oryza sativa
  unsure (1)..(797): unsure at all n locations
tgtatcaatttactgatccagggcttgatacagttaaacatgtcggtttccgaatcattagttttgggacccgacaattacgtatataatatttgtgggaaaaagtatagttggtgaaccttcatcgagatagtttcttacattttagttgattagtttcttacgttttttctaaagtttgagtacatttgtatatgtatttccatatcaatgaagctcatttatcttcttcagtttgacagtaagaaaaaaatgctacgaaagtcgcatttacactagtcattgttttgtgaccacaaattcgtccatgcgttggtccacatcctccataaatggaaaatgaggaaatgattagtcttcaatatttgtaagttaaaaaaataagtagaaaaaagatgggactgcatagctgctatttgagagatctgcatgctctacgcgagcgaaacaactgggactacccaaaccacatctatttatagcaattgcataagaattcctcaacgagaaagttggccaacgatctccattttgcactgtgcatccatgcctgttttctaaccccaggcgatataaatagatgtcatccacatcctccataaacaaaacatgatgatgtgattaatttttattatataagttaacaaaaaaagtaaagaagatatgtgaatgcattgctactttttaagaggtctgcttgtcatgcgccagcgaaataactaggactaccaagtttgcatctatttataggaattgtattagtaaatggggatnccactagtgggagatcggccgcc

SEQ ID NO: 35013 - DNA, 763 bp, Oryza sativa
gggcggccgatccccactagtggatcccccttttgaagaaaaaaaatataggcatatcgttttcttgtttcaaaactaaacatttaagaaaatatttatagcaaaagctttaaaattttaatcaaatattatcataaacattaaatatttatacaaactagtcaactgcatccttgtttgaatcatttttttaaattcaatgtacgcatctaatagaataaaagatctcgagggtagaggactaaaaaataattttagaagatagagacgtgttatttatgcatacatggatggtttataccaaggaaaatatatagtttaaaccatatacacagtgaaaactgaaaactaccgttgtattaaaaaatagacgcatggtatttgtccacatcaccaagaattaaaaacaaatctcaagcatctatttttttaatccaatgatagttttcaagtatttactacattgcgatttacacttacatattttcccgaacaaatgtagtctattttggagatagagggagtaaaattaacactatctccgttttctaatagatgacgctgttgacttttttgaacacacatttgaccattcgtgttattattaaaaaaatttatgtaattacaatttattttgtcgtgagttgttttatcactaaagtactttaagcatgatttatatcttatgcagctacataaaatttctgaataaaacgaatgattaaacatgtattaaaaagccaacgacaccatctattaaaaa

SEQ ID NO: 35014 - DNA, 693 bp, Oryza sativa
gatgcgcgtcgttcgggaacacattccgccaccgatgtcgccgcctcccaaccaccagagccctggtgcccctcctccccctccttctcgtttgctcggctggaagagaggaggaagacgacgggaggaagaagaaggaaaggaaaaagaaaaagaaaggctgacaggtgggcccatgaacagtgcactttcatcttttctagatttaattcaaaacctaatctttagaaacccatatctcctaaaccatagatccaattccgatgaaacttagacctaaattcatctaaattcaaaatctaccttttggtaccaaatttactattctaatattttatttgaattttcttaatttattcaaatactatttgaataaatatttgatttaaacctatatttgcttttcaaatattttattttatcccaattacccttttagccactaaaaagccgccggttggaactttgcgccttccatggggacgttcacggttttctatccccgacgtcgaaccgttggttgtaaagcccggcataaaccaaacccaaggtcgaagtgctgctcctggcaccccacgcctcgatgcgtatagcggtcggagcttcactattccatcgacctccacagcacgccgcacagttagctctcgggctctgtgtaatcctagccgctccgtcgccactcacggttat

SEQ ID NO: 35015 - DNA, 877 bp, Oryza sativa
gattcaactctcaatttagtttaagcaaaggaaaatatgtaacatgggatgtaaatgatattataaacaacataaaagcatgatcacaaaactgttgtccagcaattccacatttcaaaacacaagctcagataagaaccgtattctaatttctaagcaaccggattactactatacaagatgatcccaaaatttcacatcaacaacatgatatattgtcttaaaaaataaagcacctgggaggcagtggctggaactgacggcgagtcaaggacgtcggtcgttggcaagcacggcgcgggccaactctcctcgaactcagccggccgcagcctggcctcgaaagaaattcagtataatgcggacattgtttctcccgtaaggcttgcctatcagcatagctccagtgagccggatgatgtttctgaagatctgaagaaatgtagattaatacacaactagattatctgcagtgtatgtagcttggacactatgactacataaggagtgttgtcaaacacggttctccaccagaagaagcagagacaaatctgatgagctaatggaatgtggtgaaccccataaggacttaaaaagaagttgcatcctcaaatgcgatgtgcttagcaaccaacaccgggtcccctgacttatcggtgaaagcacaaaccaaaagatagcaccaagtatcctggatagaagagaaaatcaaaagaggatgcagaggaaagtgtctggatgattgggttgaggactcacattggcgtcgttggactggtagatggtgacctcctcctacggcggcgctgtcagatcgagatggatgaggaacgcgccagcgccatcagggggatccactagtggggagcggccgccc

SEQ ID NO: 35016 - DNA, 600 bp, Oryza sativa
  unsure (1)..(600): unsure at all n locations
actagtggnatcccccatatcagatacttatagttttattatttgtttccaggcagaagtcaactaccttgggcaacttagccatccaaatctagtcgaactgattgggtattgctgtgaaggctctcatagactgcttgtttacgagtacatggcttgcggcagccttgatttttttttttttcgccgtaagctgaccctttccttcttgacagttatcactcccacctactgaatggccgttgtccatggcagcagaacctgcaacatgtttattgtttttgcattttcaaaagtaaaaaggaaaatggtcagtttggtgcacgctgcatgaacaaaaacactaatttattttcaacaagatgagcagatctatcagtagaattaatataaatgcattcacacttatatttctttcagtgctcgatttactggtgcaatttaatctaatgagtagtgaccactatatacaatttagttgtatctgtgtacccgttccctccatgtaattttcaaaaataaaggattttcttttgaaacgataatggttagcatatgttttgaagttctcccaagtcccaactagctactccctccgtt

SEQ ID NO: 35017 - DNA, 664 bp, Oryza sativa
gcggccgaaaaccactagtggatcccccaaattttagtacatatatattgtccaaatcaatgtagcccatttctcccttttagcttgtcataaatattgtttacagttgtttttttaaaaattttgtggaacaaattgttgaatcgatcacaccgtgacatgaaactataagtataaagaatcatttctttttttagcttattcagatgctaaaacaaaatgtaagtcacattaactaatcatatcttctggacccccgtttttataacaggaatcattcgtgtaaacagtaccatttccctggatcaagtagtctggtacacacgagttcatagctgaaataccaaaagcacatacacgagagtctagtgctaattattacatcataagcccgcaggcattgtcttaaatcatcggaccgagcagttcggaatacatccaaaatgcagaaatagataaggcagcggaattcaggcgcagcggcatgccattgccacaggcaacgaccgtactaagacctactgagcgccatcgtcttcatctccctcctggtagtaggcatagggatcctccaaagctttatctcctgcttctgattaattttatatttgcaagggtgagtaccaaccgtactcagcaagccaccacaacaacaatgcatatg

SEQ ID NO: 35018 - DNA, 739 bp, Oryza sativa
gatatttctcatgctaatgaaaaatacattatgagagagcatagatttttggttgtgtaatgtattgacctatactagtgttggagctcacttgtcattgagatttacaatccattctttgtcgtatgggcggtttttaaatattatctctgtttttcaatatgtaacgccattaatttttttataaatgtttgatcattcatgttattacaaaaatgcaaatataaaaaagttatgcttaaagagcatttgatgataaatcaagtcacaataaattaaatgatggacaaatgatcaaacatatctcaataaatcaacggtgtcatatattaagaaaaaacggatggagtaactcagaaagttcagagaacggaatgcatcttgcattatataggtgccaaaaaaaccctaagatggagccggtcaagactcaagagatggagaaaattttcaattcttttgacaaatgacaagtacaggggctacgaccaatttagggagggaatgtctgtgcgaacagtacaataactaggatgtttcatgacttctcgaacaagtatgtacacaagggaaggtggacattagagcaattttaatagtatagcccattactaactttaaatcatctatagccaatataatagccaattcatacaataattgcttactatactattaatacctggtcccacctatcatacacacattatgtcttgaaacatgtgctgcagctggctac

SEQ ID NO: 35019 - DNA, 1664 bp, Oryza sativa
aggaaaaagctggcgtttggtgtgggagtcgccgctgaagactgcaacgttttcttgttcatcacttctgttttttctttgtttcggttggcaatggcttatttggctgcttgctcgcacattgacaaagggtttgtttgggagctggatttctcagctccttacttctaatttattttctaaattctacaaccacagctttttataatccgaacagaaaaatgactatttggaaaagatgtatcagctagaagcttctccaaacaaactcaaagactatttggaaacaacgcttctccaaacaaattcaaagactatttggaaaccgttgtttctgcttatatgtaacatttatggctaaataggatgtaaatcttagtgacttaagttatacatcaacttaaatcaccacactactattgtttttccctacttgagtgatattctctttattttttaatatatgatgtcgttaacttttagagatatgtttaactaaattttgtacaaacatgacaataataagtaatgtttaaagaacttttaatggtaatcaaatcacaataaaataaatgataattatatattgtgcaaacatatataattaaaagaaatggtgcaaacatataaaaaatcaacggcattatatattaaaaatgaagatagcatttatttggatttaaaattgtctggagcgaaaaataactattttacttagggtgaagacaatagacctccagcaaagctcaatgacgaaaaaaaatatatatgactttttattaaaaagaaagtacctttaaaaacgtgataatctcttgggttatacaataattttcataaccaaaccatgcaggctgccaagaatgttgagaaagttgtctgatttttcttttaccagccaagttgtcttcctttttttagataatggattatattaacccggcctctacaccttagaaggtgtacacaacccaaaccacaatcaagagtacataagactcaacccattacatggggataccaaatacatggggataccaaataatagtttaacaaaacggttaaagaagaacaatagtctaagcctcaattctggtgtgtttagttcacgccaaagttaaaagtttggttgaaattagaacgatgtaacgaaaaagttaaaagtttttgtgtgtaggaaagttttgatgtgatagaaaaattggaagtttgaaaaaaaaagtttggaactaaacaagggcctagtgtagttgtatgctatatgtagatcctttgcagtactgtacgtgcagtattgctaactgacatgtcagtctaagaatctgtgagacccatgtgtcagcgagcggtactgtatgtacgtatacgtacggtactgacatgtcagtctaagaatctgtgagacccatgtgtcagcgagcggtactgtatgtacgtatacgtacggtacttcagaggaccctctctctcagttcagagctgtatgatgaaaaactctttgtccatctagcagcacatcggcaagttgttcttttttttttctaaagcacatcggcaagtttggctctccattttcactatttttgccagtgacacatcgatctgcacacctttaatgccgaattaatcacaacattttcactctggaagggggatccactagt

SEQ ID NO: 35020 - DNA, 1044 bp, Oryza sativa
cgccgccccttcctaagctagttcgggttcttcctccccccgcgccgcgctcgcctgccgctgccgccgctttcacttgttctgcccgcccttttggtgcagtgagcagtcctgcttcgccccgccctttcccgggtccgccccttcctaagctagttcgggttcttcctccccccgcgccgcgctcgcccgccgacgccgccgcttcgcttgttctgcccgcccttttggtgcagtgagcagtcccgcctcgccccgccccgccgccaccctcgtctcccgcgtcgctccgtcaaccagcctacgcccctgcacagagaagtgagagaaagaagggagagaagaggggaaagagataaggtgttgatgtggacaccctgaccatgtgaggccagcgtgggtcccacactgactcagccgccacgtcagataaaaccagggtcaaaaccaccgaaggacctaaagtgaacagttttgtaagttgagggatgtcatatatctggttttgcggttgggggacgattttgtaactcgatgacaagttgagggaccttcggtgtactttttccacaccgttatgccgttccagcccaacacgtctgtcataggttcatccaaaattccacaaatcatgctcacagcatcatactttttccacaccgttatgccgttccagcccaacacgtctgtcataggttcatccaaaattccacaaatcatgctcacagcatcataaacacatgacatccaaaattccacaaatcatgctcacagcatcatgatagattcagaaacacaagaagttttccttgagagagatgagagtgaaatatctatggctgcgttcggtagaagtagttcccaacccatctctctcgttttccgtgcgcacgcttttcaaactgctaaacggtgtgttttttaaaaaaagtttctatacgaaagttgctttaaaaattcatattaatccatttttcaaaaaaaattagcaaatactcaattaatcatgcaataatagatacttcgttttgcgtgccggggagg

SEQ ID NO: 35021 - DNA, 651 bp, Oryza sativa
tcaagtacttatggagttattgtacagtacttgaactaaaacttttgaaatatttctgaacttagctgcttttgttttcctttggtttagatactctacttttgttaagggcattgcagtatacaatgagatagttaaggggtatttttacaaaaaatccaggctgtgtgcgggcggctttatgcaaatgtgcatcaaataggtgtgatagggtgacctcgaactatcctggccgttgggatccaagagaatggtggagattgaaatttccaaattttcaacagttggactgttttcacctgatatgtactcatttctagagaagcttctaggatcttaacacagattgactggaaatatgtccaagcgcagttgctgattctcgtgggcaattttcttactacataatcctgattccaagctggctagctacttgatactagttcctcgcttccttttaataaggtactctcttttgttcattttttcaatcacaattttgttgatctttttatatgtttaatgacatattactgcatgctagttgtactatctattttcttaccattaaaacatgataaatagaagcatatcattcactctcaactactaaccatcatcttataagagcaggtactctaacaggctata

SEQ ID NO: 35022 - DNA, 1138 bp, Oryza sativa
tggtggagattgaaatttccaaattttcaacagttggactgttttcacctgatatgtactcatttctagagaagcttctaggatcttaacacagattgactggaaatatgtccaagcgcagttgctgattctcgtgggcaattttcttactacataatcctgattccaagctggctagctacttgatactagttcctcgcttccttttaataaggtactctcttttgttcattttttcaatcacaattttgttgatctttttatatgtttaatgacatattactgcatgctagttgtactatctattttcttaccattaaaacatgataaatagaagcatatcattcactctcaactactaaccatcatcttataagagcaggtactctaacaggctataaaccagctttaaatatattttaaaaagataaacgaggagagagaacagcagcgggctatagatttatagccagctgtagcacggactccaagacacggggtgtatattacaggtgggagcaggtattaatagtgtactagtatgtaactattgtatgaataagctattagattggctacagatgaattagagctagtagctgactatactattaaacttgctctaatcggctaaaaaggaagaaaaaaatatacatcgttttcaacacaataaatccagtgatgacctatgctctggccatttaatctagatgtactaatagtggtactactgatgtttcagccctattgattgcggagagcaaacggagttgtctgcatatgaaggaagaacgttgcaaagtagtaccaactaacttacctttctgatgggcctcataaatcatcgtcattaacttacctttctgatgggtcactcttatatcagtattattccaatactctgcataattgcaactggtcacagaattcacagtgtttggtccttgtgctttttatctgaagaaaggaagatgcatatagtacctccttgatgctgactcgtggtacagaaaaacatcgctttagctgctgtttatttattaggtccttcgattatgagacgtataaatgaaacattgtgcttattacacagtgcaaatgtagattactgttggtggctggctgctacccttcgccg

SEQ ID NO: 35023 - DNA, 1496 bp, Oryza sativa
aaaaaacatgaaagtggtaccaaatggactaattaacagtcctaatgacatattatagcgggtatgccgattgggtggtaaaaaagttgaggcacgtgaatttgatggtgaatagtctaaattctcactaaatcgttggtattttgaatagtagtttggctagtgtttagtttgctatcaaaatataccaataagacacataaattgctaaaatatttggcactatcaaatttacctatggtttggcattattaatattttggcatggtagcaaacaaaacaagtcctatgtctttggctgattgattagccgtgtatggctgactgattgattactagggtgtcctcgatgatcaccgtgcttaagctgctgtagcctgtagcagagggcgatcattgtcgctagtcagttcgtcatcagaaacgcggaggggagaatggacggacagcgttggatgcctcccctgggaggcaattaggcaaaagcttggcgtctcacgcgatgtttccgcgcacgctagcgtcttccggattggagtttgggctctcctgatttgttgttcttgttgtttttctttgatcaggtgtatttgagacgcctggtttacggcagagaggattgcttcaggaagcaaacccgggctgctgcctcacgccattgctttgcttcaagagggcgtatggtatctacgtagataaatcataaatggttgtatttatctcgtcgtaattaatgggtgaaattggaatctctacttgtttaggtacttcagctaaaagatggaaaaaattctttcgtaaaaaaaaatgatttacagaaatgcacagtacagcgtgtgttctagctacctgctttgagcctgaggcccccgttgttcggcttattgatggaataagacaaacggcatatttataaatgaaagataatttgtgaatagaaattttacatacgtgttcttagcgatttaaaattaaagactgaaaaataaacttcgataaaaaaaactcaaaattaacatcaaatttaaagttaaaaatttaaaaattagttgataagcataagcattagcgaagaaatgaggctgttaatcttacccccgcgtgcaggggagggacgttgtatggtcttgagctaggcatgctgaaaacgccagaaatcgagcttagctcctcatgatcatctgaaattgagctcgtgcagtgagggccacccatgtgcatgagagaagggtcgcgcatcccatcacctcccttcagagttgaaaatttcggtttatttccctttaaaaaaattcggttcaaaatattacaataagcaatcaaatatttatcaaatttgaatagcttgactatattaaaaaataaagaaaatctatgtaaatttcggacgaaatagtgtcagccgagagaaactccccgaaatgttgaaattggactacactgtggtgcaattgtaagtactagttttttcttttaaggaaagagtatttgaggtg

SEQ ID NO: 35024 - DNA, 639 bp, Oryza sativa
accagagagagtaaccaagtattcaaatcgcattagatgccttctcttctgcgaattcagaaacagctatctcatcttataagttcagatttcagaatgaactccaggataattgagccaccagcgaatcctcggcccctccaagcaacaatcgcccagcttcattccccctgctccagctttggggagcaggggagacagggcgggacactggaacagaaaatgaaattgcattagtccatgctgagcaaaagatgaacaaggaacgtcctcttggtgtcctagaacccctggcagggccatgaatgctcacatggaagaatcgcccatttttcgcttgcgattgcgtggcagaataactcacggtctctgaatgcacaaggtgaaaatggttccatgtgtttctggtatcccagtaggccagtatacttctgatcaatgctttgtgtggagatctctggtttctataaaccccaggatgatgatggctcttgtgagttgtgaccaccaatttgtccaatggttgtccttgctcccagctgcacatgaagagcatgagaaagtagtcaattagttgagaacccagtactgtagtactacgaataattgagctctgtgcgatacttccaagttccagca

SEQ ID NO: 35025 - DNA, 765 bp, Oryza sativa
tgcaccccaagcccagcctaaaaccattttgagggttttgaatagagggggaggtgtgaatccaattccacaataatccaaccattccatagtgtccaggtgatatgaatattcccaaagtctagagttgtaaaaccacctaatgttgcctaattaaccagcgaagcatctacctaaaatcatactagtggtaccatgagtagagtgtccactagttggggttttgtttattctagggtgaacaaggtaataataacaatagcaatactaataaggtcataacaaaggtaaataggcatggctaaataaaacattgataacgcgggaatttaaataaagcgataatgtaaaaatttaaatcaaaataattttgtaaactgggattcaatatgttccaggatgatgtgacttgtcttgctcgctttcccaaacgtcggcttcaacctccacgaagagcggatcttccgaagctgcggcgtctacacaaccaacggaaaagaaaaggcttttactctaataaactccatataacaagcaggaacaaagcacaaaattgggttcttgacttcttaaggaaaaattagagacttgaacggtccaattccgaattcaaatggccaagttatggccatttgaagtttatatgctctttaaatgaatatttgcaaatttcttcatttaaattttaattttaaaaagggtttattgcgccagccgagggggaggggcgcgcggaccgggtccacgggagtagggcccacgcgg

SEQ ID NO: 35026 - DNA, 611 bp, Oryza sativa
tctagaggatccccgtcgtcaatgagataacgctaaaaaatgactgagccaacatggtggactatatcaaggactgcttatttgcccgtcaagacaaggacttcattatgtgtgcctacaatcaacagtaagcgtgtaccatacttatactcaaatgcgtgatgcgtacaactgtagtttgtaactggcaatttattaatttcgcaggcgtcattggattcttctggtaataatgccgaagtggagtttggtacactaccttaactccaatatcaatccaaaaatatacgattggtcggccatcaaatctgccttgaacgaggcatgggaccaatacgtggcaagtggcgggaggcataaggatgggcatccgaaactcggtcacacaaaagacttcccaatacgtcaacaagttggcgaccagtgcgggttccatgtctgccataacatgaggagcttcgcagacaaggtgacattgctcgaccctgaggtgtgtccttcaattgtttatacacacataggacgacaattttacaagtatgtagactaacttggcgccgaacatgcaggaaaaaatttcaacgattccggaaatcaacttcgatatcatt

SEQ ID NO: 35027 - DNA, 553 bp, Oryza sativa
atgtcactgaggcacatagatcgaatatggttaaatcagatatgattggctgaaactccgatactaccctaatcagcaaccagaggataggctagagattgatattctaagcacgacttaatagatcaaactcaactgatgcatcattaagtatgaaaagaagaacaatatctagacaatcaagccgctggatgtttcataaagtggtaaatatcttatataatctaggacaacgtcgctatttaacctaatcggctgccttctattaatagatgttagccgattgtaggttagatgacgatattgccaaagattatgtaagatatatgataactcgacgaattatataggcaagattagagtgtcataaagatggaagcactaatcttgagaacacaagtcgtcataacaagttttacctcttgttgaagatcgaaactgatgcagctcaacccgcaagcaagaactcgttgaaacaaaactaaagcgaaagggtggcgatgcgccgaaattgtattgaacgtgtgtgttaaaaattacatagggctcgggg

SEQ ID NO: 35028 - DNA, 1047 bp, Oryza sativa
tgccgcggcacaggaggagcgtgagcgactagggtgcatcgtcagccggcacttcgagccacctatgcacggccattgcgacgcctgccgatgccgccgaacgaccgcgccgtgtagcctcgcccacggcgacgacgacggtggagagccgacgacgacgtcggccacggcgcgcggctgctccacccgtagcctccgctccgccgccgggctcgcccatcgtccgctccgcccacagcccgccaccgttctgctgccgcgctcggccatcgcggctgcacccgccgccagcctgaaggagaagagagaggagagaagagaaaagagaagagaaggagaagaaaagagaagaaaaaaaaaatatgtgtagctggcatgtgggccccacgtacctttttattttttttgctgactaggatgccacgtcagcaaaaccgggcaaaaaataccgccgagggacctccggtgaacggtttgattaagtttaggggtagacatttctggctttatggttaagggaactcaaaaaatctcgctgttaagttgagggacctccggtgaacttattccaaaataaaaaggctgaataagttcactttaggtccctctatttgatggtgaatccgaaattcgtccccttaccgaaacaccagaaatatcccatccctcaactcacaataccatgtcaactttagtctctcagcattatagtggctggttttggctgacgtgatgagtgtgctgttggtatttcttaacgtcaattctccttcacattagtctgtaattcctcccaacttctggacgctcgtggaatatgctagaaatgaatcatatcactatgttagatgtttcattatttgagttttatgtagatattggcggtacaaatttggctcttaacagccgccaacatgagccccacgtgggaccacctgtcagcgtctccctcctccccctcttccctccccctcccaagatatatttctctatttgccacttttacaaagtgacaattaatgatttgttactagacccatatgttat

SEQ ID NO: 35029 - DNA, 634 bp, Oryza sativa
atgttgtcttcggtcttttagagtacagtctccattttactcacactggagatggtcttaagagatatgcatacatcatagtattagtaaggtgaattcggattaggtgcagttgcagtaggtaccataatgtacttaaaaatttggtgtaaaatttggtacctcttggtactcctcataatacctaagtacccagaggtaccaaatttacaatagaaaaaatggtacctcctcaaggaccataaaattgctcataaaagaatgttgtcaggtcatttttaacaactgtcagtcgtttgtgaatgtgttctgaaaatgtttgggggataactagaatgaaaatcaattttgagttactcgacagaactttgcagtagatagatgccacccaattatggtcataatgtgttcactaaaaatgtgcaactctcttgcctatgtgctaaaaaattatggtcacatgacatcgcgccaaaaggtttggttatattgctcaataccaaacagccttgaagagataatttttctcgtacattttgagagaaagtaatgtaatgcttctgaggcattccaataaattcttgaatcatgtgccaccaagaattttgttttaaggctaaccgactgtctgaat

SEQ ID NO: 35030 - DNA, 690 bp, Oryza sativa
ctcggtacccggtcgcttgatcgggcgcccgcacgatctccactccgcgtaaccgaaccggataagtcgcgcgtaacttatccggacttcacgccgttttcacgcaccggatttttcggaatgtttccaaaacaaaacaaatccgaattttcctgtagcaaaacaaaactgcaaaaggaagctgcatctgcgcaagggtgaggagccaattttgcggatcattcgacgtgtacgtcgtgcacgcgcgccgccagccctgccctgctaggccaggcgaggcgagtgagcgcgcgcgcgtgttttcccccttctctccaccacacatgcttcaagtggctaggagggcatctcccttttaaggaggtccccctctcctagaataagtaaggtggtactaaacttcacatgcatgccatcccatgtggtgggcttttgtgattttccaaagagttaatcttcgaatgggccttagcccatttattaattccaacaatcccccaccaaatctcaaaatcccactgagatttgccttttccaatgtactgtttatataccagcggtttgatggagaccgattaaggttgaacatccacctagaactccaagctacacttactcacaacttgaacaatggactacgccttgaattgcaagtcttgtgcaagcaagtttcactcagagtcttatctg

SEQ ID NO: 35031 - DNA, 787 bp, Oryza sativa
ctcggtaccctagttaataggagaacataaatcagaagaggtattttttttcttatcaatcctaattaacttccaggttccagttgaatgtttgccattatacaaacattaatataggccacctttataacacatagtgacaaggctgagccaaacaatattgtgttccaggagtgaaaaataatggtatagcaacctataacttagaaaattcataattttttcatactaatacggatgaagaaaaaaaatcaatgctgtagctctctatgcacgagagatgtacaactttcatataggtgaaaccttttccattttatttagatgcccaaatattcgtcaataagttttggaaaagaagggtcaaattaaagcatctatcttattggtgagatggtaaagagcctttgcatgacagatagaggtcgcctgttttactccatttgtccgcatgcacacatatatatttgtatgaaaaaccatgtcatactacttggccttatattttgggggttgcaaaattcaaacgtaattaagatcctactatcaaaatggccagtttctatataactccttttatactccccaaatatctttgccacttaatttgttaccactagttaaaaaactgtcgctggtgccaattatgaaccggcaatgatagtgttttctatagtatcgattataagaatttctctataatttcatggtagaaagtccaactgcaaactgctggatcaactgagtagccaatactctttaccatgataaatgggaacatatccta

SEQ ID NO: 35032 - DNA, 734 bp, Oryza sativa
ttatagaacgcgtcgttgcaacaaatcactcacatattttggaaatcctctattaaggaaatttatttctttttttccaccaaaaatatttcacctaatgtttcactatatatagatctaatgttgcagtgaactaaaacattccattgcaacaaaaaaacccacatattttggaaacccctttattaagggaattcgtttcattttttgttccaccgaaaaatgtttcacctagtgtacttataatgttttattatgtatgaatcaaatgttgcagtgaactgaaacatttttccgctatttgctgaaacattgtttttatataaggtgaaacaacacccgatttaaacgagtgaaacattttcgatctacttagtacaacaattccaatatacctggtggaacatcgtgtaacatttaaaaataattcaataattaggtaaaaaaaatttcgtcggaatatatccatgtgtggtcttgttttgaagatttaattgcaacgaatttaatgatgtaatcggatcataatttaaataagtaatttaagagaaaaatcagtttaaaataaatttacacgtaaatcagacgtcagcgtccgatttcacccctgctgatcgggcgccgacagggagtcgtgtccctgttattcgtacagttaaggcctagtataaaaaatcactgtgctcaaatcttttggctttgtgtcatgaatatcagtcatgcatgacaccgta

SEQ ID NO: 35033 - DNA, 3475 bp, Oryza sativa
gcgtgcaataggtccgcctgcgaaaatagcttcttgcgctaaaagaaaaaggcagccaccgccgtttccggcggtagcttcccgttcccattccagttcccactcattccctatccaatcgagtgaatccaaattcaattcatccagttcatccaaaaatcaccgaataaattcatccagttcatccaaaatcaccgaatcaattctagcaaagaaagcaaataaaaacattcctaaaatcacggccgcggcccgccgtcatccacgccgctgccgcacggctgcgcctcgcccccctccgaccagatctgggagggaggggccgggagccgccgttgccccctcaatccccctcgccgccgtggccgggagccacgccgcctcgaccctcctcgctgttgccgccctctgccgccgccgtcgggaacacacgccgccaccgccgggagccgccgccgcctccggcctgcggtcggggagaggagaggggaggggagggccggaggggacaggaggggaggtgaggggaggggagaggccggtgaggaggtgtgagaggagaggggaggggagagaccggtggggaggggaggagaggtgtgagagttagaaaaaatgtagcgcccgcaagtctatttatattcaagtctattttcgcaggtggacagtaaattttacccgatttatatttttgtaggcagtcatttggctctaagggtcatgcccacctacgaaaataaaacccccacatcagggaaaaaatgctttttctaatagtgagatttgttatgttcagatttgttgtactagattgtatgaaatccaattctaagttaattccacttaaattcatgcaaaactttttcagtgaaataggcgcaaaaccagtctgttgtgcaatatggtttgtttacgtgccacgagaggaggtaggagagctacgtccaaggttaggccctgttcagtttgtgaaaaaaaaatttaggtattacatcggatgtttgaccggatgtcggaacgggtttttgacacgaatgaaaaaactaatttcataactcgcctggaaaccacgagacgaatcttttgagcctaattaatccgtcattagtacatgtgggttactgtagcacttatggctaatcagggactaattaggctcaaaagattcgtctcgagatttgtacaattagtttttatttttatctatatttaatacttaatgtatgtatctaaagattcgatgtgatgtttttgggaaaaaattttggataactagacggggcctatttacacgtaggtatatatataccattttttctcttcttcttttttctttttctttgaccaaaaccctatcaatgtaacgtccgtcgaatttgatcggtcgtccgaaaaaaatatggtttgtttacttttgatggtttgtgacgaagccaactttaattacctgcaaatctgggaaggcttcaattcatgatttcgtcgccagcatgcccatgccttgcaccgatcaggcataaacttgggacgttgccggcagggaaaatttcaggtacgtgtcattcagtacattaatgcactcgctttcctgtttgagaggcagttgcagccctgatttctcattttcctaaaaatctggttatgcatgcatcatctacctgttatataattgtagaaaaatataaatataaattttttaaagctcttttatcgtaatttatttttcaatatcggttttcaaaccgcttatttctagctgttatttattttttttccaagactaactaacgttccgtgctttgcaacgaatattacaagagatttaaggcaaaagcaaaacttataaacttatagcatagttagttaactagcatggtggtccgcgcaatctgcgcggatagcatcattatattttctctcgtataatagcatatatgttttctcaatgtgttattcaaatatattaaaatggcaacatattttaaattttgtactaattttacgaaactactaatttgtaatattcatattgtatttttatatacgtgttagttattaactttttaatatcaaattttagttatttttaaattatattcctatatgtactctagactcatcttttaatatttctttttttaattctgaattttctgtaaattatatttctatatagactctatgctcttctttcaatattatttatttttatttctgaatttttattatttctaattgtatttctatgtggactctaaacttatctttcaatatttttaaatttttaatttcgaatttcagttacttctaaattgtattcctatatttgtattcctatattgaccttaaactcttcttcccatgtttatcttaatttcgaattttagttatttgtaaattgtatttttacacggactctaaactctactttttaattttattatgtttattccaaattttagttagttttaaattcctatatggactctatactctacttctaatattccttactttttaattcctaatttctattttttttcttaattgtatttctatatggactctatacttacttctaatattccttatttttaattccaaatttctattatttcctaattgtatttctatatggactctagtctcctcttctaatattccttattttttattccgaatttcagttatttcctaattgtatttctatatggactctggtctcctcttccaatattccttattttttaatttcgaatttcagttatttcctaactgtatttctatatggactctagtctcctcttcttatattccttaatttttaattctgaattccagttatttcctaattgtatttctatatggactctagtctcctcttctaatatttcttatttttttaattccgaatttcagctatttctaaattgtatttctatatggactctgccttttctttttctccgattaatgtgagaatttctaagccatgagagcgaacgtggaggctcccttttctattactttaataatataatagattaggcatataatacatccaaagaaaaacattaatgtgtgcatgagtacttcatgactttggatgcaaacccagacatcaccactaacatcgtcatttaaagtagtgtgtgtgtctatatatatatatatatatatcatacaccgtttaattattattctatgataaaatttaaactacagacttaaatttatttagaaaatgatggagtacatctctgtacattaacctctgctttctgcgacacgccgacacctcctgtctataaatacccaaaccaacagccaaattaagcagcagccagcagccaactgcatcgatatcgatcgatcactcgaccgaccatctcacaagcaaagcaaaagctcgtggcaacaatggcgaagtgggcggcgatcatggcggtgctgctgctggcggcggcgtgggcgc

SEQ ID NO: 35034 - DNA, 1263 bp, Oryza sativa
aaaaagccgttaatttatgtattgtttgtttcagcttaaaattattgtaatctagattgttaagtcaaattactataacctggattataataagccctggattataataagccgacctagaatactccctcgggttctatataattgacgttttggacaaggttgaggttaaacttttataattttgaccatcaataattttaaaaatatttagtttagagaaactataaaaacatatatagatttatctttcaaaacactataataaaagtaaacatacatttatttattgtatatattataatagaaaaataaggtcaaacgtatatcttgtaaagcgtgttattgtccaaagcgtcaattaaaataaaaccggaggaagtaagttgttactgtttgtttgtctagattattagctgtttgttaggtgttagtcacccaataaactagaaaaagcacctatagagtggattactatagtaatctagcttaatagaaatttgggttgaaaaaaaattaaaaaaatttaaattttaaaatttttttaaaaaataaactatttattttaatttacttctaataatttagattataataatcctaagttgaaacaaactcgttgtttgtcatgtagaatcagagagcgagaataattaatctcagacagcgcgcattggggccatgctcatctgtcttccgtctgatcataacgatatgctcatatgcatggtaatcaagcgttgcatccaaatatgccaagtaggatgaaccgctgttacgtgcacgcatctgctactacggttgcgtgcttcgattcgatctactgtgtcctccgtccgggagctgctagccagcggcgagcacttctcctttccctttagtaactatctatattagttaatatacttaacactaataatagtaattagtatagattctagagagtttttgatattcttttactaacatattgaaaatttttttaagttttaaatttttggatatttgaacactttcgatttaagttttaaattttaaagactttcaactcagatttgaaaactttcaacttgagatttgaaaacattcaactcatattcgaaaactttcatctcgataatcgagattcgaaaactttcaagttctgatttgaaaaatttgaaaactttcaatttgagatttgaaaattttcaactcgatatttgaaaactttcaactcgagattcgaaaattttcaagtcgagatttgaaaaaaattgaaaa

SEQ ID NO: 35035 - DNA, 513 bp, Oryza sativa
tgttacaatttaaatgttatgttgttgttttgtttgcacagatatattctcaattagtcactcctataaataactgacacggttgactatcactattttgactttgatcaataattacttctaaatatcccgacgaaaataattatttttaaatattcagatcaggatgaacaaaagtatggcgcttatatttaggatgcaagtatgtttttttttagtatatgtatttttaaaaacgagtggtgaaagttccaaaataaatattgaccattgtcggtcatttcaaaatggagggagcatagattgggagaaatcgttgagacaggaatgtgtataatatttatttgaaaccatgtggttttttttctaaacacggccggtacaaatgcagacactcacacgctcgcatacttatgctagatgaacacatatgtatatatcctatccctacaaacactcagactgatataatattctcattaatactagcaaaatgcacatgctttgctatgg

SEQ ID NO: 35036 - DNA, 692 bp, Oryza sativa
aatcaaatttatttaagtttgattaagcttataaagatatataatagtatttttaatataaaacaaatatattatcaaaatatattcaatgttagatttaacgaaactaatttgatattttagatgttactaattttttttttaaattttgttaaacttaaccaagtttgattagttaagccacgtcattaagaaattgttagccattggattaaatcctaattatataattgtagccgtttgatcatccaattcacagcaaatcagcaatgttggaacgtacgcaagcaccaagcagtacctgggcccagcttcttcgttgagccatattgcgcagcccatcagagagagacaaggcctcaaccttatccatgaacgcggccgatagctcgctgctcgctgcccctcccacgcctccctcgcgcggacagtataggtgagcatttttttccatagctcaattttgatcgctggataggccaatggagggggaaacaaaacccaagtttttggttttttcagcatctgtctaggactcttcctatgctacagttgacaacaactccgtttttcagatggtgtgttgatgggaattgttcgcttctgctaaacatccaattattttttacccccatttttgccattaaacttctttgtgtggctgatgccatggacgcttgttctcccttatc

SEQ ID NO: 35037 - DNA, 597 bp, Oryza sativa
attattgatggcccatttgattgcatctgtggagaactgaagatatccagctgaatttcttgtggacataacaatcaaaagcatgagaggaatcgaacaaagattgaatttgtgtttttgagaagcctacttaggtcagccacatcactccgacggatcacattggctttccatggtatgattatgagtcctgacaatggggagccattccagaacttcctggttgaactatccagcctgatgaaattcaaggaaatttaccgcgctgagagatccgcattcagaccaaactgggagtaagcgtgatcattcagaaacagcgtgctacagatcaacaccaaaattcctaaattgcatgtccttgccaaaattgtaatagacaatgtgtaatgcttgtattatatttttctgccttctaatatattcgacaatactcttgccgctttcatataaaaaaaccaccaaaattccgaataactgaaggcatggtctatcgtgttgcatgcataccagcaattattcctgaaccgctgagagcatgccgtactgtgttgcagatcgatagcagtattgcgagcgcaaaataaaggccgtaaa

SEQ ID NO: 35038 - DNA, 650 bp, Oryza sativa
ctgtgtctggacaaatagccatacaattgaagggaataatgtggtcaaacctcatcatatagatactggaaagagtatttatacaattttgcttcctcagctatgtaatcaggaccatcctacaaaatcagatgaactctgtgttaaaatggaaaaatctgacaagtatcacatagatcacatggaacagaagaacataaaacaactagtttccatatccatggatcactgataggaaggaattgttgcctaatcctatactacagtaactcaagaagtatttttctcatacaccaagagaaactcatgacatcttatcggatagcctataagcttgtcagcttacatataatataaccagcagctaaatggctatctaattatctatagccattgtattttataccctgcatatttcaatgtatgacaccgttgactttttaaccaatgtttgaccattcgttttattcaaaatttttgtgcaaatataaaaatatttatgttatgcttaaaaacatttgatgataaatcaagtcacaataaaataaatgataattaaataaattttttaaataagacaaatggtcaaacgatagataaaaagtcaacagcgtcatacatcaaaatatagaggtagtattacggaacac

SEQ ID NO: 35039 - DNA, 511 bp, Oryza sativa
gagttaataggaaagccgcactattaagaggaatgatgcattgacatacgaggagtgatcaaagtgctcaaaatctatttttaaaaggtgtttctcctcagtttggtgtgttctggattttttcggagttttccgaaagattttcggacatgtccgaaaattccagctcagcaccaacagcaaagtcaacgaaggatttttcggacattccgaaaacttttcggacaagtccgaaaatttctagtaccaacaacatcgttctggatgttctcggaaaagtccgaaaataactttcggacaagtccgaaaatatacagatgcaaaattgactctactgatgattttcagaaaatccgaaaatcagtttcggacaagtccgaaaatatacagaaccacttttgccttcgcagtttttttcgaaaagtccgaaaatcactttcggacatatccgaaaatttccagaagcgacaatttggttctgtgtgttttcggaaagtccgaaattgagggg

SEQ ID NO: 35040 - DNA, 627 bp, Oryza sativa
cattctatataaaaatttgctttagaaaattatattaaatctattttttaaaaaataattaatacttaattattcatatgctaataattagtcatcttctcgtacctgcgctacccaacctcatcaatgtcgtcctgcacctaatccacagagatactgaacgtgatagcaccaaggacaagggtctgatctgattggatcagtaactggttgacatgatttgctgtctatcatggctactttctggatccatcaccagaatggaaggcttggggtgggttctacaaatctattaacttattaaaggaatagaaaacgaagccgccacgttcactctcatgaactacaaattctcatattaatcagagaaaaattaaaaaatatgagtctatataggaacgcaattttaaaatagctaaaattcgaaattaaaaataaggaatataggaagagaaaactagagtccataacgatatacaatagaactaatgaaaattcggaattaaaaaaaataagaaaattaaaaataaaggttagagtatatatagaaatataatttagaaataacaaaaattcgagttaaaaaaaaggaatatcagaagaagaatacagagtccatatagaaat

SEQ ID NO: 35041 - DNA, 649 bp, Oryza sativa
agatgtaaacctgaacttcaatctaattcctgcagccctggaacagtgtagaaacgtttgctatgataaataaaagggtgaaaactccactgcaaaaccataaagattgtcagtcaattacactactttatgatcaagcattacatgcagtagctaaacaaaccaaattctgttgatgcggagaggagcaaaatacataaaccctctgctatactacaacacaaagaagtgcatctcacattctcaccattttaacatcttaattgtacagaaaattggtgcaacaaatagcttcgaaaaacattttttgttcttacagatcatgcagacaagaccttactaaaaggaccaaactaccatactgtagtacatattggaggtggcaataatttatcggagagcaattgattaacccatggtcataaggtacaaaatcacactaagctaaattatcaaattactttttcactttcataaatcaatctggatagccactattttcaaatttatttctcactgcagctctttcaaattgtgttgtttacttgtcaatatcagcagggctgtcattgccatttacactacaagatttctggctaacttattcaagatataagaagaaagggtcattacaaaacatacatcatta

SEQ ID NO: 35042 - DNA, 3227 bp, Oryza sativa
cgcccccggaaccggaaggggaaaaaaaaggtccgggttgggtatggcctcgcgggaagggcgtgcggccccgtggtaatgtccaaacgtcggcttcatctccatgaaaagaaggatcgcaggcggaagaaggaatgtgtgaaaaaaaatgttggaaaaaaagcattaagagcttaggtagaagaggaggaagagggaggccaaggagaaggagcgagagcgagcgctgctcggcgttccatcgaggaaggagaagtattcggaacggggacgatcgtcgaggttgtagcttcgctacacaagattcattagtgtgaattctacttgtgttcttggaccttttgatttttttgtgctaattgatgtcatctttgtggctttgatgcagatgggcacggtgatgtggggatgcacttaatatatttgtgcaggctcttcgaaagatgttgatttgaagaacaatgtgaggattcacttagacccttgttagttttgggcgtacaaattgtgaattaatttgttgcagtgcagtgtaataaaaaattacaatgaaattataatgctggttgttgatgactctcaagttttgttgtatcgagaaataagttgaatggattaatgatatgcaattaaattttgtttgatcatttggggttgttcaaagttcaaacagaagcattttattagatttaagttgtgtattacagctcttaacatccctaatcatgtttgttgatgttccagaggaagttttttgccctgttaccctgtatagttctatgttctatccctccttttgataacactcttatttacctgctgggtgcctgtgtctcttatattagaatattagatagaaaatatcatgtttgcacaatatggcatagataattattatgtaagcacttgttgtgttgggtgcgaaactgtatctcactaaagaaaatgggggaaaaggcatatggggctccaaagtttctgtctgttcttgcttgtaatgtggtgctcctggttaaaatgcttgtttatttataatccacaaagttgggggccacaaatcgtgccgaacatacttggtacagtgttgactgatttttgttgaaaacctaaattttgttgggaccaaatttaaaatattattctgaaaatgtagcaatttatgctggcaactgtttggtggtagttaaagcgagaagcctaaaacttcattgacttttcctgacaagggtttttctttaattaattggctggtgaacgagaaacatcaaactattcaatcatgttacctacatagttgtgctattgaaaatctggcttatttttgcaacagatatttatattccgcagaaacaattggagatgacttgatgaaggagatttcagaggttttatattgcaagaagagccaaggtgctaagctgttcaggcgccattgccgccgaggacatcccagtattagcaatttgcatcagagttatcttttgtaaaaccaaccctggctaatgtaaactaatgtaatgcaatggagctttcaactctggtagaaatttcattgtttgcttgtaaagtttatcaaaaaattgcatggtggacagactcaactctcaagcacctctagattgatcaaggttggagaaaacttattttctggagcatgtcgatgatcaaagttgaaagagcttacaacatgagatgaactctcaaatatcccatttgcttgttggggagatggtcacgatgaattataggaagatcaatatatacgattttatttgggaaagatacaaaccattcctttgtgacatgatcacatcgatactacaatcacgttttatagataaaattaagaaaatctaatactgaaaaccacacacgtaacaatcaataggagtaactttccaatgattagtttaaaaatacatcatggatcaagctagattaccactacgacgccacacaaacaccacccttttttgtccatcggacacttgtaaacagtaaacctcaccaaacttggtacatttgtttttctgcatcctttggcagctgaccaacaaaactaagcatccccacgacgtcacctttttatttactgtagaattatctgactagactggaatatgagatttctcatttctttacaagacaacccagaataatgctaagtagcccaatcaccagtacgaatgccagcgagaagcctccttgatgttgactggcttgacgccttgcaagctcctgcatatttatgcccaccaacatggggttgacaaagatgatcactaacatattattttcagtgagttcaacaaaataagaaggcatttcttccacagtggaccttaactaaagttttaacatgctaatgtaatatatttgctcctattattcagacaagatcgatggaaaaaatagaaaaataatcagctccatcgtaagcaaagtgcataacgattcagcaataataataataataataataataataataataataataataataataataataataataataataataataataataataataataataataataataataataataataataataataataataataataataataataataataataataataataataataataataataataataataataataataataataataataataataataataatattgttatccattgtcgtctatggataacctagaaaaatttggtgttgagaacaagtagcatctaaaggcgcataatcgatgaattttatattgagaagaagtagcatctaaggacgcataatcgttgaattttatattgagaaaaaaaagcatctaaagacaaataatcaattgatgtatgcagcttgaaatatctagattgaaggccccttcagataaattccctggaatatatggcttatgtgtattttctacatgaacaagtacttaaggaggtgatgcttatttttgtaataatatttgaattgaaaaaggggaattcttttacaactaagtaaatgactcaaatcattaccttcaaatggaagcatgtagaatgcatgacttaaccaaatactcccagctcctttcgaagttcctattttgctaatgcagacttcttttcttcgtcaattttgcaccaacgcggacagttgaatgagagagaaggggtattaatgcacgttaagtaatgacagacaagatgcaaagtaattaaaattaatag

SEQ ID NO: 35043 - DNA, 641 bp, Oryza sativa
aggtggcagtttgatcaatatgatggatatagagaaagaaagccaaacaatgatcctcaaatccgctaaacactttcagtcacattcatatgtgtaagagatggaaaattgcgtagaccgcaaaaatttggtgatccttcactggtaaacattgtcagtgaaggaagcttgtgagcaactagctccagcttttggcattttttgacaacaagctcaagaaggctagggaatgagcatatgttgtctccatcccatctatgcaacatgtccaacctctccaaatgcaatttctttagagaccggaaactagcagtattgctaccacaaaattgactgcaattcatggagaccaacccatcccatcccttgatgctgagattttccaaaagaggtaatagtccaaggcaagggacaacagtgcatttcttgaaatcatagaggttcaaagctgggttttcaatttcgaaattggattttatgccggggggtgaccgaaatttcgaaaatttaggtaatttcgaaaatttctggccgaaattattttaaaatttgactgaatttgaatgaatttaataaaatttggcccaattcgcaaacaaatgcaaaaaaccgaaaattccgtatgagatttgagcatgccg

SEQ ID NO: 35044 - DNA, 639 bp, Oryza sativa
tgtctagtagatatatatttttttttgtctaaactagtacagtatttattgactttagaatctacaatgattaatttaattaatttatcggctaatgacctggaaccgggctgtcagctacagctgtggtcttcggatgtggttgttgcgtcagcgtggaggttacttggggtcttcagagacttgcaatgggctatataatgtacgtacggcattctagctactatggcatattggcagttgatgtgatgtttggccaaacatctacagtacagcctgcatgccattccacgaagtgcgactagaagtaaacggcgccagtatgccatgccacaaattgggcagagagaaaaatgtgccatatggtccgtggtcttccatcaacaaaatattggtcgtagctacactaactgacgaacttgaattcacgatcgagccgttcatgcgcatgcacgcaaatgtgaacgtaccttgattattctcactgattagttatcagaaatttagtcctgcagagagatgatcataagctgccagccctgagactggcgatcgtatcatgattcacaagtggcatactgggattttctgcggtgatcaccgattaacgggagcaacaccacattttgaaatgaacgg

SEQ ID NO: 35045 - DNA, 724 bp, Oryza sativa
taaataaaaaaaattcgtaggactagcatgtactatggtgttactgcacggcatgctgctgcatgtgagcggtgaaaacgggcgagaggaattcaccgggggggggggggggggtccattttttctcaatgtcgcccagtttgtaaaaaccttcatgtaccattgacgatactgatattaaattgttcctcattttccaaataacatggattacctcttcgtaaaacaataatcttttgtttttcctatccctacttggaccttattgctgctttacctagtatttttccaccattctatgtctttattaaaactgttgttactacataacgtagtcgaccaactaattacccgttatcattgatagatttctactgattttatatcacccctcgcaataaattatgctgtttccacagtccaaagtctcccaatcttactgttgctttagcttattcaaagaaatctttcttttattgttcatcagtctgaaaagtcaaacacatcattccgctcctccattctataagacagtttatatctgcactttgaatgtacacagagactctttgcattgtccttctctatgcattgtatttcaggaaattttctagtatatctaatctatattttaacattactcatttggacgagtctcttctaatccgaaatatattgatgatcacatcctatgaattatctatctttgaggactgacattttt

SEQ ID NO: 35046 - DNA, 633 bp, Oryza sativa
ttaatctgtcattagcaaatgtttactgtagaatcacattgttaaatcatggagcaattaagcttaaaagatccgtctgtaaattagtcgcaatctgtgcaattagttattttttagcctatatttaatacttcatgcaggtgtttaaacgttcaatgtgacagggtgaaaaattttggggtgggatctaaacagggcctaaatattcttggataggatgaatgccagagtaagcgtaaagaaactacttcctcttctgtgctaaaatgtaagtacttttaagattggcacagatattaagaaagtaggtaggaatgattagaggaagtgtgtgattggttgagaagagaaaatagatgaaaggaaataggtatgattggttgagagaatgaggtagataaagaaatagctttattttaggacaaaatactgtgttagaaataggggttgacccaactggggaacaacacaattatatcttggctcaaatgatgcatgatcttgctttacaagtctcgggtgaagattgtaaaggcctgttttagattctatatttgggaaatgggggtaaaaaatagggggggtttaaaaaaattggggcccccccaaaaaaaaaaagggggtttttttttg

SEQ ID NO: 35047 - DNA, 637 bp, Oryza sativa
aaaacactcccttttaaaaaaaaaatatttccccaatttgggaaccccaattttttaaaaaaaaaacccaagaaagtaatttttatttgttcccaacagacaagcatgttggcttgtcaatggttttaaatcatgacattaaaacagagtattttattgttccaacagacaagcatgttggcttgtcaatggttttgttcttgatttttttttcttttaaaaaaggatcacaactcagcaatttttttaccaagaaaaacttgagtagacttttcctatttctaaaccagtatcacgtagctcctggtaggaatcactcgtcagaatagataaataggagacaaggatttaacgtggaaaaccattacaggggaaaaaccacagacacacaaaatgatcactgtgttgagaatgtttacattggaactcttttgccccctttgtttggtgtttcttgccctaggcctgcagggccatatttgtgtgttacatgtagaaatagactacgagtatgaccccataaaaaccaaaattaattcagttcattttttaacaacctaactgctttgctgcaataattttgcaagcaaaaaagtggagtattatctgatattctgatatgcaggatttttattta

SEQ ID NO: 35048 - DNA, 655 bp, Oryza sativa
tattatttaacttgttgattataattgattagattattctacgtaaaaaaatgttggagggagcctggcctctagtcgtccctctatctctccatctctattttatcataaaaaccgaccaattttaccagttttgtaaacaccggtcataacataagttttcagctactttagttttcttgatcgtgcactattctttttttttcactttttctttatttgttgttcaagtacgtaggtactttggtgcagtgccctctccctgtcgagtaaagggaggccggccacggccggttgaattgtctggaatcaatgaaccacccctttgttttgcctgcctgctgccctgctccctgcttctggaattcaaaccaattagccagtctctggagatcagctgttacagctcttgtgcttgtctccttaatatctgtgtccggatgatcagttgctaatacacgcatctctctttacccatatgcacatcccatgtcatgcgcggtactataaatagctagagtcattttttaagcattggctggtaaaccgtgaaaacatgaacgaagcaaaaaaaaaatcattatagataaaacttttttataaggttttttttaaaaaaaaaaggggccccccctttcttaatattgggggcgtc

SEQ ID NO: 35049 - DNA, 3201 bp, Oryza sativa
  unsure (1)..(3201): unsure at all n locations
agggggggggccccccccggaaaaaaaggaaaatttgggggtttttcccaattttcatcttttacaacgccttgatatcagtcactgcaagaccctggagtgtatgcctgaggattgaccgccatgtaatctgagccacttctctgttaggcactgccctcagcttcataagctgcctagtggcattcggcacctgcgagcattggaagatttggagattattgattgtgggcagcttacttgcctcccagatttggatcgccttacttcattactatggatggagatttcaaactgtggttcaattcaattcctgccatacctgcctagttcaatgcagtttttaagtataaataactgcccgcagcttagactttcatgcatgaaggagggaagcttagatcaagcgaagatcaaacgcatcttttcagtatggattgatggggctgaagtgttcagttctgccgacgagtctcgttttgttatcccagcaaagcttcagaaaggctaaagtaagtacatgtgtttgtgtgcctgcatatacacatatataatatcccttttatatatactcttctatcgattatcttgtcatgcctttggatacgattcttagttttatacttggtgccaatacagatcaaatataaaatccaaagatagaaaggccatagatctacattttttaaaaaaaatcaagtccatagatgctgtattttaaacatgatttcctgagcagatttctgcataaataacttataaaccactgtttttcttttcccacctgctgctactgatgtatgtttaagttaaagaaatgtcttgctcagggcctaatttgcattttcctggtcttctgcagttctctggccttcgttgaagttcaggacagctatttcccttcaatggcctgcaagtggcaacgcagaagtaggcatgttgtgcacaattctcggcgtttcccagcttggatctatgcaaaatctttctgagtttcattatctgtcaggctaccataggatcagtttgccaattcaaatcgtggatggggacttcaggaatgactgtcctattgcatcgatgaacgatggaaattctggaggaggagactgaagcggtgaagttgcagttactacgcatttgtgagaaatgtatgatcttgtgtgttttttcgatggtttgtcagaattgtttagagcactctccaggtagcttgaatatatatatccctctaaattctgtaacaaatatgttttgactgcttcatccttaatactacttgtaggtacaaagattagaagtttgtacaatttcatgccggtttttatttacgcttctaacctgagctgacgatgacacggacaaattccagcaagcttgaatgttcagctcatgagctgctactctacacactgagctaattaacctgaagtgaggcatgcaaagcattgccctagccattaacctgagctgtcttgtgttgggttaggcccactagaacgaaccgccaggttgaatcctagccgcacgcttctccatccaacggctgtcttggaccaagtgggggggggggggggtcgcagaattctttcccgcccccgtcggacgccgtaatgggccttttctctggcgggccgggctagtgcccaatttcatgggcttccgcaggatctccgcctcaaacntatgggccttcctctggcaagaaaagaactggaggcccaatattgcgggtgccgaaagttggttgggccataacgggctgaaactaagtgggcctaatctttggttagactcttaccctcggggggggaggcggaggatccatggccacagtacttctcctcccctcctgccacacctccggcgacgccgaaggaaatcctcgccatggccgtcgtcctccccgccggaaacgcttccgccgacgtctcttctccgctggaagagcaagggttctagtttgcgccatacaccttccactcctgcggcggcataagcacgaaaggggaggtagacactgaccttctctctgtccgattctccctgtctgattcttcttcatctcatcaccccccatgaattgcagtgcttgcttcgaatctctaagaaggatgcatttctagatggatgagcgtcactcaatgatttggatgagaggtgcgcgattgcctactcagctactcttattatatgtattttttttctctagactagttaaatgggcaactcactcgcaaacttccttcactgacgaagattacagacttacaaactttttaaaaaaaaaatgaaagcggcaggagaactgccaattatattaattaaggaggagtaaaaaccagtagggattacaagaaaatattacagacttacagtggttatgatttttgagtctatggcatttaagagccggagattgttaaatttggcaggttacttcatgaacccttgagatgaatagccttgtttcactactaagttggcattagtatatgaaatactgtaggatcatccaccaagcgatcaaaattacttactttaacacttcaaaaacatatgtgatgtcttttttgactcagtggtcgagatcataatgctctaactggctagatgcttaggaaatcaaatactgtaacactatgacaggaatatagcttctaaccaacttgattatactggtggattctgttgtttagtttagctactttcttgtttccatatgcggtctttcaggttattggtacattattcttcagaaaaaaaagttttttgggggcacatttcctagactcgtgtaatttcgtcctaaatttgagtagagattgttgcaatacttagtatttagctataggtgtaaacaacataacacaagaacaggtcttgaaatgtcacaaatgaaagatctgagaaaatagctatagacttatggatatatacccagtcttttagcaaggttgttttcaacgttgcgtatggtgatcgagtcactgcctcttggatatatatatacccagtctttttctagctaagttgttttcaaccttggattgagtgattgagcccctgacctcttattgtgctggcaatatctttcattttagcatgcacactaatttttctgtgtgaatttttcaatcatcaaagtgctgcagttgagaattttgaagatggatcatttaaacagtgcaaggagtggta

SEQ ID NO: 35050 - DNA, 6128 bp, Oryza sativa
cggcgcttgagattcgactactattggcgaattcgagctcggtacccaaccaatagcactaatgcacggctgcgccaaacttattcttcttcttaaagagagctgtggccctgtttagatgggactaaaacttttaagtccctatcacatcggatgtttgaaaattaattataaatattaaacgtagattattaataaaacccatccataatcttggactaatttgcgagacgaatctaatgagcctaattaatccatgattagcctatgtgatgctacagtaaacattctctaattatagattaattaggcttaaaaaatttgtctcgtgaattagcttttatttatgtaattagttttgtaagtagtctatatttaatactctaaattagtgtctaaagacagggactaaagttaagtccctggatgtaaacaccaccttattcttcttcttaatgagtattttattaagaacataggaagttttgcctctcaaggaaacgttccctcattttttatgtcacctaaaagtcatcatttttctaaaacaaaacttgacaagttagatcaatatatatgtgatatattaattactcgcaaacatatgcaagttccaattcaacttatacaaattgaaacaaaaataataaataattatcaataatgcacagtattcagagttatatttgggtttttttttaacttttgttgttgaatttgaacttatggagtgataggtttaagtgttactccctccgtcccaaaatataagcattttagcatagtgacaaatcaaatatttttaactttaaaattttaatagaaaaaataaaaaaataatcatgtaaaattgatgttactacatttatcaataagcaaactatcataatatgcaattctttttgtttaaaacatcttacttttatagatattgttgatcaaagtagcatcttgtagatcgtgtcagggtataaaaatgcttatattttagatggagggagtaattattttatcattttcctttcttaaatttaaacttatggaatggcgggcataaaacggggaaaaacacatcctaattaattaattttcacaatctagccaaaagcattcttgtgagtgtgaattaatgaaggagggtaattatgttactaatcaaatgtcaaccttgtttatttgtcctataggatcatcagagaaaggatgggctactaaaggaagggctttatgcagcggcagctgctgctgcggcggcggccaacatgggtgttgcaccgtactaagcccagctagaataattagtgagaagttagttactatctaccaagtctagctagctcatcaattaactagtgtgttcttcctatcaagctatctagggcttcctgatcatctctcttgttattaatgaagtgtactgtctctgtgcgttggtttcacctaggtataatctgatcatctagctagctaattgagcttcttctgctactagtcattttgctctatctgatatctgtgctgttttttttctctagcagttgatctgatcaaatcttcatcaattcctttcatttctaccctctttccaccctcatgccaaaacagtgaatattgtttgattgtagtcagggtttacaaaaccgcgtggttaattactatgcggttatcgcagttaccatgcatggtaactttaaatttttgaaaccacgatatttcgcgcggttaccacggggtccggtaaccgcgccaaaaacagtaagagtgtatcgtacaaaaaaaaattaaaaaccactagcgaaaaccggaccatggcgatttttctggttttagcaaaattaagccattgcctatgctagtgaaatctgacctttttcttcaaaaatttaaaatccaattaattattttaatttaactagaaaacctacgattttgtgttacaaagccagcccgggatacaacgatggagctaggatttagatatggaagggggccaaaagtattgaaggggagtactattatttaacttgttgattataattgattagattattctacgtaaaaaaatgttggagggagcctggcctctagtcgtccctctatctctccatctctattttatcataaaaaccgaccaattttaccagttttgtaaacaccggtcataacataagttttcagttactttagttttcttgatcgggcactattctttttttttcactttttctttatttggtgttcaagtacgtaggtactttggtgcagtgccctctccctgtcgagtaaagggaggccggccacggccggttgaattgtctggaatcaatgaaccacccctttgttttgcctgcttgctgccctgctccgtgcttctggaattcaaaccaattagccagtctctggagatcagctgttacagctcttgtgcttgtctccttaatatctgtgtccggatgatcagttgctaatacacgcatctctctttacccatatgcacatcccatgtcatgcgcggtactataaatagctagagtcattttttaagcattggctggtaaaccgtgaaaacatgaacgaagcaaaaaaaaaatcattatagataaaacttttatagttttaaagcctatgtaaaaaaaattgtgatgaaaaagctctaaagttaagttttagaattcaaattttggtttgtgactaataagtttgcaagtagacgataaaggacaaggatatcacaaatgtttttaaataataaggatcattcgcaggtagaggtggatagcgagctagctcagctcggctaggtcactagaaatccagctcggcttgactcgtatgaaagcacgagctagcttgtttggcttgcgagccaaaccatccaaacaattgtccctaggccatctcttgcaacctgaggcactagttcgttatctctaacgagcttaaaagccagctcggctcgttaggaaaatgaaacgagtcgagccaagcttgtcacgactcacgagccaagtgagttaacgagtcacgagctttctgtccacccctattcgcacgtaaattaaacgaggacggaaatcaatctacttcaagagcgacaagtgctactgtttgcttccaatagtgggtgttgtgtgtagtaggcacttggccttttttttttctgattataacattcggggggctaatttcttgtaatttttatctgctatatcaatatgaaacctcaccattatcttgtgcggttcgtgtttttttttttagaaaaaaaaaagagcaacaagtaaaactgagcgttttccccctaaaagcacgattcaaacagtcggcctggtttgtcctgtgggccgagcggagaccagtgccttctctagagcccggttacctggtccgtcgtgtcagtgcgtccagtagagcccatttcacccccaaatgggcctagtgtcagtggtcactgggcccgcatgctgcatatgcacacatatgggcctttctcctccacgatccgggctatgatgccactcaaggtgtagcatataaggtacgctgctttcaattttatccacgctttttatatcttatataaaagagttgactctgaggatactatggttcaaatactaaaacttataagctgaccctcgtccatctaaacttcaagatagtttttttagtaaaacacaccagcggtccttaaacttgtcaggagatttcacttaggtccacgaacttgcaaagcgcaaatcgagatccctaaacttggtttattgtatcctggtccgaagccacgtttgaccgtgatcttacctacatggcacgccatgtggaccgatgacatggaattgttttatttatttttttctcccttcttccttcttttttctctttcttccttgtcaaaaagacgaaaatgcctcgtacacgtcatcatccatgtcatcgtcttttcataaaagagaaaaaagatggaagaagggagaaaaaaaataaatttcatgtcatcgtctacgtggcgacaagaccactgttaaaagtggcttttgacctggatgatacaataaaccaagtttagagacctcgatgtgcgctttgcaagtttgtgaacctaaatgaaaccttctgacaagtttaagtaccgctggtgcattttactcttttttttcaggttaaaattttttaggggggaactacaatgggcggggagtaagaggactactccgcttttaagttttaaagtttgaaatttgaaagtggcttatctatactccattaatacgtaagacattagtgtttgagatgagcgatggatttgtcaccaccctatggccccaccaccaaggtttctcaaaccgtcgggaccggagttaccgcaccctcatggtaaccatggcaaactgtacgagaccgtataaaatttattaaaattacaacttatttttaaaatttatttgaatttaaggaggttatcgcggttttccttttaccgcacctcgcgttaagtgcgataactatgataaccgcgcggttaccggcggttggggaaaccctgcccaccactccttatattttttttattaaaaaatgtatgtcaaagagtacacatataagctaaaatgtacttcattcgtccaaaaaaaaagcattcctaacattccaaggcaaatttagtgaggagtaaaaatgaccaaaatgcccccctcatttttgggaaaaaaatatggtgataggtaggtaaaaatggtattaaagggataaaattttctgttttatgtgctggggtaggtaagatgatggaagttggttttctgtgagcaaaatttaaactcttctttttttacggaggaagtatatgtagagactaagagatatgatacatataaataattaaaaaatgattcaaaaagctactgttgcaatgcgggcattatactagctagtacttcctaccccaagaagattcaacttaggtgttaatgacactacatgggataataaatctggatagatgtcctcctaacttgtccaaattcactgtactacctagtggcccatccaattcgaatttatacagttttgttgtagctaggtagtgtttcatttcacttttactctctttgttaaaaaaactcaatctagtacttgatgttgacgtatcatagtattacgagtctgaatatgtatatacccaaattcttaatatagaatgtgtcaatatccggtactagattgattttatatgagacggatggagtgtgacggatggagtactttgattttttcagggagactaaaaagcaaacgtccgacatggtgtatcactaggtctacaggatgggacacaagcacacgccgatgtacagtgcagacaggagtaatttgctggaacgatcccaaggacaacataaaatttgaaggcggcagatcaaaacaaatctgcgtgcaggtccttcgagaaataacgtaagcggatcgcagcagcaggacggttttttttacgttctccagtctaaatgatgcttgtacgttctttcgtgttcttcataaaattctctgaactcgcgatctagactcccatcggatggtctattcagctaaagaaaaagctaaattttgaattttcaaacttaattttaatattgattttgagatattttcaacgtaatttcttttttagcattagcttttaaatcaccgagaacacatatatatatatatatatatatatatatatataagttttatctataaatttatttttattctctaataaaccgttttggcttattaaaagaaaagccaaacaatgggcccctaaaccgtatgcatcccacttcccaagctatcatggcaacatagcaaacgtgatgctgtatgtgctatgatcgactatgacattatacggtactagtcacaggtattttattttctcccatatttttttctctcggttcattttttataccgttattggtttttagccctctttttatacgtgggattggctttttttgttttcggttgatcagtttccttacacgtggttatctttttatttagctgttttctggtttatatgattaagagggaaggagaccgatggtgcttttaagttcatagagaagctcacgaaa

SEQ ID NO: 35051 - DNA, 718 bp, Oryza sativa
  unsure (1)..(718): unsure at all n locations
ccaaagccggaagctttccagatgatgaagaggatgatcggcctcgcacagattttgtttcataattagtaaccttaacccaaaaactgagacatgactatatgggacactaaggtatgaagtacataaacttttttttcatcttgattttttttttagcaagggccatggcccccatttctattaccagaaatggacacaggactacaaagttcttaaaaaaacagctgactccggtgacgaggcaggctggacccacaacatcggcttcccgcgttggtgtttgcagacggcgggcgctctgtcgacggcgacgaagggcattacggcacgcatgcaaaggcgcgactagcggtggaggaggccggcgtgatgtgaagcggcccggcttgctcgtggtcccggcacaaggaggctaagggaaggttggctgcccgctgcggatgccggcacgagcgcaacgctatgagttgttgcccgcgcaccaagatgagcggtcngtggaacaggccaggtgcaacccggtgccgcatgttgaggcacgaccggtggcgatacgcggagactgcgcggnggggggggggggtggttttttaactttgtatctnatttcncagacaaacccccgaacttggagaaatgctgaaattttttgcccgcccccctgtaacttgtaagtgcggcgcctggataattctggtcactttcccaaccgccg

SEQ ID NO: 35052 - DNA, 677 bp, Oryza sativa
cattaacatcaatgtgaatgtggaaaatgttaaaatgagttatattgtgaaacggaaaaaatattatatatatggagtacatcatagttttgctaatatatatttgtactagtttacgatgaaaagaattgtattactccaagaaagaaaaaccgcttgggcagaattgtggcgccgcgaaatagctatgatagaagataggtgtgtcgttagttggaacaatgaatggatggccccggcaggtgtggcctcctcgatgcatgcatcgatcgtctatactctcactcatgtctatctttgacgattcgatgattgcttttgtgagcttattagtttgctgctggaatggcactccatgcccatcatgcttgtacacttctacagttctactcggtcacttctgtaggttaaaaatatacttgttctgctttgttagattaattttttgacagttactctggtacaaaagagacaatacttttgaatatgagtctgataaattcaatcattttataaaaggtatatcctaatagagcaattttgttagtcaaagagacaattagactgacatgctcccttgtagtgattacagtactacttgcttgattcatttcgtcccttccagcggcccgatcgatctagctagaacaatcgatcgggcaatcaatctcgttcgt

SEQ ID NO: 35053 - DNA, 744 bp, Oryza sativa
cctgcagcccggttaagaatgttgtacactgactaatgtgtgttattcgcagcccattgtatttccaacatcaagggcattccagaaccatagttgggatccaaaagcaaaatggtcaacatgggaatcaagatcgatttacccttttgattttggaccctggccatgtaagctgtcgctactattcatttttttaaaagaaaaaggaaaaagaaagttgttattattcactttgtagtatatcattaatttttgttcaattgtgcatattttttattattcaatcttctgtaaacatccagaaaatttgttctacatttctctgccaaattaagatataaactttgctctaacggtttacagagaacgtcagatttggagagggctcttcgaagcaagacaggatggcagcgtctagtgaaaagaggtgtccacactcttaggaagccacagtatcaggtacatcaaatcacccaaaatttatgaactttgaaagggttgtgcagttcatacaattctgatatgccttcgatttttcagttgtgctatgtggatcctggaattgctagttcagaagaaatggagcagctgacaactattgatagtatcctggtcaggttctagaatgctggtgcgtacaatgagtaatcgtgtcttactttgtcacatgctaatagaggaaaatgatacagtttgctcgctcatgtatatgaaaagtcaaaagataatcaatgatgtacttga

SEQ ID NO: 35054 - DNA, 1557 bp, Oryza sativa
aggtataataataataacggaattggtgatgacgggcgggcacagagaagaatgaattcggggaaatagaggcacagagatgagtcaattggagggaacaacaacaaactaagaattcaattcattgaggttgagggagtaggagatgagattcatcagatccctaagtaactagcagcggggggtgattaattcccgaagcctaagccgtaatcaagtgatttgggggtggagatggaagcaggtgaggtgaattggggaagacggaagggtgaattgaattacctggcactggcaggcagggtaggatgaagatcgaagaggaggagatcgaattggggatctgcgccgccggcgtccaaccaatcaatccaaatctccttccacttcgttcccccttcgccctcgcctcgcctcaacggagaagcaaattccgatcgattcgatttggggattttttttttccttctctctctctctctctcttttctcctcttccttaattaacacgtaggagtactcccctagtccgcctgatctgaacggagcacgtgcgcacaacgtgtcgcgtgggccgtggtgggttgggccgaatccactcttggcccgggattggattcctctgcgctcgctatcgcgtgttttgcaccttcataattttctcacagaaatgctatgtactacactttgtttttcactactttatatctaaaccctagatctatcttgtgtttatgctccagtttttggcaacatacgtacatacatacatacgtacatgaatgatatgcatatccacgacaagcaaacaacgtacatcgatcactcacctctcatcttgattaattttagctttactaatagctagctatagctagctagctacttttccaggcgcccaacatccagctgattcagtttagttaatcatatatctgcacacatacggatgcaaagaatcaataggataggatttaaaacacaatacagatacgcatatcgaacgatcgatcgatttcactgcatccatacatatgtatgttgatacatatatattcttcaatctcaagatatcaagtctttcaaaaatgcttatagagatacaaagtgtatgtatgagtttatagagatgggtgattgttgtattctgagttcctgcgtttgtactgtattttttaaaaaaaactataattgttacgttattcagtattgtagcttagctgccagccgaactacatatacagagttttcttgattggatagatgaagttagccagcgctgctcgttcatcatatcgatcccgggcgtccgatgaccagatctgtctccacgtcctccatcatgcgccgatcatcgtcgtcgcgtacgccgccgccggaataatcctcatgacgatgaacatcatcatccgcctgcttattcttcagctctcccacagacgtcgaccatggcgatgacagagccttacactgcatatataattacatatataattcatcgcgtgcgtgactccatctgtgtgtacatatatatcttaagcattcaatttggagttt

SEQ ID NO: 35055 - DNA, 727 bp, Oryza sativa
atacacacacgagccaaaaaaggcaaactatatgtaagcaaataagcaatcgatcgagatgagatccaacatatatatttataccttcttttgcctgatgctacataagctcttctccagctgcacttcaagctcttgtagctcctgcactgaacacgaccccaggccttcccccaacagcttactgtatgcgtttatgtatgtgcattaattctcaaactaccccaatatatagttagattgataaatatctaatataattaatcatttgtactatatatatttagtcacctcttgtagccctcaattgcttctatcttctttcccagggttgtagcctccgatctccacttctgtgaaaataacgcgcatacccaaacacaattaataagtaattccaagtgaaaactatatatattatatatgtaatatatacatttcgtgcattaacatactcagtcatgcatcttgtgctaatcgatcatgcatatatagaataagcatgatgtttcatgcatgatcttcagtcaaaaacagttcgatcccatcatatggtatccctcctaattaatactctctccgtttcgaaatgtttgacgccgttgactttttagcacatgtttaaccgttcgttttatttaaaaaatttaagtaattgttaattcttttcctatcatttgattcattattaaatataattttcatgtaggcaatataattttacata

SEQ ID NO: 35056 - DNA, 678 bp, Oryza sativa
accgatatatatcctgaggttgcacaagtcattaatttcatcattttttttcttaactgatttgtttgtgaataaaatacattttttattaagcaatcccttcatttgtttccatgcactattgaaaacaaatgtgctatatataacaactgcgtgcattatttgatcacagaacatgtgagatcatgcatattttggatttttgaacaaagacatacgtgacgctttttatttttttgcaaatgatcaatgggttatatttatgctcttatagttatatctgtgtacttatgcagttaatttgcttcctatttgaaacgtgatcttcatcattttacatgatggtattgatttcatcagctgtaatatgttaggagattatatatgcatgcgtctctgttattacacatttcaccaaactgactgataattttcaatcgccagcttgcagaggacaatcgatcgctacctgaaccacacaaaaaactcatctgcacatgaagaaggagaggaatcatgcgtccaggttcaaattttattcgtcctatttaagtactaaaatatcacgcatgcacatatactccctccgtttcgaaatgtttgacaccgttgactttttagcacatgtttgaccgttcgtcttattcaaaaactttgtgtgaaatatgtaaaattata

SEQ ID NO: 35057 - DNA, 664 bp, Oryza sativa
taactactctaccatgagttgagcccaatgttcaactcacaaagactagggtgacaaggtattatgggcaatcaataattatcaaaggtaggataatattaacaattaggtcacgctacccatcgatagtttataaacaaaacaatgcatgtattcaaaacaaaacatttcacaaatgggttcaatatattcaaagagtgcacttgccttgttcccagtattgtccttgcacagcgtcttctgaagcaaactgctcttccgctccaacgtctacacgattgcacacgaaaacaaataaacacaaagaaaaactaactaaataacatcaaatgaaataaccaattaaaccagaaggtagagctcgattttagaagaatttaggaagaagaatggatcgaatcggagttcaaacggaaaagttatggcctccggaagtttgaattcagggaaaatccgagggtaaaagaaaaaggaatattccgagaatattctctggatatttaatttcggaaattgaattaattttggataggaaaatatatgtgggcccactgtcagtggcatagagaaaaggacaaggagcagctgctccatcacacggcatggcgtgctctggccatggcgccatggcggctccagcgcggcggcgtcggcggcgttcgtc

SEQ ID NO: 35058 - DNA, 7990 bp, Oryza sativa
gaggacggggaccgcgaaggactggctggggcaggaaatggagagcgcggcgggggaggcggccgggagccaggtgccgtggtggcggagcttgccccgggcgacaaggcggaggccgggcggcggcggcttggacggatcccgccgcggcgtcctgaagaagcgcgcgaactccaccgcccacttctgcctccgccgctgcggcgtcggtcgcgccgggagaagcgccccgctgcggacgtcggcgtccgccatggcgacgacgaggatgattgggagggttcagggcgttggggttttgatgcgcacttttggtgtggagctgttgagtggatgtaacaattacctgctaaactcagatgagtacaactctgtaaaaaaaaaaagacatacgctagctataaacatgtgtgtccatagttaggattgaattttttttttttaaagatgaaggggtagtaattagacctccttcaatgttcacactgttcccctgatgaggcatccataatgtactccaaacagcaatagtttaaccctgacgagtaaaaggagtatctatttaagtcatgtacaacgaggcttatttacggattttctccgttagtgtgtaagtaaatttggtaacatgaaaaaaaaagtggatgtgtgtttcatgtgaaaactttctatatgaaagttgttctaaaatattagattaatccatctttcaagtttgtattaattaaaactcaattaatcacacgttattaccacctcgttttgcgtgaaccacttaatctttatcttcaactttatcttcagaagattcaaacaccaccttaggctacattctatttttcaaacttcaacttcaacttcatcgttttctgttagcacgcttttcaaactgttaaatcgttttctgttagcacgcttttcaaactgttaaatgatgccttttttttgcaaaagttttctttgtagaagttatttaaaaaattcaaataaatccatttttttagtttatatttattaatacttattaatcatgtggtaatctgatttctcgttttgcgtgcgtcaaaaacctctctcaaaacacgagttgactcttaccttttttaaaagaaattttgttgcatggagtggagaaatggaaagaaaattaactaaatatattaggtgaattgatagttaagacatattgttgtcttaactattgtaggaggatagtctatgtttgaactaagagctcatgtcagactctatctttgtacagcctacgcctagatacctcaagagcacactataaaagggagtgcaatatatagatatcttgtgtattatctaattagaaaaacaaatggcatgttcctctcttttctgctactcttttctctctcccctaaagatcggttgctatccatcatacgtttttttaatatatgactatgttgacttttgacgtgatatttgactattcgtcttattaaaaaattatataaatgtcatttattctgtcgtgacttatttttatcatcgaataaagttacacttttacatatttacactaaattttgaataaaacgaatagtcaaacattatgtgaatagtacctactactccgtcccaaaaaaaacaaattcctagctacgaacctggacatacatttgtccaggttcgtaggtaggattggacttttttttgggacggatggggtacaatggataggaccggtactagcatgctctccccctctctctgtctctctctctcgtcttatgtcccctctaaaacccaaattatggatgctctaagcattgctgaaccagtaaataattaattcgcaccaagcaatagcactaaactggtagtaagatgaaaaaacattgacttttttctatgtattgatcctcactcctctctcttcatgctattggataatgcaaaactttatattatcataggacccatcttatagttagttagacattgtggaacttttaacaatagttgcctacttttattggatcccaccctatctaccggttggcaaagatatattggtgatacccttactcgtcattcacagtgtgatgacgtggcgagtgtttcacccactccatgtcgacggtacagtgccacgttggacaaattcgtgcttctgttgtgccacttgtatcgtctagagcacacgggtgcctcgtcagagcaagaggactcgtgggcgaaagcacgctcgtgtacatccagttaatatgtagaggccgggtttataatccattgtctagaaaaagaaaagagatttttctgcctcaaagctttgctgcaaacctatgcacagtccacggatctataaattaattttcagaaagcatgtatgataccaatcattatggatgaaaagaagatgctgatcttggctgaaactagtggggggcaacaaagccaagagtaatggaatttacccctcttatagatagaaggttgcctatcatccataacatattttctatcttagggaatgaaaactaagcaatatgttttatctggttcggaaagaaacaaatatacaattcagagctgataattccaatacaaatacgaataactctcctgatatgaatacgaatattgaaagatctagtcccctaaccttgtgttatgtgaagttttggtgattaatgacaacatattttgaatctaaccattgctatgagtttgaataataggttatgtcctggcatcaagcaagaagattgatggcttacatgttgaggatcaatgataagattttggcctaacagatagagatgatgcctcacatattatgaattaacgagatgcttgatgagatctatggacttgttgaaggacatacaccatggttgaacattgatagaaatgaagatgatgtgagaagctagaagatggactttatcgatggatgagattacctatgaaattgaagaaattgaagacgcggggtatgaattgattacctatggcaagaaggtaaagcgcaagcaacgctcaactatgacggaccatgcggtggtgaagggcaagcaaggggcttggcaccgatgaaccaaagccacggattattgacatcaatcatttgagaaatggaagatgaaatgccgaagatcaagaagatgtgatttgttagtaattaagaagagcattgatcaagagaaagatataactaatttaggaataatgtgcttattgagttataggaggatagtcccggtgatgaaatgactttgacgtaggtaccaaataaacaaagaaaatggtgtcaaggtattcctattggtatagcttttcctttttacatttaagtttaggatgacgtactattaagaggggatataattggtcgaatactagtgctcaaaatgatttatgtttgtgtgagttgaaaaacctaagccaaaattccaactccgggttgtttcacatgtcacaacacttacatcgggtttctttgcaagtttttcaacttattttgaaggttttggaccatcttttatgctggatttgatatcccatgaaacaagctttcagtagagtccaagattatcgtaattggattccgaagtaaaaatgttttgcctttttacttaagcaacatcagactacccgatttggaataaaactatctgatgtatcagaatatccgattttttacagaacttcactctctgtcttgatttgaaaaatcctctcaagtgagtttttgtaagtgtaaatcagagtatctgattatgggtcagataatccgatgacacagagacaccgaaatttcatggaacctgagtctccgtttgaggacaaagtttttgcttctaaagtatcggactgtctgattccacatcagatagtctgacgcctcagaaaatccaaaatttcatggaacttcgttctctgtctctcatcgccttggaggtatcatgtatcggatagttcaacgtaggtaaagattcccttccagcagtcaaattttgggggatctatataaaccccccaccaacccttttatagggttagccctttcattcaaatctttgtggcttgtggatttgagctttatgctaagtgctttggatttttataggagcatctgtttatattggattctatggcttagtagaaacgatatggtttttaacaagactccaactaaatcttatagtgcaagatatgcttcagttctagggctaacttcaaatgtgtcaagaggacagagaggtcatttgccctctagagtcatacgtcatgtagattttcactacatttgaatggagatttagtaataggcttgaactttaaataagttgctcatttactttgattggtgttgttgtatcgtcttttcatctcctttattttattatgttatgcttggatttcgaatcaaaactgagatagatagatagatagataaagagagagagagagagaggatgaattggtgtttgaatttatataaacattagacttgcaaaataagttatttcttccgctctccgcacaagcaacgcaaaaaatctatgatgaatatgacaagaagatatcactccagatgatgataacaatgtgtggaactacctataggaaaataacatttaccaatcgaagaaggtatatgctcattcctctttgcacattatcaaccagttgtccctttgcaactaatttggaagagcaaatgtagcatgaagttggaggtttgcatatgattgcttctaacagtttgactaaacacaaggaatatgctacaacaaataatgtttacaagacaatcagggccaggttgtgtcatttgcaatgagtcagacttcgaggatttcatacatctgttgttctttgtatgtgcctttgtgaggagcactagcaacttatcagaattaattggttaagcctgtttagatcccctggaaagttttttcaccctatcacatcgaatgtttggacacatgcatgaagtattaaggccctgtttagttcccccacaaaaattttacaccttatcacatcgaacgtttgaacacctgcatgaaatattaaatataggctaaaaaataactaattgcacagattgcgactaatttgcgagacgaatcttttgagctaagagcaggtacaatagtcctattcaggaggctccaaaaagttttatatcattaaattcatgcataaatgagagagaattgaaaagagagaatgaaacgggcgactaatctatcgcccggcggtagcacagttgcacaggtgattccgtgataaataaaaaactagctttgtggggccacaccgaaccctatcaatcccgtgtgacttttttccttgtatcggctctcacctctcttgctctagatcgcttctttccgcacaaatcgcctactcctccacctgagccccaccaccattcatcggagtcaatttccacagccatcagaaaccgcgtatgccacggaagctccgccaccgttgccggattaaagcccacgcaccttatgatcctgttcctctcatgctcagccatcagatcgaagccagatcgatgctctccttatgaagaacgtgttgttgccatgcgagatctcctaccgccttgtggctgtttccgttgattgaagcaaacaagtagctaggagaaccacgagaagtggttctgagttttgttgtgtcagtggatttggggatcttttttctctgttccttttcccttctgctctcgatatatgcatgttgtttatttacacaaagtagatggatttttttaggagtgatgtagttgtgataagatttggatcttcccatcaacatttcactagcagtaattatgtaaagcctaatcaattcttttactagttcttgttgatatcacaagttcacaacatacagatggctacacaggtatagtttagttttgatcgtacacatttatgtggacatgcataactaattatgattaatgaggtgcagtctacataaaagctaatctattgtactagttgtctttagcattagctacaaaataatataaaggtaagtggagccagctgttggctacattattgatcttgctctaattgctctatgatttgacaatgtggtgctacagtaaatatttgctaatggcggattaattaggcttaataaagttatcttgcagtgtagaggcggaatctgtaatttgttttgttattagactacgtttaatacttcaaatgtgtgtccgtatatccgatgtgtgacacggcaaaaattttcaccactggatctaaacacagcctaactatgatggaatttatgaatatgttcacacatgccaagtcccaattttcacaacctttttcgttgaagtggttgtaaaagcaacaatggaatatttggatgcgcaggaaatagttagccaaggttcttggtgtggaaataaaaagtttaagttcaattttggctctccatatgcactagccagtaaagtcgcttgttcgcacgactatgccttcctacctattaaatgtaatatgatgattataattatattgtaaataagctattaaagaataaatcttaactattgaaaggtaaaactcaaaatgaaacgaggatgagccacatcattcgataaatattagccgttggattcactacaaaacaaaagaggataaatgaatcttgaccgttggattagatggacagtgaaaataataatttaagaggtttccggagatgaaactactagaaggaaagaaagaaaggaagggcaaagctaaagaataaccatatgaaggtataatgttatacatataatttatttacgatttgcatctattgtaaaaactattttgctaataaaccctcatcaaaatgtatattcatttgattaattttgtttctaacaattaattttaatatatttgagaaaaaaattactattaggacatgcacagttatggttgcccatataattttaatgattttcacaggattttaaatgaaatcaaacacattccttaaaaacctacaaaatatttatgcataaggtataaaaagcacgtgccaaaaaaaaagtaagggggtcatgcagccacaaagacctacaagacaataacttataaaatctgtaacaaatattaagctatttagtgtattatcataatattagttagcctgacctatgtttttttacgagcaacgagaaacccataaataaaaaagattaccactcccacataccacataatagaaggcctagagtcgcgcgattgagcgacatcataggctagttttgtaggaagttcagttacatcttttatttataataaacaatattttcatgatcataaataattaacatacctagcatgtaaaatttatcgtaaatatttatattagcatatgttctcaactttgtatatattattagcaggtattatattttattatcaatccaggtaatttttgaacaattattttaaagcattaatttctgaacctttgaagaaccttgttctgtactgttgaaagggagcacaccacgcttggaaaaaacattagttttttttttctaatattctttttcgagcttaactccagatgctctcccttttctgatcaaagttaaattactatgtttttattactcccatgttttcttccaatccttccataggaaatgtcatgaatctcctcctgccctctatatttctacagaaaatctactgtacggtgtttcgtcggtacgggataaattaaatgagtggataacgtttcgatcttatcccttctctttctactccctccgccccataatataagggattttgagtttttacttgcaacgtttgactactcgtcttattcatttttttaaaaattattatttattttatttgtgacttactttgttatccacagtactttaagcgcaacttttcggtttttatatttgcaaaaaaaatttgaataagatgagtgggcaaacgttgca

SEQ ID NO: 35059 - DNA, 3639 bp, Oryza sativa
aaggttagtgaaccaaatactagtggaattttattattctaacatggatatgcattgcaagcatgactagttctcctctattttggtaatattgacgggcaaaactgatcgctaatgaccgtcgacaaaacccaccaagcttgaacctttgctcgtcccgagtaaaggatgaatggaacaaagacttggttgttgattaggagtttctactatgttgtatatctcaaaggtacaagtgcaaggtatatatactctgtctctgattaaataatctttggcacggtggcttacccttacccctgattcccacgagacactgcttctcctttccttgggcggttgaaagatagaacagcaactagagcacaaatcacccaatctttattcaacttttattccagaagttttcaaatgattttgcaaaagaaagccaagttcctcatatgattaactcagtctctccaagtgtatcaatatgaattcctcaccatttttgcctttttgattcctactctaaggtttgatatgtggagctcggtagggatcaaacatggcatacttgcattcacatttattaccaaatcaaaaactcagactaaagaaaatgattaaacatactcaagatcaagatcgtgcaaagtgtgtgtgtgatataccctgtttccacaacaaaagtgaaaataaccaaggttagcctacaaagggcagtgattatacagtggtaaatataaagtattagttctagtaatctctattatgaatcttcctcggcaacggctccagaaatgcttgttggtatttcttaacgacattactagaaatataattcccagcaatggcgccagaaacactcatggtatattatggttacagagttcatccgcaagcacatggatataccattgtagcatttcacccgagagtattccaagggtatcatatttatttaatcccgtggaaagatcatggtagagagaacctaactaataatttatatgttacttgtaataatcatagtctaagtaggggttaatataatccaagggtggagagacacacaagcagggagctactcattctcataaaatatctaagctaagtggaaagaaaagagaaagagaatctattcctatacttctagtatacatacatcctagttatccgatgtactagctaataccctctatccgatgccctcctggtatttcgagaagccacccctgactgccgagttccttacgacagcccgtcatgaccatacaaccggggctaaatacggaggagtaccctccctaggaaattaacttaggactatatacacgcgcggaataatacccatactgagctgtcaccatcagcggcccacctctcatccgcagcatataaccccaaataatggtatccgtagtctagacaccacgcctaaactaccagaaactactctaatatcatcgtcatgacatagagtaattgcataagcaaacactatacccgtaccaaagcatctcctacataagctagcagtataattagtataacatgaacataatgtaaagttagcattcatatactcgggaagtattccaataccataaatgtataaagaagagtattctaaataaagtgcaaagcttacaaaaaaggaaaggaaagctactagagccatacccaaactcttccgaaggcttccggactgtgatttctactctattcctattccactaccttaagactactaaactaacttgagagaatatgagagagttcttgctgagtgaagtgaggttgagagctccttttatatcctcccaattgttggtatttcttagcaacactactggaaatataattcccaacaatggcactggaaataatcctggtatattatgattacagatatgatccgcaagcgcatggatataccattgtagcatttcatctgggagtattcgaagttatcgtatttattttatcccaagagaagatatgataagagagaactatactaacaattcatatattacttatatatgtcaaagtctatgcaggggtcagttcaaagggtagggtgacacacagaagaaagaactaagaaccactctcactaaaatatagtctaagaaaagtatcattcatgtacttctagtatacacacatctttagtctatacttgctagtatacagtcatgcaaccaatacctcgtacccagtgtcctcctggtgtttcgagaagccacccctgactgccgagttctttacaatagaccgtcataaccaaaaaaccgaggctaaatacggaggagtaccctccccaagaaattaacttaggactatatacacgcgcggaggaatacccgtactgagttgtcaccattagcggcccacctctcatccgtagcttataaccccaattaatggtatctaataatcgaagcaccacgcttacattactaaatactactctacatccttgcaaccgacagagagcaacagaataatcggatactaaactcacaccaatacacctatctggaaagctagttacacaactatattgattcaagtataaagtaaagtcggcactcaaataatatgaatggaataaactaccgaagatgtataaagaagaatattctattaattcagtaagtcttacaaaataagaaaggaaagcttttaaagccatacccggaatctcctgaagactcgaggactatgaagactattctatttcctactccactagcactaggactactaaacaatacttgatagaactcttgatcttcttcttgaggtgtgtgagggaatgaatgagaggaggggtatttatagcccatgagatgccctgggagtgtggagatgctccaagcatcctaggagcatctttgctctcctcatgacaaatggcatgatgaagcatcctaagagcatctttctccctccttgtgacaagtgtccccggcggttatttcaggtagaaccgatcacaaccgccatggtatgtggataacttccagctgatgaagaactgggctgatcgggctggctactggttcggccgaaccaaccctggccgagcccaatcagccaaccatttggcatgtgtgtctcccagtggctcctcagcttagtggtatgaattatgggcttgtttgctcatgttaatcctgtattaccagcccaactatccaaaagtctgcttctcgatagcgtatgattgatcgttcatctattttttgtcgattctcctccatttatatgtgcttctcctgtatacatgttagtagcatagtatatagtggaagtagatgtgttatttggaatttatgcattgcaagcatagctagtcttcatatattgggtaacattgacggtcgaaacaggccgataacgaccatcaataccaatgacggttgtgacggttggacaggtcggtaatacccaccaaccgtcattggggagccatctcagccgtccagaagaaaccttgatcgaacggcgctgcgaggggttcggccaaaccatgggtcgggccggcctggcccaaaatcggtaagtggcctcctccgttgctctcctacgcagacttgtgaattttggcctaattggtcatgtcaattctgagttcttggctta

SEQ ID NO: 35060 - DNA, 2125 bp, Oryza sativa
aaaagtgcatatataagggacagtcatctacaaatggatcagcactgaagagtgcaacggattaaacaatccatgcaatttactctcataatgagcttatctaatgtatacatatccattcattaaagctattcacatgggatgactataaaacatctctctcacctgctttcttctcgattggtttatttccttctaatggagcaaagttacatctctttcacctcctttcttctcgattggtttgtttccttctaatggagcaaagtttctgtttgctataagaagcacttgagctatcaattgccgttattctgcacatgtgaaaaacacatttgttgagtcatctcataaattcaggcagcaaacaagagtcattctgacctgacatatgcagactgacacatacaagagataacaatttataattgttgccatgtttatctttacgatctgaatatgaaataatagaagattcagatgcattccttttttgaattttcagaaagtttaaaagaataactctgttcttttttttgaataaactgcaagtttgtttgataagtttccttgctatatacaaataatctccaatatgagatctttcatgatatccaaacctaaacaattaaaaatcagcagcctctcaattagctcctagaaaccacagtccagaatagtacactgaaacaacatggaaaacgttgctctgtttttcctaaagtaattatttagtaaaagcttgtactgcttcttctttaaacagtccacaataattggattgtcacatgctacagctaacaaattcaggggagaagcttcgcgacagtccctgaaagagaattttatggcagaaaaggaaaaagaaaatcataatttaccctgaaagcaaatgcagaaaagttattcttttaacaagcctgcttttcggcagttagtcagttactggccaggttttagttggtggaagtgcacataaagcttccaaatgcatacataggaggtgtattaatcaatgaccaactactatagctacagcctaatatatcccagaaagaacacacccaatcagccaatctcatttcaaaatgactgtaagaattcaagcatgaagataaatgccggcagtgatatgatataaaagtctttccccttcaatttgactacacagcaaatctatttcatcagaaattagaaagaaaacccattagatttaactgagaacaagtactatgccacaaatatgcggcggtgtgggagtggacgaccggcgaaggtcaatggcgaagaaccggatctgacagcaatgtggtgactggcggtggcggtgaatcgtgtacggctgatggagggaagctagtcggcaacacgagtattggaaaaagggatgagcggaacgaacatattcgagaatcaacctcgaggtcgacgatcggcgggcggcaatgggcgatcggcgggcggcgtggtcgtggtcgacggggatcgaccggccaggcagcgatggcgcggccgcggaagacgggcagcgactcgtggcagtgtcgaatcgggctatgcagcgcgaccgtgagggcggcgaggcgacagtgatctagcgagagatggaacgcgatgcgaggggacgtgttgcgggcttgcggccttgcgggggatttggcggagattgcgtcattggaggggatggggaggaaatcgcggcaatactggcggcacggatgcggagtgggagagaggaaggtgtgggacaggcggatctgggagggaggagaggatgactttagatcgttggatgtgtgatatgatgaatgatgaatgagtaaaactatttgttgaactataaggtagactacggagagggctctgggtccacatgtcattgggttagtgttttagtctctcatctgagcacttgggtttctagaaattatgcataggttctgaacatatttttccatgagtgatacttctacagtttggaccctatgtttcttgctatttatgtgccaccgtccttcttcttcctccagaactaacgatagacagggagagggatggcagttcgtgatggttgcggccatggcgctacagagggcggcgtctctattaggagtaaggagatggt

SEQ ID NO: 35061 - DNA, 1262 bp, Oryza sativa
tttggtcatattggagatcatcctgcctaatttatgtggcatttagcctatctcataataattctacacttgattagtaccataccacattactaaaacaacttataaaatattatcccttcgacaataatacacttacaatttaaaccttttatatgaagtgagaacgaaagtataagacaggtaattcagtttatccgttggatgactgggctggaccccatggtttctgtaggatggagtgttacaatttaaatgttatgttgttgttttgtttgcacagatatattctcaattagtcactcctataaataactgacacggttgactatcactattttgactttgatcaataattacttctaaatatcccgacgaaaataattatttttaaatattcagatcaggatgaacaaaagtatggcgcttatatttaggatgcaagtatgtttttttttagtatatgtatttttaaaaacgagtggtgaaagttccaaaataaatattgaccattgtcggtcatttcaaaatggagggagcatagattgggagaaatcgttgagacaggaatgtgtataatatttatttgaaaccatgtggttttttttctaaacacggccggtacaaatgcagacactcacacgctcgcatacttatgctagatgaacacatatgtatatatcctatccctacaaacactcagactgatataatattctcattaatactagcaaaatgcacatgctttgctatggtaaaatgcacatacttatttgaatatacgttattcacttgttttaaataaatattagactattacataatattagaaaatatcaaagactaatttgtaggacgtgcaaatttagtgatagtgggttggtcattggtggccaccaccaccattagcttttatagtagtaaaaaaaagacacacataccgttttatgacaaaatagtcacaaattaatgcttcctgttattccgataatgctgtgtgtcgggcgcctgagcggccgaaaaaaaataggcgcctcgaaccacgtgccaagtattttaaatagctttaaaacgatttttctcctaaactaattatctaatctacgatccgatcacactgttgtattcgttgcaattaaatctttataacaagaccacacatgattatattttgacaaaaaatattttagcttttttattgatattttttaaaaatgctacattatggttctttagatgtttcaaccagtagttttacgttg

SEQ ID NO: 35062 - DNA, 1519 bp, Oryza sativa
aaccataattatttttgtcactaagattcaaaccctgacgaatgaagctgtacgtgcccgattccacgccgcatgaatggtgcttcacataaactgataaattcaagttgcgttttgtttgtttccagagaaaagaaataatcaaatgccactgtcagccacgtattgttttgttcttaattagcaaagcgtgtaaaacacatcccccgctaactaaatgccatcgaaatttctgttcatgtgtttgactgccgtatagtccatgagctttaatctagttattcgatttatcagataggcaagtggtttaaaagacatagttattcaatggtgagtcgaccgaaactaaactcgatttatcatgacataatagacacggttgccacttgccacagaaagaataagagcgctgctacacgtacttaaaagtgaaatacttgcaaaatccttacaaacaataatctgaactgtttgatttaactagacgagagttacagaaaatctatatatactcacagtttgataagagtttagtagaaagaatttcatatttatagcctttttccagaagaaatgatcaaatcaagaagtgaaaccggccggagaaagtctacaccggcaggcccggctcatgcagcccacgttaggaagcctggctgcactgggtggcccaacggtggggtgggccacctcgggccagccgcagcagaatgcatgggccggcccataaatgggccactccaaagcagaccggcgctcagaggtccatcctgatgaatgaacattcatgcaggtgaccggcccaaaataattacagaaacccaaaaattacagaaaaactacgggttgttcatgttataccatttcagaacataccatttttttaaagttgataaatatacgtatccattaagttttttactaataaatacgtaagaaatcctgtcaaaacttggcaatattgctaaattgttgccaaaactttataaggtttattttagctacaatctaaacagaccttatgtatttgctaaaaacttaaaaaaaagtgcagaaaattaggaatttgctcaaaaatatggtaacagtttggaccattagataagcttaatgatttattctagcgagagattcttgctggatgtatgcatgtaaatatattgtaattacaccgtaattatgctatagttatatttgaaatatttttatcttaaagaactgatatgttatatagctacttccgaaaactagcacggaaatgcttttttgaaaaaagaaacatatgttctcctttctgtgtgaataaagcacgagcagttccagttgtatatatatgcgtccaaatatactgtcccgtggtttattcatccaaacgacaaatccttttttctaaaaaaaaattccaacgcattactttcttcccttttctctagcgaaaaaaagaaagcaccgaccaaagtggctcaaaaatggacgcgtccaaagatcgcgctgccacatgacaacggacttcgatgaa

SEQ ID NO: 35063 - DNA, 1012 bp, Oryza sativa
aaaaaacccacgaggggtcggggtgcctcggccctcggggccgaggggggtccggcccgaccccctcggggggactaagaggagggcgaacgcatcaccctcgggcccgacgtccctcggggccacgtgtgcgattgtgtctgcctcaaacctctagtcatgatactcctgatcccatgtcaccgacagaccccatgtccgatagtcgatttatttgtgttgcaataacatctatttctttgttgattttattgggggtggattagagttctccctatgctgattttatttggatggatttgagtccgatttgactaattgaagttccccctcttccagtggcgtgttcgagttggcagtttggaatttggagatgaccaagatacgagctcgatcaggaggtgattcggtggaatacatgcaacgaaccaagatggacgataggatatgcgcgctacagcaatgaattaggcaaacgtcggacaaaaacgtattgtgacgatcgtagaattatgaatttttaaaaaattttaagtaggttagattagagtagatttacatcttttaaagagcctttatcctggtaagagtaggactcgcatttaatgcagctacattttttcatccattttagctggattccatgtcgacacggtctatgcccaacttatgactgattctgggcctaaaacaggtgtataataccgccccgtaattttttccatttgggctgaaaatgtgcgtttggatgggctgtgatcggattacaatccgtcggaaaaggcccattactaccagggaaaaaaactgcccaggagtctcgccttgccctctcgccgtccgtgccgccgccgccgccgcctgcatctccccttcctaatctgtgacgacggccggagacaccgtacgttctggctggctgcagaggagagatcagaggagagggatatggtccaaggcgacaacagcaacaacatcaattgccactggggacatatcctctcgtctctcg

SEQ ID NO: 35064 - DNA, 647 bp, Oryza sativa
gccatgggatcccttcgtccccttgcctaatccaaagaggagtgagagctgagcgcacgcctgagccatgaggaggaggtggctgcccgcgaggacctccggcgagggccggggaagaggacccgctcgacgagaggaggacgcggccgccagcgacgagccctgcgcagtgagctcgaggaccttgtctgggtcgcgtcgaggcaatggcgcgtcgcggccgagccagtggcaggggagacatcgacgaagagagggagggcggctgcggccggagctacgggaggggcggctgcggccggagctacgggaggggcagcggcggtagtagccggagttgggaaagggagcggcggcggcagtcggagccatgggagggaggggcggcggtggtggtagccgggggagggagcggcggcggtggtagccggagccaggggagggagggacggcggtggttggagttacgggaggaaggggtagggcgacggcggtagccggagccgagaaagggagcggcggcagtggctagagccaggggagggaggggcggtagtggttgttggcgtcagcgccgggtaggtgtcccgcttctgatacccattagaaatcacctgatatctagtaagtagcgcctgatatctcat

SEQ ID NO: 35065 - DNA, 1274 bp, Oryza sativa
tactaaattactttggtcttgtacttgcagaaaaaatgcatttaggacgatgctgtttgaaaccccttcgggatttgtaatgttccgtgtttcagatgttttgtttagatatcctgaggtatgtataacttttcattcaccctagtgtgatgcataattcatttttcttctgttacatttaggccctacaccttatctgattttcctttccttttgtaggacatatggtcgagttttactgatccacgtaccgcacaccaggtacattttaactcctaaatttcctttcatgctttttgtttgtttatatctatttatcgatttattgttttttgcacctttactatctatgtacatcctaaccattactgttttatttttttttgcacctttactgtaaaagtacatcctaagccaactaattattgctttattattttttgcatcttaactgtacatgtaaatcctaagcctttaaatgtgtttcatacaattctatttgtatgtcatttgttctcttggttttattaagatctaagcctttaaatgcatctatttgtaggctgttcgtaccattggttttattgaggttggtaacaaatctcttgtatgggataaggatattggtcctggcgaggatttagaacaatttatcctaaaattcccaattacaaaatcattggttgttccaaacgcacagcttaaattcgttattgagaaaaaacttggaagtttacatctaccctaatgtattttaatgttgatgtttatttaatttttttgttagtgtggaattattaatgtttccctgttatatatttcttttttcagaacattggctgttggtttaatgggcgtattgttcctgagttgatttggggactaaattatgccctggatgaatttgtgcctcaagagaagggcaacctatcaaatgaatgccattttccactgagcaagcaattgcatgagcagttaaaagcatatggatttagtatctcaccacaattagtatgttttctcctttgctaatattgttattattctctgctgaccatccttttattgttttcttccttggtctgttgtgttaccttatttatttatttattgttttgtgttaccttatccttttattgtttaatcccttaaaatatttgctactgtactatctgttgggttaccttacccattattgtttaatcccttgcatatttcttgctattgttgtgttgccttattattttatccttttcattttagattaacagaga

SEQ ID NO: 35066 - DNA, 593 bp, Oryza sativa
ttccagactggccaatcatattttcgcaggcggacaagccatctgtctgcatctcaacgcctgcgaaaatagttgattttcgcaggcgtgcaataggtccgcctgcgaaaatagcttcttgcgctaaaagaaaaaggcagccaccgccgtttccggcggtagcttcccgttcccattccagttcccactcattccctatccaatcgagtgaatccaaattcaattcatccagttcatccaaaaatcaccgaataaattcatccagttcatccaaaatcaccgaatcaattctagcaaagaaagcaaataaaaacattcctaaaatcacggccgcggcccgccgtcatccacgccgctgccgcacggctgcgcctcgcccccctccgaccagatctgggagggaggggccgggagccgccgttgccccctcaatccccctcgccgccgtggccgggagccacgccgcctcgaccctcctcgctgttgccgccctctgccgccgccgtcgggaacacacgccgccaccgccgggagccgccgccgcctccggcctgcggtcggggagaggagaggggaggggagggccggagggg

SEQ ID NO: 35067 - DNA, 676 bp, Oryza sativa
tcctgcagcccgatgtggtggtgtagggaaaggatgcacatcagggtatttatagacgagatgtcagaaagcaggccatgcatttcgtgtatactcctttcgtaccaaaaaacaaattcaggctttgtcgtagtagtagtagtactagtgccagagctgttcttcttctctagcaaaacggaggaagaatggatgaagaagaaagagacatggatctatcctcagtttcgtgcattttggatactcgtatacatatgcatttgggtttctttgactagtaacaatggatcgatatatatgtacgcgtgcagaaaattggtgtctgccaaattaattggatcacaacaagaacaggatcgcaccaaggaaatcatccaagcagacagtataagtttgcaggcaggcatccatggggcatcttatttgttttttgtggacactcgaaaccaattcaaaactttttacatcaacatgcatgtatcaagcttaatttgttgtttgtgtttggacgccagtaagagaaaccatctttagtcggtcaatccaaatccacaatagttacaattccattaaaaaccgggactaaaaagcagtttataaatataaagggactgtgtgatctttagtcccggttagtaacaccaaccgggagtaaaattaagatgatctttagtcc

SEQ ID NO: 35068 - DNA, 676 bp, Oryza sativa
cttaaaatgttggaaaaaaactcaagcttgtaaaggtgtcattcttaattatgtttgtcctgctccttgatggtcaaaatattggttcgactcatttattagcattcctctacctgaggactctgttcttagagcgaaggaattttcccgaaaaaattaaatcgacggaattttacggagaattaaacttaatcatatgaaattcctgtaaaatttatgtgttctggattggcatttaataccagtttagtggtattgttttgctgttatactaggtaaaaccccgcgcgttgctgcggaaaacgcgcgggaattttagtatgtaacaataagtaaaaatagctaaacaatataaacttgcataagcactaaaatcaattgatgtgatatggctgatagagaagataaaaaataacattaactaagtgaggatgaacttacgtaagtaaataagatattataaagaataatgaagatatatattgaaatattatgttaattatgtgggatgataatttaatatacttttattttaaaagctctaaaatataaaaaaattaaattatagataatatagcatgtttgcatgatattaaatgtattgattgttagtggatgatgatgtatcaacttgttagtggatgataatgtggcatatttgcatgttaagtttaga

SEQ ID NO: 35069 - DNA, 776 bp, Oryza sativa
aaaaatggcagggctgttagcctctcaagtctcaacattggttggtagtggggcagtgaggctcaggagcatcgagcagacatgcgaccgtgtgagtgacatgatccagaggaatttcttcgcttcttttactggaggatctagaagaatttggtttgtttggttttggtgtttggcagtattggcacagcgcatgattgaaactaaaagtgttttgtgaaaaggatggaagctcacaactgatccctttcaggcttgagtacacgagaacgtgcacaattgggccgggcgtgtttttgttggtgggcctgttcttgaacctgatgggctttgctggctgggctgggctaccacgagttcatgagtggggtgatatacagggtcagtcagtcattgtctcctcgttgcattcgttttatcttgtgaaactatagtgccaaagaaagattcaacggtacgaattccatggcgacatgtatgtatatgtggtttgacaaatacacctcttcatggacgggtgcaaatttctgctccagcattacggatctgaaagtgagactagcagttttggaaatacagatttttgaccaactcgaaatgcaggcaaaacttggctatcaagtttgcccccccagccaacttggctcccaagttttaccggaccgaagacacgcaatttgcaaataaggcggtggttcgttgggccttttctgccgcataatcagttttctgtttgcaccttttaacgcataacctcaaattatttgtttccacta

SEQ ID NO: 35070 - DNA, 874 bp, Oryza sativa
gcaaaccactgtaaattctagcactataatcaatatatgtaaaaatgatgaagaaatgattaatgcattgtctgcctcagttggagagaccatagatttaagaaattctgcaatcctatgaaaaaaaaaattctgcaatgcctattttgactagaggttttcttttgacggatgacaggaatggacaaatgatcaagttgaaaatgaaatggagactgtgttggattctgtgaacaagctaagatctcttcggccacatacagatatacatgaaaggtatgcttatgttcaccagatgtatattcttttggtgtgcttcaagactgtcacttcctttttatagttttattcttattttgattcataagaatttgttcattttgaagctaataccttctgccctattttcatctggacagacggcctgcttttatgctctgccgtggggtagacattgctgccattattcagtgctaccaggcgcagatttcaactcttgcttctgtttcatctcttaaggtttgctcggtcttatacctctctggctctctcaactcggccactcacctcaagtcactgtttatgaatgccttgttcttgatggataatggcataatttctatttctatttcaattcaattcactcgagttttgtctacagatgtgcttatatttttgctaatatattttatgtctaaaatgcctaaaaagccaaaaaaaaaggagggaaaaaactgattcaaagggaacttttgcagatactgacagaggatgatccaactccacccaactgtgccacaaatattgtcaacaaagatctatccgtatacctccagctacgaggagctctaaacactgaagctgagcgtgagaa

SEQ ID NO: 35071 - DNA, 2106 bp, Oryza sativa
tatgcggcaagaatattaaaatcatggttggagaaaagatatttgataaatacatggtatggtagagtagttgctgaaagtacaacatctaacaaggacatgttaacaaaatagcactattgaaaacgagttgtcgtcattggtaggaaaaatgagttgtacaggacaaaaataacgtgaggtttcttcttatgtggaataggaagttgcactgattgtcctgtgaaggggttgccaccaaggtgtattttccatcatatatatactacctccgtcacataataactatatttctagaatttaaatttgacccaaaaagttgtcataatagagtattaattgtcctatcaatcacttctcatccaaatttctctctgttctaccctcagccaccctcccacttttatctatacactattcaatgaggggcatcatagtctttttttctcaaacctttatatatatatatatatatatagtaaatttgtttggtgctccatggtgcccgggcaccatgattgaaatttactatatacccaattcaaatgagtatgaaactttttcaaatatttaggtattaacgttaactactttagtaactagttcaaagcaagtttgaactgaattcaaacttgcttttgttagattttgattccaggtatatagcatccaaacatataattagttaggtatgtaataatggattgtgaaataaagttaaatttgagttgttttgttgctaggtataggtatgaatcgaatacttataagtaggtatatactcacaatttgaaaattttgaaaaatttgggcgaatttgtgtatttcataccatggtgcccgggcaccatggtgccccatatgagtgtcctatatatatatatatatatatatatatatatatatatatatatatatatatatatatatgccaaacaacctataattataattattttgagacggaggcagtatatcacaatatggcttgacgagtatgtgactagagtgaaaaaattcacattgggatcaagagaacataatatattgaacctataagtttatttagggtaaggatatatataaaaaagcaaatacactgactatatgtgttgattaatgttgggtttaaatgtgtcaatgagatatttttgtctttaatattttaatagttgtactacccaaattataaggagcattcacattccatgaaatatgacctgtatttttggcataatattagtgcaataaatctagccgcgtgccaatggccaatgcatgggcgtcgggcaaccccaatagtagtaaaactatctttaacgcaaatctatatacaaccaatttacataataaaaccggtatatattaccgtttaaagtggactcaaaagataacccaaaaaacatcagtcctatcatttcaccaacagctaattataagacgtaacccttgttagttagaaaataatttgagggtaaaattttatgtgttcctaatgaattaaaaattaatgctgaaaataaaacttgataaaaaaattcaaaattaactctaaaattaaaattttggttgctactaataagctgaagagcaaacggtagagcgatacaataagtagaagcggaccagacattaattaggcatcccgggtcatagcccgggaaatgggatctcttgccctttatagcctgtttgttttttccaccatggatggactctcaaagtccaaactgcaataggccacaggttgtggcccaattctgggtccacctctaactataagagtgtaacgaaagaactcataaaactaattgttatataaatgcatctttattgtatgaaaatgaagatgtgatacattgtcaacagactgtcagaaaagacaaactggtttgagttacatttatttgcacattcattcttgcatatcactatcagtactcgtcgtaaaacaaaccggtatcgagatagaaattccaaaaaaaaaaaaaaactaaacatcacgttaaatatatataaaacgtgcatcacgtgtgcaatatatatatatatatatatatgtatacatatatatatatatatatatgtatacatatatatatatat

SEQ ID NO: 35072 - DNA, 585 bp, Oryza sativa
aacatgcctatattagggcgccgcatacgcttttgtcatataatgcacaactgtgttattattttgtcttcaactatatgtttagtttgttaactaatcacatagttgggggctacacctaattaggtgcatctattcgatgcaccatattctttttcttttcgccctttacagtccacttggcaggttttggcttgaagagttagaagtactcggattattatctttgagaaggctatgatggtcgactgcaaaggactcgggggctactgtggagattatgggtaacccatatctacacggagacggtatttggattgggtaccggatacctaatgtagatagaatatcttatttgtatcttgggtttgtttcttaacttgtgtatcaaggaaacaccctgaaatttagtcggttacgactgtatcttacctatattttcatattccgttagggatatagattatcttttgtaacccggactccttcccatatataaggggggtccgggcgcctctaggggcagttgttgatttttcccgaatcatacaattaataatacactcggcggattcatccccggac

SEQ ID NO: 35073 - DNA, 731 bp, Oryza sativa
caaaattagccctgggctaatcttccaaacagggccctagtacgccggatcgccgactaacgaacaggttgccgtcccttgtttaaataaacaaacaaatatttcttccccgttttaaaatataagaaaccgaatgtgatttactataataaacaggttgccgttccttgtttaaataaataaactgtgatattttttaatattataaatctaaaccgatcagacctaagatcggatgggatattttctagtagtataccgattcttaatagtaggaaatggcttatccgttttcggtttagtccctccttcccagtaccaaatgcggcctctgctgtgcatcggtgcatgtgccttatcgagttcttcggaaacttctgtgtgttgcgagttactacttgtttcaaaatagcactattttagaaagagaaagtaaagtctaacacattcacggctaagccggcaaaattctcaattcatgttaaggacctctcaatgattgagataatttgaagaggcatttcatttggcttctacctcttatatgattcaggcagcaatccccgaaaagtaatatgattcaggcagcacacaacgatttagacaatacgcattccaaatcatatttatatattttcacgatgtaatcatgcattacaaataatcgtgcgaataaacaaataagagcaaatagttagagaagctgacagcctgcctaaccactatagtaa

SEQ ID NO: 35074 - DNA, 742 bp, Oryza sativa
attcctgcagccccgcaccactatccatggctcaacttctccctcgcccaccactgttagtactcattctacttcgttgtctgttcatcgatcacatgtgtgtgtgttcttggtcattttttggagtaagtgccgtgcttatgcgttggtatgtgtgtgtgtttgtgcaggtgaaatggaggaggaggagaggggcgcggcggccgagctggccgcgatagccggggcggctccgccgccgaaactggaggacttcctcggcggcggctgcaacgggggatcaagcggtggcgcttgcccgccggtccagacgacggcgccgacggccgccgagctgtacgagtcggagctcaagtttctcgccgccggcttccagctgagcggcgcggctggggcggcgccgccggtgcccgcgctgttgccggcggctgctctagagcagaccgacgagacgaagcagctggccttgccgccgcaggccgcggtggcgccgccgccggagcagaagaaggcggtggactcgttcgggcagagaacgtctatctaccgcggcgtcacacggtaagctatagctaagctaagctgagatcgatcagtctatgcatgtgtcggccataaaatctaaaaataaattcttagctagctcgtctaatttcttgcacgcaaactaatcatctcgtgttcgtgtgcatccttcatatatagattcacatgcatcatcgatcgtattaataggatttag

SEQ ID NO: 35075 - DNA, 503 bp, Oryza sativa
cctgcagcccggcatgtatagtctacttgggtcccacgctgattcagccgttatgtcagataaaaccggagtcaaaaccacctaaggacctaaagtgaatggttttataagctgagggatgtcatatccctggttttgtggttggggacgattttgtaactcgatgacaagttgagggaccttcggtgtactctaatgataggtatatatagagaaagtgcatatgaatatatgatgtagatacaagttagaattacttatctttaggactcccttttatcagtacaattcgtatttaaactctttatctccacctgtacacaactatagctactaacacccacctccgccgccgcagccaccgccgtcgccacaaccgccaccgcccccatggtcaccggagaagtggtgcccaccgccgccatggtctccaccatggtggtgccagcctccaccatgatctccgccgtgctcgtggtgccctccgacgtcaccaccaccat

SEQ ID NO: 35076 - DNA, 687 bp, Oryza sativa
attcctgcagccatgttctgttgatctcggtcacttcgagcgtatgtgaactcacgggacttccatataataaaataaagttaattttgtcctcgtacatctatatacacacacactaatattgtagggcttctatattttttcacattgggcctccaaaaatttaggactggccctgctcctagggttacaattttgtggttattttctatgaacgtctacgtttgtaccatgttaaaaaaatgaaacctcatgacatcttatacagtttgtttaaagggacaatttaaaccatgccatacaaattttgcaaaatttatgatatgtcaccctgacccacatgtcattgactcatgtaggtcctacatgtaattaagatatggatggcatatctcaaattttgtaaatatagggtggtatggttttaacaaaccattgtttaaaaatcattaaaatagtttacttggtgagaaaggaaggggaaaatggaagcataatcagttgtagggggaagctgtagtttagtcaacaccaatcaaacaagatacatagtattccccttctaattttagtttattgactttatcaaattcttttgtgttcatcgcgtaagcgtgaagagtgcagaaacattgttttctctcacactcgcacagttgacactggcacacagaaacagtcaaatca

SEQ ID NO: 35077 - DNA, 1106 bp, Oryza sativa
ttcctgcagccccccttcgctctgccgccatccgttgactactcattgagaacagttgcaagctaaggtatattgatctctatccggacaagactacaatgtcatatgttccctcactgcagcttgaggtatgcacctaaggatataggaatggctgaccgatcttcaagcagcgccatggttcctgataagcaaaaggagcattctccaccctaaagtttggtgacttatctgctactacagaggatttggaatcaatcacctcccgtgagaatctcagagaggggtgtgtagaacacccattgcaatatgggttctggtcaaaactgaatgatccgtagattcctgcaaaagcagcagtcgtcaaaaactacgacaaagctgagagcatcacaatttctagcaagtggagcaagttgtgacttgtgagctaggtgccaaaccatttcgttatcagaaacggtgaccaatcaattgtgatgcagtcaatggtccagtagctacaaactttaagaagaaaaacaattgttcttatcttaatgatgctattttaaagagtgtcaaatcctcattgtacaaaagaatatattttatgtttatgggaaacacgtagcaaagtttaaaataaggaatacacacttaatatacacataaaagatgataatgcaacctccccgttgaaggagcactggctgcttacaagtttggctctcacaaacacaagaaaagtgaaggtcaggatgcaggaaccattgtagttggaaaacatagcagtataagtagtcaagtagaagaacatgtcaaggtcaactgaaagttgttggatagcactcaaacataatcaagtcatactctcatatggaaatgaatgttagtgtttaggcaaagtataccaactatttggaaattatgaacgaataatgctcaatcacatcaatgtgccaaggagtctttacataactgtcaaccttggtataaatttgaaaggtaggaactccccacccaaatctcatcaaatagaaaaggaggattagataccttattttgatgtttaaaatgaagctgaacattgaactttattagaacaaaatctactggagatcatt

SEQ ID NO: 35078 - DNA, 1203 bp, Oryza sativa
taatgtcatgatttagtatattgctgtcatagtgttacttagcttgccaatagtcagcgaacttattgccaatgggaatgataggaccccttatctggtttgattcatgttagaaataaacagacaagccaatacatcgttttatagtacgaagtaattctatggtttcgtggtccaataatgcttcatattccaggtgtgcttgcacaattcaaacagatgcaccataggaattaatttcaacacccaaataaatactaagatggtgtaaaagccatcccttatggttaactgatatatgatgatcttatggaagtcaagaaagcatctcactggtaaaaataattgaatccctgatttcaatattcgtcgtaaaaaatcaactgacagagaagcatattagaatatcactcttttttttcactactacctgattttattgttttatcctactgtagaatttctaatatatcaattggacaattgagctcacaaagtcagactactaccagtgtaccgctcgttgcacggtttaaatgatcaactctttcaaaattatcaactgcagcaacctggttactgaaaatttcacagacaggaattagtttgcgtgctaaaaacgagtctagaaactatgtcaaaaaccttctttctttcttttttcccccttcttctgaggaacaatgtgccaataacccttctatgtcattcccccacaaaaaacgagtagagggctagaggctccagggcagagagatactcatattaggaaggagagagagagagagcaatgagaacacctgtggcgcgcgcctctcgttgcgcggtgggggggagggaggggggggtcttgaggctactgcccccctgccggtgctcaccagtacgagatcttgcgccgccatctgaagggagacgatgaagtggtcgcggcggcgaggtggccatcgccgtcggcggcggacgcgaggggggaatagagcagcggagcgagtgccacactgccaccattagttcattaccaaggactagaatgaaaatttttttggatcgcaaccaatatagcgatctaatataatgtagggactaaaatggaaaaacgatacaggtgtcgctgccagccaaactgtcaatacaacgaaaaaaacatttgatcgctatacgcgattcaaattcaaccagtggcggtctaaatttctagat

SEQ ID NO: 35079 - DNA, 1701 bp, Oryza sativa
ccctcccctcatgatggcaggtcagtcgaatgcacatgacgatggtggtggatggtcggtttggctacggcggatggagatgacagcggtggaggctctcggtggcagctttctaggggcattggcggttaggcaagctccagcgtccagatcttgaccacgaccaggcgaagacgtggggactatggttgtaggtgagaggtgactgtgttggctggaaatgtaacggaggtttgagcaagtaacagattcgggttggcgtgatatatttgtcaaggtgaagtttgttagtgttaggtggagtttgttagagtttgtgatgaatatgtttacaaagtcggttaaagtttaggacttagagttgtaataggtattaggactagagtaagagtcggactctatcctaggatctctcataagtagaagggtgtgcttgttgtaacttcatggcaacttagcatagcgagagggagcagctgccggcggcaaccggccgtgagtcgctgtagctctgatacactgtaatatgctagatcgaagaggaacacctgtaatcagtgccccgaagatgtaggctgcggctgaactccgttactaaatatcgtgtctcggtgtcattatcgtgtttggatctcctatggtgtttcttccgcgtttagctaccaatgtcgatttcggagctagttttataacacatatagatcttacaaaaatatgaattagctcagatcaatactatgaaattctttcattttaagactacatcaaactctaagaacagagtcctcatcgaggtagatgaatgttaaggacagctctagctctagttcgaagccacagttcacagaaggtgcacaaaactttggctctcgatagctacaatgttgacatcaatttgttcaacccacgtaaacgaaaatccctccaacacttgcgtatgccctccctgcacgaactgacaaaaatccaaatgcatccgcccgtctctagttccacttcccttcttcctttcttctatcctttcttcttggcgctgtcatgttcagcgatcctgtagagtacgtgtcgtgcattgcaggtacgagacaatgactaaggcttcgttcttttcttcaacttgagacttaaacttctcgttttccgctagtgcggttttaaaactgttaaatggttaacttccttattttttgttagcacgttttttaaatgttaaatagtgtgtttttttaaaaaaattatatagatgttgtttttaaaaaataaaattaattcatttttaaatatatataataattaaaatttaattaatcatgtgttatcgagcttgcacattttgtatgcgcagaaaattttcttcatttttgaattcattttttctggttttttctttctttttttccttctcggttttttaacatatacgtatacaaactttttatacgtatgtacaaacttggtatacatacgtatataaagtatgtatacttgtatacgtatatgtatacatatgatgttttttttggttttttaatacgtacatatacatagtttgcacacttcgtatataaagtttgtacacatcgtatataaagtttatacacattgtcgacgatggatactcgtagatcggatatagagggtattggggtacgctggtacgaagatctatgtaatacgacatcaagcaaacaagaaataggg

SEQ ID NO: 35080 - DNA, 1816 bp, Oryza sativa
caccacccctagcggcgtgtcggcggtgaggctgagtacccactgctagagcagcggctgacggccaacatcactagagtttgaagagctagggcgccgccgaatggctggagaaaggatatagtgatggtttgtttggggagcttctaactgctgcaacttctctcagaatcagaagctccgcaaatagaccaacttttggtccagattctgagaagatgtagttgtagaatccaaaagctcccctaaaaacttttggaacccagcttttccagattctcaaaaactggctaccaaccagctacttctcagaacttaagctcccccaaactagcctagggagggtagctggagagggccgggatttccggtcactggcgagatggagagggagggcaaccggaggtgggaagcggattcctgggcattgctgcagcggatcaatgctgatgggaattcgtcaaccgaatgggaacgagagagagagaagaggaaaccgatggtctttctcaccaggtctctctcctcctagccttatggcctgagaacgtgcgtcgtggactcgtgggtgcatatgcacgaaatagtatttccgaagcgcaaggggcttctttgactgattttaacaatggttattgcatgtgttcatatgtgctttgatgcgtcaagaatattaaaatcattttaggagaaaagatatataattgataaatactagtacatcgtatggtagagtaagctgctgaaagtgcaacatcaaacatggacatgttaacatattgaaaacgaatagccatgggtaggaacaaaaaggagttggagaagaaaaaacgatgagagaagagttggtagcaacatttagtaggtatcacattgttttatttggtaagaagaatagtttagatccaaactgtaaccaaaacagtaatgaagttgccaatcaacttataggacacaattttttttggcaatctaaaatggcctgaatttgctgggattttacgagaaatatagcacaagttgcgttcatgaaaagaaatatagcacaagttgcgcgaggtgtctacaaatcgggcatcaggcgctgttccaccaagcagatcgaaaatatttcaatcgtttaaaaagctaaaacacaaacaaatcactttatgaaatattttgttacaacgtatgaaacaaatagttttcaaaaaatcgggtgctgtttcaccatatataaaacaatgtttcagcaaatagcgaaaggatgtttcaattcactgcaacatttgatctatacatagtgaaatattacgagtacacttgctgaaatattgttggtaaaacaaaaattaaaacggattactttaatagaacattttcataatatgtgggtaatttgttgcaacaacgcatgtggtgggacacgtggtgggaacggcacagaggaccaggaggaggtgcgggaaggggctggcaccgatttttatggcgctgatcggacaaccgatccccaacattttcgcaagttgtgttcgcgaaaaaaaaaatattgcacaaattgcgttcgcgaaaaaaaaaagttattcggcgccagtaggcccagtacactctttccttcggccagaatccctttccggcccaactctgagcccagcaccgttgccttgaatcccattttcggcccagcccaaacccatattccaacggtcggggaacccgagcttcaacgcgaaaaaattcgaactcccgcggcggcgcctctctctctctctctctctctctctctctttctccgattcaatggcgactactcgagacctctcggcgatcg

SEQ ID NO: 35081 - DNA, 1649 bp, Oryza sativa
aatctcccctaaattttgtagcagctgaaagggattgaaaactagtagtataatgcaatgaggaaccctgttaagctttcagtaaagccgggctcgcagagccttttctctaaaataatgcaatgagggaatcaaattccaaccagatgcatccccatctgtgaaaacattagattttgcaatgccattaatttcatatctctagttcgttgctctatgatcgacacacctttttttagtccctacatcccacacacattagaccgtgagctgttcattaagcaatgcgcacttaccaataataaatgacatcccctagttttatactacatctgtcccaaaatataagaacctatagagcaggattttagtatcaattcgcataggaatgcaaaaatttggagaattttttggcgttccaaaaagacactattgtgtagttgggccatgttctagtgaccgtacagctgtaataaagctttgtactgttcccctcgtgctcactgctagcttcttgtagaagctttctacatactccctccgtcctaaaaaaaagacaaaccttgggttttcgtgtccaacttttgaccgtccgtcttatttgaaaaaattatgaaaaaaattaaaaagacaagtcacgcataaagtattaatcatgttttatcatctaacaacaatgaaaatactaattataaaaaaatttcatataagacagacagtcaaacgttggacacagaaacccagggtttgtctttttttgggacggagggagtatgtccatatgagcaataaccatgagtgaggactgaggaggttgagcttctcgtggaagcctctctaccgtggatggggcttcattaacagggagtccagtagagaagctagagatagcaggttcttgttttagtgttttacctttaaaatttaaatgagtttcttgttttcccgttctttcatttgaatgcctcacatctctctttgttcaggtgctgtagttttcgcattaaagtttgtattcctttcttttatttttcattgtgtacttaagataaatggactccggaacatgtcaatctcgtaagcaagtaagaaatattgcaatgctagctttgcttagtagtcattaccatgctcatgctagtgcgtgttagtatttgtttggaactgtcatttgtacccccaagattatatttgccagaagctacatacttttaagttgatcttttatgctgccattgtacggatttcagaggtattaaataaattttagacctaaatgcaatttttacagcattaaatgttagagttgtgaaatatttacacttttgtttcttgatttgggcattgaaatttccgtgaagttttgagatttgccattctcaagctagtggagattggacaactcttaggtccctgtgatgtcattacctcccatgtaaaaatcgttgaataaacttactacatgacagaataagtaggttcatagactattttgccacatgcaaattcaacaacctaggtgatagagagtattaagataaataacttctggtgcaaatctcagtatataccttctgttacagaatggtactccttagcacttgataaatataatataataatatttttgttcacaatgaataatgtgg

SEQ ID NO: 35082 - DNA, 608 bp, Oryza sativa
tttgtgcgcatatattgcctcatgtttctgatcgcatcgctgcggatattgattttatcttggatttaatttgggcaatggacattggacagcccgtatggaacggaaaagttgcccatgtctgcctgatcaacggcggcgtgctgcaaacccatacaatgcactacctccctccctgcactgcacctgacgagatccagagaaaaccaggataggagttggcccagccggttcgtggctagtggagtacaaaatttgtgcactgagtttggatggaagaaataggtagatgatgataattcggtcacacacatgcatgcacatacaagtgtgaaatggcagcagggagcactagctcgaccgatcattgatcagtttgatgatctttagcccgacccgactaatgaagtgatgagtgataagtgatgacaatgagataatgttccgcggcatatccgctgggtaatgcataagcattagccaaagtggtttgcgtgtttataaagttctgacgatctctgaacattatttcgaggagatatatcgtgcattcacgcggggatcgatcttatactttcagctatccttgcattatttttctatgatca

SEQ ID NO: 35083 - DNA, 669 bp, Oryza sativa
attcctgcagcccccaaaattaaaagtggatcttttgttaaactaccaatagaaatttctgtttttttcattccacacccagcatgctcccaacataaattttcagcgctcgcacacgtaccagagattgagagtcgctctctcaccctcaaaatccatggggaaggagagagaaacacaccaactagagatggggagttgctctcttacctttaaatccacatagcaagatatatggggatagaaaatccaaaactactgcagtgctttttggatctgttggatcggattttttcactgaaatctctcgaaatcaattttgggaataaaataggatgattgttggtgatattaatcccttgaatttgttcgcttctacaccctcgtatttcaaaataaatacatctatcgaaaaggttattctagttaaactcttctagtacttcttgtatgaaagttagacccaacaatggatcggagggtatgtataatagatactaccaaaattttatatttttgttaagacttatcaaattttgatttggtattaagagcgaaacgtccttgaatttttaaacactttaatagcggaagttgagtgttttaactatatctagtctattatcttaaaaaaaggtaaaattgaaaacttcaaggaccaaaacgtgc

SEQ ID NO: 35084 - DNA, 554 bp, Oryza sativa
tagtggatccccccagggttgaaggtgatgaacaggtcaggaaactatttaagccagtgattgcttcacttattattacagagcaacgacttgttcttctgaacacatatttgtcggagttaaagagggcccggggtatatacgacgcatatataccgcatttgataaaactccaggtccgagcaatacgtggtcgctcgtgtatcttgtagaaaaaataggtggtacgccctgttgctagctgctgccgtgttgttttcctgagtttatgtgtgccccaaacgtctcctttgtttgctgttcgctcaatcagccgtccatctgtctacgtgttccagtggctttttttctacggtaatgtgtgcttggattgttgctgctgctgcttgacgacaagggagcatgggatcgatgtgattttatgttgcagtcgtgttcctcttgtagtcgtaacctaaccggtgaaagccaaaggtatagctgtgaatattgagttaatttctctttgggttgtcttttattaccgatattttgttttggattaacttttaaca

SEQ ID NO: 35085 - DNA, 1026 bp, Oryza sativa
atattgtggctaatgaagtagcttgatttggccatgctttctgctcctgctagcaagatcaaactgcgatgattaatgttattagccgggagttgtctagctaggacagtgcgttgccttcggggttaattaggaggtgacaatgacatgtggggccctggacgggaggaaggccaattccagtacagtagcccggtactccatgtcactatttatcagggtcgttgtgagtggtttcgagcctcgaatatgtgatatagtacgcaggaaagagacggatcactggattgacgctttatgtggctctgccgcttcgcgccaccaattggttgttttcagaggcaagtggccagtttggtttggtgcttatccttttgcaactaaacaattacggagaccttaattccatggcctatctatacgactatactgtatctgctttacatattcaggggtttgtttaacgcatagagcgcctagctagtcacacgccacaatggccgtgcacaaaagcatcggttaatttccggcaatcgcatgcaaaggcaaaggaggttagggggaggaaagcgagcattaagccattaattcccctgtgattgttgtgccctgtttcgtgatcaagttgcaatgagacgggaatatgccgtgcactcgtgcaaccctcggcttttgcacctactcgagaacaattaagaaaaggcaagtgtctgtctggaggcactagtagatagcgtactcgttgcgtgcgcaggtgtaaagcgcaacggagaccaatctgggtgtgcgagcgagcggcagcgactgcgaggcagcatcaggatcgcagagttacaagttgcaagttgcaaggcctttccgagctccggcggcttctctcggttcgcctgcgagtgcgaggcagctcatgcacgcgttgtgttccccctgtctcgagagggtgttgtactgggcctctagtgggcttctttaggctacaattcatttcgtcggcgaatttcctataggaataagtccactttgact

SEQ ID NO: 35086 - DNA, 528 bp, Oryza sativa
cttccagtactcgttcaggtgccgtatatatggcctccgcaccgtcggcgtccaagctgcaggagcgcctcctcctccgcctcgctcgccgccagatcttcgctctgtaacacggtcgcggggcggacatcgtgacaggatgtgcggtcaatctgctcctgcagcatcctccacttcctcagcttcttcattatcttcttcatcccttcggcttgcgacgaccaactccagttcatcgccggcagaatctggatttgttgggatttttctgatggattcatggatcgctacgggaccacgccataaatgggccagaatgcccgtgttctactcggcctcagactcctaatttcctttgagaattctcccccccacccatatgtaccagcccaagctcccaccaaatacttctctgtgacttgtgacgaggaaaaagtacaccggacatacctactcttgtcaccgatttacaaaatcatcccttaaccaaaaaaccaaatacaatgtatcctccaacttttaaaacca

SEQ ID NO: 35087 - DNA, 506 bp, Oryza sativa
tcaaaatgtcctagagacataggcctggtttagttatcaaccttttctttaaactctttatttttccctcatattaaaactttcctacacacataaactttcaactttttcatcacattgtttcaatttcaatcaaactttcaattttaacgtcaactgaacacacccagaaagacacaggatttttctgctttcgatacctgacataagagatcgtgccatcgcgataatgcaaaggagaggagaggcagtaataggcctttggatctgcactagtaccattttcaggttagtttttttattttttgtcaagaattttcaggttagttgtgttcatgttccctactagcagcttcgttctcgcttcgaccatgtggcaagggtggcactgcaatcttctctcctataatagcagtagtagattccagaccggcagaagcttgcattcaaagcaggctgattaatctggttcagatagagaatatcgctcctgcgcatgcatggga

SEQ ID NO: 35088 - DNA, 652 bp, Oryza sativa
  unsure (1)..(652): unsure at all n locations
actatagggcgaattcgagctcggtacccatccacgaatcatgtgcagtaagtccactagttgcagatcgatgctaaccacatccagattgaaggagtagcgtgggtaaggaggtcttctacctgcccgccgtcgtcacgtccttccttcccgagcgccgccgagccgcccgacgccgccccttcctccttccggctcctggacgccaggcgtgcgtcgagctcgcaccacgccgtcgcccgaagccgccccgagctgcgccgccggcccaaagccgccgcgctcctatcgtggccgcgccgccgagcacggccgctctcgccccctccccaaccgcgccggagccccctccctctacccggcgcaccccggcaccccgccctccggcgccctcctgcctgcgccgctcaggccgcgcttcgtcgctccgctgccggcgctctcctgctccgaggcagcggagagagagaagaaatgagcgagagaaggaagggaaagagagagaagagaagaagagagaaagggaagagagaaaagcggtgggactgggacctaccaatgctggaatttttacatttcgatcctttntaaaaacttattttacaaataaactcttgaaaaaacttaatccaagaatgatctttnttttttt

SEQ ID NO: 35089 - DNA, 849 bp, Oryza sativa
ccaacaggacggcgccagagaggatggcgccgtcctcctgccaccgtggcgcacgcgaaccgacgtggcaggaggagggcgccagccatgctggcgccgccgcctccattcctgtttctctatatagagttgcaacggggtcatttttattttattttttacggatgttttttcacacttaggatcacgatacaaccaaccacaaaaaaaatttaaactcgaactaccacttaactaaggctgaaaatagctagcataccacttagtctactttgcaccttcactaaaattagaccataattcctttagtaaaactctttgatcagcatgttaaacataatgcactctaccactatatgaaattacttaatctaattcaaaatataaccacatgaaatgacatatataagttaaacagtacatagagatgcaattttttttatttttatttcatttttttgatatttttttcacgcttaggagaacataggaaccaaccgtataaaaaataaactcaaacggataaaatatgtgacttgtagaattttccaaaactctaccgaaacggacaaaatatgttatctattaaaataggcgtaactttctcatacgcactcagaatcaggcaaataatatatgcacggacatctacagaaaatgttacatccgattcttcccagctttgctgggttcggcgatattaaaacctccaaattccgcttgcaagattgtgttttcgaggagagaagtaattcggtagaactttggaaaattccacatgccacatattttgtgcgtttgagtttattttttacatggttgattcctgtgagttcctaagtgtgaaaa

SEQ ID NO: 35090 - DNA, 530 bp, Oryza sativa
ataggcgggaagacacggaacacctggcagcctagcctgcctggccgagactctcccgtacacgcgtcccctgtgttgacctgaccccatccatcgcaccgtcacaagaatcacacgcacgcgcacgcgcatccgccgacctcgacccagtctgccacagcacaccacagcacagcagcagcgcgtagccgatggagccctacgcgtacgcgtgcgcgtgcgcgagcgcgaggcggcgagcgagacggacatgtgggttgctgcggtttgctccccccggcgaaaaaaaacccaccgccaccgccactccgcgccgtcgcgcggcgcgcgggggtttgtttgggcttgggccggcgggcgtccaaccaaaaggctgcagcgagtggcccactgctctgacgtggggatggaggtggcagtggcggtggcacggggggtgacgtcaggttggttgggttcacggcgtgagctgaccagtagtagggagtaggagtagctgctagcggtcagtcaacctagaaaaggcccaa

SEQ ID NO: 35091 - DNA, 610 bp, Oryza sativa
caaaaagtaattcttatcatgtttcaaggctgtgtgtttagatctaaagtgaatccaaacttcagtccttttccatcacatcaatctgtcatacacacataactttttagtcacatcatctttaatttcaaccaaaatctaaactttgcaccgaaaacacagccttcctctctctctctctctttttctcttgtcgcgtcaaaaagaagtcagaaatgtgcagctgtgctcgtgctccgcgtgaacagaatcgtatggtaggttaatgtctccgtcagcatcatgggatccatgcgatgaaatcggaataaaaaatacgctgctagtaaaatcggttttattttattaggtatgtttaattcatttaaactacgttcagtgtttgggtgttacttttataataattggctgtagctctgatgagcaaaagccgagatgttttatttcattatctaaaaaaagtaaaatctgtttatttcacagagcaattcatcatcgcaaaacttgatcaaatttcagcaaaatatatatgaaatagcagtccaggttaacattttgaaatgccaaaggtaaataaaacgcttctaattaacattcgattgggcggcgc

SEQ ID NO: 35092 - DNA, 971 bp, Oryza sativa
aacattatcattcattaaagatgattttaacagttgatttatatgagttattatactatatcactagaaaactagtattctgttgtgagtagttataaggtggtaggctggtgaccgttataaaatacccctttcgtttcactatatagcgacctaggatcagattaggacgaatcagtatctgtaccctgcagtaccgtcctattttggatatgtttagttcacgccaaaattagaagtttggttgaagttgaaagtttgtgtataggaaagttctgatatgatgaaaaaattggaagtttgaaaaaaaaatttaaaactaaactcagcctttagtagaatttgatagtggcagctaccacttccacttgtgcgtgccgtttcggacattttgcactgcagctttcaataccaagcccgaacgttgaacggaaacagcggatgtagtactagcaaataaattcgggcagatgagcaccaataaatgggtcatcactcatcaatcttgtggtaatctgtttggccttcattgcactctcaatgctctacagaaaagaactgaaggcgtttggacataacaatacacatcatcaacatctcgcgtacatcctccgtcccaattaaaactaactttatagctacaaatttatagctaaaagttaacttattttaaatagaggagtaagtgttttcacttgaaaaaactcaagcttgtcaagttatcattcttatgtttggcctgttgctttgtggtcaaaatattgggtcgaatcatctattactactagcattaatgtggctccttaaatggtcccttagagagcgattgttgcaggcgagagaatttatatctgtccgtaacttaccgagagtctcctccaaaaaatcaaatctatagtactatctttgttttaaattataagtcgttttaattttgatcaaaataaactgcttcaaattgggctgcagga

SEQ ID NO: 35093 - DNA, 569 bp, Oryza sativa
gcatcaatactacctcgggatctttttttggacggttttatatagttaaggtattccggttaggagacctcagacagatttcgtgtataaattgagggacgtctggtgaacttagggcctgttcactttgatgccattttcaatcttaccaaattttggtaaagttgtcaaaaaaagtggctacatttagtttgctgctaaattttggtaactatataagaaatcctgccaaaattttgacaagttatcaaaattttggccactataaattttggtaataccaaaatttggtaaggttttttttggcatcaaagtgaataggcgcttggtcctttctgagctaaaccgagtccaaattccaaaagctctcccgacatgggccgccacgatcagtttcaggtggccgtgagaagattccagaatggacggtcatggggatgggggaggtcaacacgactcacaaaggtatagtaggaggcgcggctgccacgagacgaggtacgtggcccccatgcagcacgccgtggcgacacctctgcacactgatcaactccactcacctcactcct

SEQ ID NO: 35094 - DNA, 736 bp, Oryza sativa
aaagctattatattttggaccatagagttagtatattcttaaacggttgaagtagtacatagatccaaggttacttccatgttcaattatctaaaaaagccgttaatttatgtattgtttgtttcagcttaaaattattgtaatctagattgttaagtcaaattactataacctggattataataagccctggattataataagccgacctagaatactccctcgggttctatattaattgacgttttggacaaggttgaggttaaacttttataattttgaccatcaataattttaaaaatatttagtttagagaaactataaaaacatatatagatttatctttcaaaacactataataaaagtaaacatacatttatttattgtatatattataatagaaaaataaggtcaaacgtatatcttgtaaagcgtgttattgtccaaagcgtcaattaaaataaaaccggaggaagtaagttgttactgtttgtttgtctagattattagctgtttgttaggtgttagtcacccaataaactagaaaaagcacctatagagtggattactatagtaatctagcttatagattgtaataatatattataataaactatttattttaatttacttctaataatttagattataataatcctaagttgaaacaaactcgttgtttgtcatgtagaatcagagagcgagaataattaatctcagacagcgcgcattgggg

SEQ ID NO: 35095 - DNA, 591 bp, Oryza sativa
acaagactgcacgcaggcatccattggagttcatttggtcatcttatttgttttttcgtggacacaggaaatcaattcaacactttttacacattaatatttgtcaagcttaatttaaatgttgttcggtttgaacgtcatagtcactccacctgtttttaaaatatagttgttatagactatcaccgtgcaaaatgtatcaagcgtatatgtttatagctccattttctctctcggtaccagcgacgtcgtcatatccatgaacggtggttgcttgagcttgaggagcatcgccttctcgagaacgccctctcgatgtgtatcttcttcttaattaggccctgttagttgcttcaaaaacgaggaaaattttctgcgcatgcaaaattaagaagctcgataacacatgattaattaaatattaaattttacatatttaaaaagaattaatttgattttttttaaaaaaacttctatataatttcttttgaaaaaacacatcatttaatatttgaaaaaagtgctaacgaaaaacgagaaagttaaccatttaaccgtttgaagaacgtgctaacggaaaacgacgaggtt

SEQ ID NO: 35096 - DNA, 712 bp, Oryza sativa
tacgttcgttgaggaagtctgtcagataatctatctatccaatgctcacttacaggtggggccagcgttttagttggtaggagtagattccatctatcttatcttgctctaggcccctcctcatctttgacatcgtagctattgtactgctgctactcgaagcacgccagcatggaacaactgaattttgatgccgtctgccgatctattcttagtacttcacacaatcacgattctgaatccaattcaaaagttctaagtagtattgcaattcacagggcctgtttggtacagctccgactcctaaatttagctgtaggagttgggtctggagtgaagtcgtggaactgcctaaatctagctccacaacactagttcattatgtgaaaaaacttcacatatctccactcccagttttaatggagctggaattgtttggctaagctccagggatagagctgagctgtgccaaacagaccatataatataatcgtatacattaaaaccgtgaaatcgtaaattctacctacgtaaaattgtggaatcaagcatcttaattaggatcataaattcgcatgacagagtcgagattttaaccttgctcgcaactactctctcatgcccttatcctttgcaatattaacttcttgttcacaactactctctaatccccttatccttgccattttaacttgaattgctaagcagacag

SEQ ID NO: 35097 - DNA, 740 bp, Oryza sativa
tgcatgcatggtaagagatatatgtgtgtgaaacaatttatctctttccgactctgtgtgtgaaacaatgtatgtatgcaccgctttattttcgttcaataaatatgcagtcccgtgcacctaaagagatgtatatgcaccaatatatatatagtcccgtgtacctaattagtatactccctgttgaatacttaatacgtctcaaaataaatgaatctataatggaatgaaatatttcatattataatgaatatgaacatgctagaaaattacacattctatttaagattggtttattttgagatagtgggagtatttcttatttgcaaatagttggatttgtttttgcaaaactgtaagtcaattattcttgtcttttgaatacattgaaaggcataaatacgtaaaactacaaaagaaaaagtaattagatgtagtagtagagtataaggattacaaaaacaaacgaaagaaaagaaaaggaaaaaaaaggcataccttgtctccgtgggctgcatcggaggaaaatataataatttctaggtctatatctcccaaaaaaaggcataccttgtctatgttttgggatgaaagtagtaagtaactaacaatgtaacgatgaagaacattaaataatagaatagtacgcactagtgtgcaggacagatcaagcaaccaagagctacgaacaaccatctcaggtggtgtttgggaaggaaggattaaactttggtctctct

SEQ ID NO: 35098 - DNA, 674 bp, Oryza sativa
cctgcaccccaaagatgacattgaaagacatgggattcaaacagaagctgattcctcagttgagggtgtttctttgaagaatgggctacgcacatctgtatcctttataagaaaattcaatcctgataccatcatgcccttcatggagatacatagatcttagttttcattcccatgataaatgcatctaaacttaatatatcattgcttttcctatgctacatttttttaaaaacagctcaaggcgatctgcagtatcacggagagatggattgcggacaagtcctccttgggcaaagaagatgcttcactgaccgaaaacaccattgaaaatgctaaagagctgctgactttctgccggcgtgcaatgggtattgctgacctgtgagtttggaatacggaggttttgacgtagagggcaaccacgtacgtgaaaaattactaggagttttgctgtatagcacgagatcatccggaagtctgttaaaaccaactaggagttttgctgtagaggatcacagtgatgcatagatcatcagttgctaaagtagatcactactcacatagctctgccaatttacattgatgtggttacattattggtgctagcgatgtaatgaacgcgcataaaaatgatacggggctagaggtttctgatcaacttgtgctcatgg

SEQ ID NO: 35099 - DNA, 866 bp, Oryza sativa
tatatacaggggtgttacaaggttcatatatatattggtcttgactaatctttcacttgtagcctagctagccatgtttggcctcttgcacgtaagtctcaggtaactgatgttttgtgtgatgcaaccatgtagacatcaccagcatgggcgatggcaagcaaggatcggaagagtggctggcaacaaggatctctacctcggaacattcggtaattaagtttgtacattaatttccatgttgaatctgtcgtccatgttcattttttttgtttagcagaaatttgttaagcctttttttgttgccctcttcttcaacaaatgtatgacctgataagaaaaaatgatatcaataacccaacaaaacctctcaacatttgactaattatatctgggtgatgtttgcagaaaacacgcatgtaggcaatactttcatgcatgtaggcaatactactttcatactaatgttttctaatactagtggatctactgacaatgcaatgtcagtgtgctcatcatgtagaagaatgctcaagagttttctcgacgctaagctatacataatctttgtcattagaactttcttttatcaaagatgaaattgcaagtaggagggtgcatgcacgtgttgggcccctcattagctagcattagtcattttcttacactcaacattacaatattaagcccttgcacgtaggttccatcttaatttatgctttgcacacacagggcttgtagctagattcgtcgacatattttatgcaggtcaaaaacatctacttctgaccaagatgtaagcatgcccacatttgattcgaaatttgtcatcttttgcgcgccatgcatgatggggctgcaggaat

SEQ ID NO: 35100 - DNA, 647 bp, Oryza sativa
tatgtgtagctttatgcggcatgacacaagcatttagcttttaaataattatcatgtaccccagttctacttatatcattttgtgacaatcataaacaataccatcctagcaacacaagtgaatagtgtttgtttgtccaaagtatgttattccaatgcacaatctcgttaattggtgtcaacagcatgctgcctaagctgctcttgttgggaagttatacaaaggatcgtgttgccaatgcaacttcaagctagccaaccaaatctaactataaatgttaaatagtggtgatgctgcaaccaccaagtaacacaattcaacaaaatctaaattttaaatctacaacaaaatggacataatccaatacatcattattgaccttttcttttttaccttatctgccggctcgctctgcagcaagcatttctcgacatgcagcaccttgtcgaagaaccctggcgcgtgcaatccaagcgaatagccatcaccttcaactttttcctccttcaccacctcatcatccttctcctccttccactctctttgcatccatctctttgttccaaaagagaactccatctggaaacaagagaaaaaacaactcattttttgcgccaaaaacccctcctaaaccctcctaaacccc

SEQ ID NO: 35101 - DNA, 590 bp, Oryza sativa
ggctccctccatctcaaaatataataatttttaactctagaatttatcccaaaaatataacaatttatccaccaacattatcttcccaaccaatcgcaaccctccaccattcatttttcccagttcccacctacctccactactcatttaatcacaaccctacaccattcacttctatctactttcttaataacggtatccaattctaaaacttcttatattttgggacggatgaagtaagtgagtttgagaggagaggaaaagagaagattgagaagatacgcaaaacgagatgagctattagcgtatgattaattaaacttcaaaattagattaatatgtttttttaagtaactttcgtatagatttttttttgcaaaaaatacaccgtttagtagttcgggaagcgtgcgcgcagaaaaacaaacaaactttctcacaatctccttgggccgaacgcagtagattcatcaactaaataaactatcgtaaacctttttagatttctcactatcgatcatgtgagaatgatgttactagatttatcactaaataaactattgtaatatgctacaccgtttattaaaaat

SEQ ID NO: 35102 - DNA, 747 bp, Oryza sativa
gtcgtagcgtatggccaccctactacctctcgatctttctcccgatcttctctttggcagatcgaaaaactcttaaccgcgcaagctggatgtgatgtcacgtacgcgaccgatccagccgtacgtgacagtcacaaatcacagaaacgagagacgaccgagtgaggcgacggatccgttcctttgccgtcccggctcctcccggccgctggtctcgccgtcacgcgtcgcgacaaacacaaacacacacacacggttcgatccccacgcgagcgagccacgtatagtgctccgttgtttcaattcggcgcgatccaggcgtgacggtttctttaattaaaaatttctgcttttggacgaaacggacgctgcagaaataacgcagcgggtcgcaattaattggggcgtgaggtcagccaaagtggacgtgcaaccgcgcgggggccaaaatggcacgtatctggcccggaaatgggagacaccgctcgcacaccccttcaaattttggtaacggccaagcggatgcccatagcgcagcgcgcagtactactgattgcgtgcaccgatggcgacgttgcacagcgagagcggccaaattaacacagctgcaagataaagattttttttttcgcggggaaataaacgatcacggtgagattattatgctgaaaatctttactcctactttattgtgctatatttgttgctgtaaatggaacgggggtgggaggctgagattatggaggg

SEQ ID NO: 35103 - DNA, 515 bp, Oryza sativa
acaaataattacattgtattatatttacatatatcaatttttttctaaaaaagttttatgacaaaatgtattagctggtcccttaaatgaaatgggccgtggaggtgggccggtccagtaagagtggaacgttctagagggccctggagaggggcaagcccgtaaattcgccgccgcgtcgcctccaccttaaaaccctaaaccccacgagcgcggcggaggcgatcgaagagtgtagaacttttgctcggtcttttttgcttgcttcgcaagaagaaaaagaagagggcggcggcgatggcgaggcggctgatcccgtcgctgaaccgcgtgctggtggagaagctggtgcagcccaagaagagcgccggcggcatgctcctccctgagacgtccaagcaggtttcccccacgctgttcttccccccctcgatctctcgaggagctactgctgcttctgcttgctgcttcaagttggctgcgagtgtgatgcgatccggcgaggggaggggagt

SEQ ID NO: 35104 - DNA, 519 bp, Oryza sativa
caccgagcctgttctcaaaagaggcagaaaattatattttaaaaaaatgaaaggataaaaatagaaattcgggatggaaaggtgaacagctgcagaaagttgaatgaggaattggacgcaaaaaccaaaatggttatgaataggagatgcgcatataaaatagtgaagcatcaaacacttgagtaagacttaaccatgaaattcgtacaaaaatacaaacaaaattatattacatagtgtgtgtgaggatggaaggctgaaacgctcgttgcggagaactgcaatgtcaaagacaaatccaaaaattccagctagagaaacacagaattctcaaatccgacccagaccacaaatccaaaaaaaattccaccaggttagaattctcaaatccaaccgaaacccagaattctcaaatccaacccaaaccccgggcaaaatggggccgtgcgacaaactcaaccgaaaattcagaaagtaaccgaaccacccaaccaaataaatggacgagagcaaatgggg

SEQ ID NO: 35105 - DNA, 511 bp, Oryza sativa
tcttctgggcttctggctacacggcactcgtacgaaaattaaaactgaagtaaaggcgcatgaattcaattcactatcgggacatgttttctagtaggttcgttggcaaatcattgctagtatatactcctgcgctaaccacctcgccactccacgcaaatgcgagtgcaattccgtactaatttccttatacaattcttgtttcaaaaatatatataatttgcttaaattttcatcaaataatgcactatagcagactcatactagcaaaataaacagagagagagaaaaaaaatataaccttctgccaatctgcctcccaatcgtccagccattcaaaagcagtaagtagaaagatgaacaaacaaaaaacacacacaaaagaaaaagagagagagaaactaaaaaagaaaaaacgcacagagaaaacaggagagggagctagaggtcttaccaaggagcttccagaacgcaaacccgccggcagccggctcaaatggcgctcgctcgc

SEQ ID NO: 35106 - DNA, 1164 bp, Oryza sativa
  unsure (1)..(1164): unsure at all n locations
agaattagataagtacccatatgaaattgctactgagagaataggcagggtcatacatggaaatcagcacaagatttgtttcacggtgccaacggcgccaactctcccctgctaccgtacgtccttgagacagggcaaaagagtcattttttccaacatattggatggcatcacatgcaatttcagccaaatcaaaggtgtaatcccacttaacagccatgacgtgtcacgtagaaacatcaccaggacagttaaaattggcggtgcacggggttcatctcattgaaaaggggaaacgagagaaaaaaagacttggaaaaataccgtcaaattttctagattaattaagagacatgagaaaaatgattagtgattagtttctgctttctagagcctcctagagaagaagcacacgaaggacacttgattgatgcagatcatgctcctccgaccatttctttttctttttatttttctctactatcttttgatctgctccatccaatccttgacttggacatcctgggccaaccatatcaatgattttgtttatgtggctaatcttgattgtggtcacagttaattattttctcctttttttctgaggctgccattggcctgatcattaaacaaatgctaataaaaacaaaaagaaatcattagagtttgttttaataaatggagagatctagcttggtgttgcagaaatgcagactgccagagttgcattaacatgacacctgggcatggtttctctacatcctgacacgtgtccctgggagtcacacacatggctgttgcctgttgtccctctcagatcacaagcaacatttttctaggataaaacagttgtttttttttaagaatttttttaaccaaacgtgtntaagggagaaaatgatgtggatagatcttgttctcgaagacatggggagggcgatntgcaatactaattccacattttgtaccctaaataataaaaaaacatgctgaaagaagaggaaccaggggcatagcgtacggacggtgtctttgacgtggttagtttccatgattgagattatggttgcccccttccgcaatccacgcacattatgaactctgacagaaacgtacaccttgatctctaaggcatgtctcaggtcatatatgcatgttagtact

SEQ ID NO: 35107 - DNA, 844 bp, Oryza sativa
agtgttaggatcagtacatgccacatttccgagtgttcctgcaagattggtcgatcgatcaaacatcgcgttattacaagaagcgtgtagtgtacttgaacatgagaaaattcatcaggtgcaaagttagatcacttgctatgaacaaaaagctactactagtattttgctgtgcttcaaatgtggtatctacatgttcgtttagactcaaaaaacaaatctgcttcacatggattcgtgttaattctcgtcttgtagtttttcatgtttgcgtgtgaaattgcacagagagtttgcatgggccgggaagaacagaagatagctgatggtgatcctgaggatgatgagccatgatccgcctcgagattcgctttcgtccatgatgtgccctgctgctctgcaagtggccaatatcaattcccctaaaaaaaatgtgggcaatatgaaatcacggtcacaaacagagcctgtaattaacaaaaaaaacttgtaatgctaagcttacaaaaataagattttataaattgtaatgctgggcagggcagacagccggggcccacatgaggaacaaaatcggacagtacttgtactgtagtttcatggtagcagggagtacacataggggtacatggttagggacgcttgtgatgatggagaggcgacatttaattccaagctcacatgcttagcttagcctgattgatcacacttttgtttgtatcaggcggtgaatttttttcttttgttatcctttgattctgcttacctagtctgtgtttagttcagtgcaaagtttagattttgattgaaattggaaatgatgtgactgaaaagttatgtgtac

SEQ ID NO: 35108 - DNA, 742 bp, Oryza sativa
attgagaggttttatatatgttcaaaaaaatatctgaaaatataagaattttacgctaaaaaagatagtatctgaagagatatctaaggtattagagtcagcaaaattagcattagaaaatctggtattataccttccttaagatgataaatttatctgtcattcataaaacataagtatttgtaggcgatatgattatgggggaagatatataggcggatagatttctcagatcacataaattaagttaatcgttagacttattagagtcagtcagtcagcaccgtttccaccgtgtttgcaagatcacagagaatcggatgaaaaacgatctacaggagcgtggaaagttcataaatataaatatcgacctgtccacatggtcttgccccagtcatatttgatttttcggtatacgtacagctttttttgaaaactgtatacgtacagcttcgatcttttattctcctcgaatgcgcgtaggccagcgtgtagctacttctatatgttacgtactaacctgttataagacgttttaactttgattaaaatcaatctgttttaagtttgactaattttatagacaaatatagtaatatttataatactaaattatttttatcaaatcaataattgaatatattttcataataaatttgttttgggttaaaaatgttactactttttttctacaaacttggtcaaacttaaaaaagtttaactttaaccaaagtcaaaacgt

SEQ ID NO: 35109 - DNA, 569 bp, Oryza sativa
gagaccttttcctaatttcgtccaatcctggatcttggcacctaaccttgataagtatgcttgcttgcattaataagggcttctctgctctgggtttattttcttgttatttggccaatgccctttattcttgacatgggacaaattgaagaacaacacaagaaatcttcaccttaaccaactacttcatattctccctctttttttgtcacatccagtcacattaaaatctcatcctcaattttatactggttcaatctgaatattcttagtcaaagcagagcaaactagtatctcaaatgaatcttgaattttctttttttaatcttggaaggttagctgaggtgccagtgtgtttcttatcgattaattatttgatctagacgagctgacaaaatagactttccacttcaaatcgctctcattacgtttctgaatttttttttgtgtggccacaaacaaaataacataatatttattcggacgttaagaaggacatgtatggacccaaggaagctttttttaacgatgacgtcaggaaacacctcggacactgaggtcttaatttc

SEQ ID NO: 35110 - DNA, 570 bp, Oryza sativa
ctctctaataaaatggcttattagaaaatatggacaacctatacgactttttcaatattgttaccactagattatttttggatgattttcttaagtttggggttagacttgtttgatgtacagggcaaaaaccgcgattcaaatctgggccggatcactagtatagattgcggcccagactgcatatggacttaaaaatccttccaaaaaaaaaaaaaacagcacgagctgcgctatcttggtttggttcaaacagcacgatgattttagtggctttgttggcgcgagttgggtggtttcccgcgctcgtagcgtggcaatgttgcagcgtgacgagtcaaccaaaaatagcttgggggtctcgaatcgtaccgcactttagccgcaaacggccgaccgactcgactcctccctccatttcgactcggggctccggccggcctcttcttcttccggtgagccaccgacaattcgattcttacatttcgtgatcgatcgattgatttcgtgttgtaatcttgcgtgatcgatcatggtgtgtcaattaatggcaagggcgtggtcatggag

SEQ ID NO: 35111 - DNA, 1099 bp, Oryza sativa
ggtatgcaaaatatatacataatcgcatctctaatttttttctagttatttccgtatagaactgttatccaacactatatggactcaagattgaatacgagaaaatatatagtatccaaatctccttttcttttttagttcatatattcagttattcacacttcaggaagaaaaaggtttgcgataaaacgtacatctattaaacttgttacttttactcagtaaatagtctactacaccaatttactccgtaccaacaattaaattataaaatcatccatatagtgataaaaggatactctgacatagaaatttatcatattgagcggtgctagcattacttcctcaaacaaaaaaaacaatcctgagtactttcgtagtatcaatcaatttatcaatgacacagtgattcgtgtatcttctgtataatgagtttgtaccttaaagcttcactaatttatcaatctggaaatttaggggattcgcaaaaaaaaaaatgcatactttctcaaactatcctgcattttgcttctaattttgctccctacaaaagtttcaaaaactcttcggtatagccatcagtgatagtttgagaatttagcattagctacaaattttcacacaagaaaagatctgacaacatttcattgacgcatgggtagctccaatcacaattgaggatgaggaactacatcaactttggtagtttggttgcctcttcccatctgcttgttctttaagagaacctctcttctcttccgcatgagatatgtcaattaaaaactcattcagcttaagctgcgtcctccacaactaataaaccccatgggggaggttcagttaatgaaaactctatattcttgttaaaacccccacaacatggctttgcagactgcgattccatttccgacctgcaagtctaccaataaaaaagaaaaaaaacagggttttccatcaggggggcatccacgcaagtgttcatcatctatactactattaaaagaaagtagtggtggtgctgagtcttcaaccatcactgacatgtgggacaagatattgggatttgggtgagtatagtcgaactgcagctctttaattt

SEQ ID NO: 35112 - DNA, 752 bp, Oryza sativa
tttctttccagatcctttggttcctgcatgatctgtttgattcacagcaaaaactttttccatgaaagtgatcgaattcgatttgcatctgtcacgtactgaaactctctctctctctctctctctctctccatctgtccattgacagaagagcccatcaaggcgactattgctcgatttgattggcttcattgtcgcgatgtttaggcaaaattttgacaggtttggccgaataaacagcatgcaagatcgagttaatgataatggccaaaattacgggagaaggattttggtggccatgggccttaccaatattcttaccagaaaaaagtttaccgggggttgccttacttaattgcaagtcaactgataactaaccaattgttgggttaccggcttactgcggcacaacaccggcatcatatcatatcactgatcgtctgaatcgcaacagtgaaaattaagctaactttctaaagataaaaattcagcctaatttctaagccttcctattcgaatatccacaaattattatcattctgagcaacgacgtgaggaggaagaagaagattaaagagagtaattaatccacccatggacagggagatcgatcgccggccattactgcacgtacacacacgcacgacgtgatggccgagcaaaattaaagattaataaagaaaaaacctttcgatctcttacggaggagacttggagcaccactcgatcgatctcagctgcaattaaaatca

SEQ ID NO: 35113 - DNA, 1387 bp, Oryza sativa
tttttaaaaaaaaactcatcatttaactgtttaaaaaacgtacacgtggaaaacaagggaatagaagttgaaacctacgtccgaacgcaccctagctagcttccatcttatgatctcacattcggaataaaaaaattaagatcttttattatagtatggcattgtgagatcatctccacatgcatatgtgattagaagttgataaaaaaacatttttaaaaaaaaatattgaccacctttcgtagcaatgaaaaagcattggccgaaaatgaaattagggtgtcctggtttagcttgagctcccctttaccatccatccaaaaggtttgacaaagacgaccaaacaaactgaaagaaagctaaagattaagaatctaattaagcttgctttgtttgtgtgtgaaaggggaggcgtttaaaaattagggcagggagaaaaaaaaaagaagtatgagaaacgttgttcagctggcaagtcaaccaaaccgaccacctgttaggctctaaaacaatactaacttgacaattaaaggatctaatatttttcttatttttgttttcggaaataatattggaatatattattttgccggctaaaaatacttctccgggtcaacgtgttgaaattgcataaaaaaacaagttttaagaaataacatacattttctaaccgtttagatttcctcgctggtttaattgactcacataaaaaacaaacagaataaaagtagtgcaaaaaccatttgggtagaaaagtgatttatattcaaaaatcccaaaacaatcggtatatgtatctccaaaaatctattagtagtaattaatcagattgtactagtaggagtgttattaattttgtcgcgactcacgaggcaaatcatgggggcgcattacttaccactgacaggtggcccccaccggacgcggccaatcaggagaaacccatgacgcgctcgagtgtaccacgtccgcaccttttgttagactgatgtgtgggcccccatccagctcagcatctgatgggccgccaccagcctgagctggcgcacacaaaaggcacaccctgttttactacacgaactcatagtgtctgccttcccgtgtccaatttcaaataaaaatgatttttctaaatttcattatatatatatatatatatccattccttaggtccctcaaacaattcacacagtcacactttacaaaactataatcccttcattcgaaaataaatacaactttcaaaccaaaccacatatgccaatacattaaaaaagagactatactaccctattttatcaaacctcaatataattatttttctcttttatctatactcatttaaaaaacattagtggtgctggcagtgaatctgtcaccgctatcc

SEQ ID NO: 35114 - DNA, 629 bp, Oryza sativa
acttgtatttctaccaatataaacatcaccctgtctattgatctcggtggatttcagaagatggtttgttcgttctgcgcaacgcatcccaagcgaaacttttcgcaaaaacaaaacaaaaaaaccaacggagaaaacaagttttgaaatcatttgtgtattgtgtggccagttactaatgaagcacctccagtaagaggaaggggctatcagcgaaactgccagcatcgatctcggcctcccatgaatcagaagaacagctaagcgagttaatccgggattatgaaggccatcaacccagcaaaaacaccattgcacaaacgcaaacaaacaaacatagatctcgcgggagagaagtaaaaaaaaagaaaatgttccaaaatcaccctgccacccagcatcacgaggagacgacatggatggagctcgtcggatgaatctgaagcacaaggattcatctacgcccgcaacggaaccgacgcggcaccagcaataaatccacccggttctctcaaaggcgatcaagaacacaccaccaaaatcacaaattcaaaaactagaaaatcaaaatcaccaaaatcactaagatgcgagagaatcaagtagatgaagataggagaaactagagg

SEQ ID NO: 35115 - DNA, 827 bp, Oryza sativa
aattttagcataacgtggaaataactgatacatgaactggaatgtaagtcacatgacatagatatgtcaatacttcgaacctaacagagcattaacaaacctgttttgtattagtctggaaaaaggagttggcagatatctggaatgtaagtcctctcaacatctctgtaatggttggtttcccatacaaggtatattcttcttcccccacagatgtattgccaacagacgtattcacattattcatgatactgacctacatcaacactacaggcatatcaatattgtaggaagaagtaattaattatttatttggcttaaaacccaacgggatttctgtacagtagaactctgagtgacataatagtcagtacatgaaaagtattttaaacattacactgttcgacatagtacacttaaaatgagaaggcaccaattacataccacttctggtatttttgtgatattgttaacaagaggctccaatagctctggcttataacatgatgtgacaaaattaaccatgacttctggagctccagtggtgatatttctggaaaattaacaaaaaaccaatgttcaaaagtgttcatcatgcaaaaaaaaaaggtaagaaaagaaatgttcaattggtaacaaaaggttaaaaatttatttgtttggggagggaaacaacatgacttgtttggtcatccctgtcctatcaaataaatttacttttaactgaacaattatagagaatgtgtttgtagaccgagatatttggcagcagctaatgaagccaaatgcactaacttcagtaacatgtttaaataccaaaatgatgc

SEQ ID NO: 35116 - DNA, 545 bp, Oryza sativa
tttgccccaaaccgtgagccatatatatgggtatatacagcggcccccaaattacggcctttgcttaacctgatcgcgacccaaaattttttatccttgtgcagtacttctggggggaaagatgttgcaacttgcaagcctaaagaacagtattttatgcggttgagtctgggagaattaacgacttggtcggtttgttaatgggtggacatttgaatattgctttaattagcttacccacaagaaagttagagagagataccagctactcctacataggagtactatagttatcgtaccatccaagaattaatcaaagaggagatcgacagcaactgtactaacctggtgttgtttattttgatgattatgggttagctatgaccatcatatagttagaccatactacaggaggataaggaagaatctgcagggtgctacgcccagacagatacaaataattaagggagctaaggtaaagctaaaataagctaggcaaagctcacatgccaaagccacacgtgcaggcacgcccaggatctcga

SEQ ID NO: 35117 - DNA, 708 bp, Oryza sativa
ataaaacatgaatagtactatatatgtgagtaaatatattcaaatttttcacaaattttttaaataagacgaacggtcaaacgctggacacggatatccatgactatacttatatatattgggacagaggtagtaatttttatctacatatctagaggattcaaacaccagccgttcaaagtcgacgacgggccttaggtccaccaatcatatactcctagagcctttgacaccacaggcagttcctacgtataggtatagtagcgtaccatgctagcccccatggcctcccatcttggctacatgatgcttacacggcgtcaaaccgatcgagcttgccatgcaccccccggcaggcaacacgccgtgcgctagcttagagagggatcgatggacagcatgggcagcagccaagtccccatcctgtcaaacgtggtgtacgccatctacggatttgagagtttactcgctgcataaaaacaaaaacagtacgccgtacgtacgtactctaggccgggtcgtacagagcgcacgcagccaagccaatgcagcagataaccacgaacaaacctggcaaaataaagcatctcccaacccaaaccgggagaccagaccagggaggagtcgtgcacattggctttcgtcccaattatagccaactccgtcgcttttaagtaaagcagtaattggtactgtgcagaggcacag

SEQ ID NO: 35118 - DNA, 730 bp, Oryza sativa
aatatcactctgcattgtcaaatttatttttgaaaattttcacagccattcattcatatttaatttaagaaaaaagaggtatatgagggacatgcactcaagtgactaaaatccattttatatccaatagtaaaattcattgacatggtcatactgattaatatgatcattgccaggacactcggatttgacgttgtacatacatgatgcgcttccaaaattaagttacatcgaaatgatgatctcaaccaaataatttttcttatcctaacatgggtggttccttatagaagtgctatttattcgacgagggtgaccgattaacgtagggttgggttgacatttatatttggggctttattttccattcaaccatggacctttctggaaaggattcagaattgattgtagttttgataattacagttcaaccatacggtatataaatgaaaagaagtcaaagcaaaactgaaccacaaaagtcaatcaactaaaaaaatgtccagagtgatatgcagttaggatatcacttgaacaaccagatggggagcatggcaagtttgttttttctttttcgagggaatggcagtttgttgctgcaaaatatttttcaatttagaaatactgaacccctgttggatcctagtccttactgttactgtaacagtaatattttagagttttaaatttttttaaagcaataataaaagtaccaagtgtactcatgcgt

SEQ ID NO: 35119 - DNA, 819 bp, Oryza sativa
  unsure (1)..(819): unsure at all n locations
gccgcagcaggcaacagcttgccacccatgatgttctctctcgttctctcagactgaattaatcttgcagtgcaaaatttatatgcaatggcagtgtaggaagcaacactgcagtacaagaggcaatcaagcaaattaaggtttttgggtgtgtgagatgagatgatccaaggttccaagtgtggaaggggtataaataggcaaatgaagttatatatacctatgtgaaaaccactcatgatcatgtaattaagatgtcagagcgctgctcatagctgtatgcatatagaagggttcactgttaagagatgaccgacttttttagctttcaaaggattaaagaattggagctcgagcttgaccaacctatactaactactaagcttgatgattctttttgcccaatgattgattgctcactctctctctctttctccntgactgacctttcagtaaaggaggaagttagcaatacagacagtgtagcgtagtacagctgtaatcagaaattcagatcgtcgtctgcaaattaaggcagcttccgttgtcgccattctccggctgatcgaagaaattcaacagatgcagcagcagcagcagctcaagccgtcaagcccgtgcgatcgtgtctacaggtgttacgccttatcttctcctttaacccaaccctttgtttaatccaggctaatgcccacgtcgtcatcgtcctcttcatcgtcttaacaaaaccagctaagaaaaaaatttatgactatagctctgttaccatattaagttttaatttatcgtctgcaggtttgatggttatgaatgtcactc

SEQ ID NO: 35120 - DNA, 505 bp, Oryza sativa
gaacctgaactcatcttgggccccatgtttgtggtagaggattatatttcattgcggttttctcccttggccttcagaatttcttcttaaagtcttgaatttcaacggcctttctttgtttcacttgaaccccaattccttagcatttcttagcatcttctctcatcttttagaggcctacattggggtagtgccctttcttgacctcttttgcttctattacgaattgcgtttgatggaatccaacagggtgtctggatgcatcggattccgacttcggaatggcctgaagtcgcgttatatccccttccagtgcccttcttattgtagcaagtggcggacgagatggttctatctctagatagaaaactcggaacccgtccttgttgtccctaaggatcagccagaagaaatcccagagtggaccgcaaaacaagccctgactccctccctccaatctttcatcgacatcattgatgatctccgaaaacggcggttgtcgggg

SEQ ID NO: 35121 - DNA, 630 bp, Oryza sativa
ttaccctaactcatgtgttattgtgtgtcagatactacttccttttacttctccgcgctcgctacctttgttttcaaacttacaactgcgttgaaattccactgcctttttctttcgaacttactgctgcgctgaaattccactgctattttatttcaaacttgctactgcgctgaaaacctgaaattcaccacattttgaccccccataatacgcttaacaattccggcattattactacctgcatttttttttcgcagcagcatttcgttcaactgcatcaaaatgtacatggacggatatttgtataacactcagaaaaaaaaaatccattcccatgccactttactcgcgcctcgtgagatgactaatacagattacaaaatgagagatgactaacaaacgttgattaccattcactagcaaagcaggagcaacggcataagtcccatacagccaggttcagagtcaaaaaaaaaaatcacaagaacagtagtacagtcggccggccagccagcggcgcgtcgatgggatcccggcgaccggccgccgccacgcttcgatggggagcccagcgcccggccgcgcgtcgatggggagccgggcgcttggcagcgcgtcggggactgg

SEQ ID NO: 35122 - DNA, 514 bp, Oryza sativa
aactattttaaatttcaaaaatggactaatatgattttttaaagcaattttcatatagaatttttttttgtaaaatacacaccggatagtagtttgggaagcgtgcgcacggaaaacgagtcacaatctcccccaatctctttgaaagaacgcatacttagtattagtagcatcttacggacttatctattggggtgacagaaaagacatttaaaattgtgaagtgtaaatgatctacgaaatagtggtttaggctatcctgatttggcatactagaaaagcaaaactgcaactgctacgatgctgacataatgattaagattgcaataattcattaaacaaacaatccgtgccgagaaggatgaactcatgcatactgagatgttcatcaaccaatcgcccaaattatgtcttcagcaagtacagcgtcacttgctctctgtccaaattatcatacaaactcatccatctcgtcggggatccgcgatctacatttggtaaccgcggcttgtga

SEQ ID NO: 35123 - DNA, 607 bp, Oryza sativa
actatagggcgaattcgagctcggtacccttaaattgcaaatggttttcaagaattgaaattcgaaacagtcaaatttgaccaaaagttggccagaactgtcgtaccgcccggggtagagatcccggatctcaataacaaaaggggaaccctggtcacactcgtctcggacatgggccctggttagttctaaagttttttttttacgaacttacaagcttttatcgtatcaaacctttcatatacacataacttttctatccatcgtacgaatcccaaccaaattttcaaacttgagtgcggactaaacacgggcatgatcatacatcttgatgtagaaactagatttatcttcattatcaaaagagatctccgcaatattcattatactatcctcatgcagtactgctgacataatgtggtcaatgaaaagcaaagtgctgctgtcacataatctcgtgagaactgaaagatctgaaaatctgtaatacgtgcgttcttcgagccgtcgccatggagaaagggtactattagaagtcgtagcttggctaggcctttcttggcgagacaattagcggtgcaatggcttctatggatagcaacatctg

SEQ ID NO: 35124 - DNA, 611 bp, Oryza sativa
gcctccataaagagggcctatgacacacctgtcatgggacttcaagtttcattctcaaattttggtgttccttcccttcctgccttcttcaagcaactggagaaaaagagagcaagttgaccacacagtgtcacataccaaaatggagatagcattgatctttctgttgagaaaactctaaaatacacaagtactagttggggagctccatagaatattaaatgctatacaattcaagacgatcattagacacatattcttaagcaccaatcatcaaaatctggcattaaattttcatcggatataaactgaggccaaccacagattgacagaataaaaaatgcacgataaccagcttttaccgttgtcaatgatgcagaactgtcccactgatttagaaatagtaccatattagtaaaatagactaacaggctctgcattatttcttatgcatgtacattgcagtacaccacagcccaatgcatctcgtcctcccatgcgtacaacatgtgccaatgaactgtgcaactcatattacgccatagcatacactataaaatatcatgtaaagcatgtcatatacctgaggaatggtgcgcttcaatgtcctg

SEQ ID NO: 35125 - DNA, 576 bp, Oryza sativa
  unsure (1)..(576): unsure at all n locations
catctcnatactngaataaacaaaatacgagaaaggaacnancaaaaatcacccccccccncaaaataacacatgtanntnccnnnnnnnnttnnnnaannnncgggnngggggggggggggggggnnnnnnnnnnnnnnnnnnnnnnnnnnnnnnnnnnngnnnngnnnngngggggggggggggggannnncnnnngnnnggggcnnnnnannggngngaannngnngggcgggggngggggggggcccggggggggagaaggggggggagaaaaaaaaaaaaaaaaagaaaaaaaaaaaaaaagaaaaaaagagaaaagaaaaaaaaaggaaaaagaaaaaaaaaaaaaaaaagcagagaaaaggagaaaaaaaaaagacaaaaaaaaaacaaaaaaaaaaaaaaaaaaaagaaaaaaagaaaaaggaaaaacacaagaaagaaaaaacaaaaacaaaagaaagaaagaaaaagcggaaaaaaaaaaaaaaaaacaaaaagaaaaaaaaagaaaaaaaaaaaaaaaaaaaaaaaaaaaaaaaaaaaaaaaaaaagaaaaaaaaaaaagaaaag

SEQ ID NO: 35126 - DNA, 1002 bp, Oryza sativa
  unsure (1)..(1002): unsure at all n locations
tagaggatccccgtacgaaagggcccagcccattgctctgtcgggctctcggcccatgatactcctaatttctctctgggtccccgcttcgataaggcccatataaagccttgaatagaagaatcgagcccatggacacacggctccggctcgtcacgcccaatcgcattcgcatcgtgattattctctctcttcctggtcacactcacgccaccgccacggtctaagattccaccggcatctttgcccttgataacaccgaaagttttcccggtttccgcagagccgagccgagccgcgccgtgggcgtttccgccgccgaagctttggtcatgcagcgcgaggagattggcggcaaaaccgcatccaaccgtccatgtccccggggacggagctcctttaacgtaaagtgaaagagccccacttttctctaagggtctgtttggtacagttccaactcctaaatataattttaagagttaaatttagagtggagttgggactgtaccaaaccgacccatagagaaaaggggggctccttcactttacgttaggggggccccggccccggggacatggacggatggatgcggttntcctgattactcattgtacccacttattatttactcccctaactatatctttcttccttttttacactcctacccccttctctattttacctggattctaaacaaaaaaacttctagctagttgccatactcctgacgtcatcccctaaattcaatcttatctggggcgttgactattacctttcgacagtatgagggttcgatctaagctatcattgaagcaaaggtagcaagggacgtatcggtcttcccctgcatacttaagtatctaacttaagctttcgtccgttctctaagtatcctaaacaacccaacgcaccataggatcggcaaacttattctttctgcgcgaaatctaccgtaccgtaaatagtccacacatacctttatgttctcgctccctaca

SEQ ID NO: 35127 - DNA, 739 bp, Oryza sativa
  unsure (1)..(739): unsure at all n locations
tcccttacatgccaacgggggacacggtgttgaacacatcagcatggggacttcatttcactccgcgtgcgccagagcagggccacacaccgcacacatgtaagtcattttaaacaataacacgctttagtttctaattatatgtatcgttgcccgggttaaaaaaaagcctttaaaccgggccccaattaatatntttttggtttctccctcttgtgcaaacagacgatgagtacggttcggcgtcgacgcatcacggaatgcctgcttactcccctcgcacagcattcattgaggacttcttttccactgatcctccccagggagaagtagggatggattactggcacgcagcacctcaggtcacacagccgacgcaggagacggaggccggtcaggggccagacgtgacaccacagcagcagctagagataggcacccccctgataatttgacatatcctactgagcagattaggcgtaggaagaagggaggacctagcaagcgtgcgaagggcactgatcgtccttgacttattaataatttttggggatttttaaaaaaaaaccttttttattttctctcctcccttcatgttctggtcgtactatttgagaaacactttacgattaacttagtactatcagtactatttcataaacttcttcggataannaccnnngggggnccccnnccgnnnnaancannccnnnnnntcattcagatatgaggatgatga

SEQ ID NO: 35128 - DNA, 569 bp, Oryza sativa
  unsure (1)..(569): unsure at all n locations
cacaattattcatcattgttttcatcctgagaaaactaacgagtgaaagaaccttaaacatgtgtcctctcggctctcggccacagcaggaggcatatatgtatgaagcaaaaacatactagtcaataggcattaatcgataagcaataacgcaatcaacagtacggtagaggacatgcgcatggtaagaacgcaatcaaattaggccaagttttagttccaaaatttttcttcaaacttctaacttttccatcacatcaaaactttcctacacacacgaacttgcaacttttccgtcacattgttccaatttcaaccaaactttcaattttagcgtgaactaaacacacccttaaccaaatgatgtaaatactctacaggaaggaatgcccacaatccagcagtacggaatgccacaaccaaattcacacatagccacaaatcaaaaatcaaataaaatctagccaccaagcaagcacacgaccaaaaatatacatcgtgtacgatcctatccgtgctccctcacctaaccggncaatcccccccaagccctagttttcccacacgga

SEQ ID NO: 35129 - DNA, 3889 bp, Oryza sativa
atccccgcgcgcgcgaggcggacggcggaggcggcggcggcggcggctcctctcgtgcgcgagacggacggcgacggcggcggcggatccccacgcgcgcgaggcggacggctgaggcggcggcggcggctcctctcgcgcgtgaggcggacggcgacagcggcggaggcttctcgcgcgcgcgaggcggatggcgatggcggcggcggatccccgcgcgcgcgaggcggatggcgattcccatgcgcgaggcggacggcggaggcggtagcggcggaggagacgaagatggtggcgttgagtggcgacctcggcagcgtcgacgacggcgtcggtaacggacgacgacgaggcgtcctcggcagcagagggcaaccggtggcggtttcgacagcagacaacggggcgccggcaacggacgacgacgcggcggcctttgcagcgaacggaggtgggcctgataggggacgacaacggtggagggggcggcgctggcggagaggtgccggcgcgttgggcagtggagaagcggaggaggaatcgcggcagagagagagtgcgggatgggatgggagggggaaaaggcgtgggacccacgtttggctaggctattttggccggccaaagttggccggcgcgagtagtattttggccagccagccggctggccaggctgttggagcacgattttgatctaaaattgctaaaattttgcttggagagtgaagtaagggggctgttggagatgctcttattgtcttttcctttccaattgactctcatcagttctattctcccttttatttactagatgccctttgatgggtataattcggttgtgtgtgtgtcaagtttatctacttattctgttctatctattttgagcaactttagtttaccttgtggaaatttctatgcagtataaagaattaaagaaaggacacataaaatgtgagcttgagagagtatgaagttacctcccagaaaaatatacagtgcaaaatttccatatgttaagttcgtggtatagaaaatatggaagcattctcacctcatataaagggcgccgcatatatgtatttatatcagttggaaattgtgaaagacacctggactttacattatatttgctaatcgaactgaacatatcaaatcaatttgcaagcataatataaattctgaagcctcgagtaaagaacataagagacattgctgggactttaccatgtcagtcaactttagcctgagatatgtccgtcaaaccatacgaaggcggtgaccagatgtgttgcacatttaggagacttgacaaaaatggctaaaactctatgacattccaaatgttctaaacccatactcatgtgaagctagttctcaagatgcgcactagctccacactttcatcttaagcaataatacacaaagcaaataaacctaagacaaataaaattcagattacatcaactttaaatacacataggccgacaggccaaataatctgagattcgcggaagcttagctacccagaccacaagcaaaccgactagggataaactcctaattgaatcaagtcctagaagaaacagtcgaagccggcaccattcaaatttatctaagcatttaacctgcaaagatggatattccagtataacaagagttagtacattattaaaaataatgtattggcaggccaatatcaatcctaacatgctacatgtaaggcatatattcaaaggagggaaatatgtagttcaattttagcataaagcaagttttgattcacaattcttttgtaaaaagttgatgattcaattaacaaaacaaatttgtaaatttatcatatatataacatcatatcatcttaagcatacccttgttgccttccttggcaacaagtcatataatcatcatcacactcatacaactcaacacaaatcatccatttcaaattgcggtttcataaacataatttaaaacaatgagtctatactcatgtgaccgtgagcacgactaatcgattagtttttgaactctgcacagtttgtacagctttacccacatgatgtgaatcactctggtttgtccggtacctgtcagtactaccacactctacatattgaatgtggtctagaggttacaacgtagcctttaaattacctaatgcctagccttgcatcatcgatggcaagtgtggctccatcctaggcatatgacctagaatcattaggtggcaggcccacgccttcaaccaaactccgtggcaacgaacatatccgttcccccacgaggcactatactgttgaattggatagactgagacgcccatgccgtgaggaaggacaaatccgtccactcacgtaacacacacgtagggaatcatcctacaatcaaacagacacacatgagtagttcctatgaatcatcgctaagactaattcattctatttcggccttcatatgcaagactagacattaaataacttaattagccaagggcataccataattagcacatgtagatatacggttaactttaagttggtgacacaagttcagtcgttgggcaaacactcccccctatcagtgtgcaactaccaccatatgcacaccacttgccgcccaagtctaaaacctcattttcacacctttagttcacaaataagtaaatatttccaaatctgtccagcagtgaaattatgcccaaaatttcacttaaaaagttttcataatgtgatttggcatattctaagcatggctaagcatatagtagcatattaagcatttatagtcccaaatgagcacaagtgatgtactctaaccattcctaagtatacaaatggagaggtgtacaataattcaaaggagtttatgcaacaagttatggataactaccatttcccaagttttcaaatattggtttaagaaaatataaatgcaattttgcaaacaacacttttcatctcccaaaacatgggtttcaatgtgatcaaagagaaggggaggaagaacttgccttaatcttgagaaactagatagcatttaattcactccttcaccgaaaaaaacaataatctatacaaataacaccgtatgcaaataaataccgaaatctgctaaaaatacaaaatgctctaaaatgcgtgagtttgctaccatgaataggtgctgtgtggataggatttgtggtgaaagaatttctagtttatctattcacatttgtgagttattaattttcaaaatgtaatattaacaattgggtaattaaactctattagtacttaggtgcatcttaggtccatgatttgtgatgcgttcagttgctgcagtgaagtataggttctcaggagtacaacaaaattggtttcacaatatttaggattaacatgatttttcctttgaattttataagtaggatatcacattataggtttcggtagctatactgattcttagacatgtctgggtactgtaagggccatattttattgtataacaattaagctcatgatttttccaatctaacaaatctagaaccacctcatttggagttggaataaattttatatgattttttagaagtttttatactattcttttgcattaatcctttattcaaattttaatgatgttttggttatggtttcatctagagattagtctacagatctaaagtgcatacttttgtgaaactaactaattttagttttgcccattttgagttaaaatgaattacttatggattttgtagtttctaatttgcattatactagttattttactaaataaacatttggtgatgtttttattacaggatgttgcaagttttagttcatgataattaagaatatggttttgtgagcacactggaactttattcactcaaaataag

SEQ ID NO: 35130 - DNA, 585 bp, Oryza sativa
gaaaaccgtctttgggagtgtgaacttcaatgttcgcgctgtatgctccgatttgtggccagtgaatgcctccatgccaaagtgggagcggcattggatggagaggtggttctaccacacgaatccctatggagctaagacagacgcgacgaaggcaatccgatagggccggctagtgatctcccctaaccggaagctgaaggtggcgattgatgggacgatcgagtcccgtttcacccttttgcggagaaccgcccatcggttgagctgctgtgatttcgtggaggagttttgcatgttggcagatcaccgtaaatgaggatgaacgggttctcgacttgcctcgccttgttttgccaggaggcgttaatcgtaagtttttgggccaattccctatatgcccatgtaatttcacctaatcccttctacgcccctgaaatttgtttgatctcttatatacccctgagttttttatttggatcccttacatacccactccgttagttgaccattagtttgaccgttagttattgtagaaattattttattgtccttggtatattgttaaaagctagaaatgtttta

SEQ ID NO: 35131 - DNA, 1126 bp, Oryza sativa
atatctcccctccttctccaacttttcatgaaaaacatcaacaacattttaaccttgatcctccctcatttataccaccttggcagcttcggctagcaaagacaaaggaaaatgagatatatccatgtactctatcttttctccctttgtctccttccaacaagtatgcccatcaccctccattcccaccaccgccaccaccaccacatgttctttgcactcaaaataattcacgcacccaaatctccgaatatgaacaaggaagagttgaaggtccttgcccctctagttcttatggacaaagtattctcaactcacatgatgtttctctaagtttaccacaaaaaggtataaacacattagagttctccaaagtagcctttaattttacaaataccagagaagcatgcataccaaatatacaatatagtaaggatattcgaactaacagtgaagatacaaaactttctgtgatggtatcaaattctttatcttcgaaaatacctcaacatggcacaccaccaccaccaccaccaccaccaccacgtgcatcacagtgtaaaataaagttgtcaattctagacaaggatagtgattcaataccactaatacattcaaagtcttcagattatccacacaatgaactagcaatgtcagtagaacaacaatatccctctcttcgaagacatgaagaatgtgaggtgtcatcaacccaaacagtcattgagttatcttcattgagatattctgaatatacatatcaacatatatccatgaatattgaatataagactccaattctctctccctcggtatctacatcgttgcatgcagattcctcatgtattgctataacaaatggtccttcaagttcaaattatgtcgaggaagtaccaatggaaacaattttgaatcaaccaacattatccattcctttggaagcatgcaaggatgagctattgcattgtaaagaaaatggaggcattccaattccaccacctccacctcctctttgtggtaagtgtgtacaaatttcaacagaaaaattccttgtggggtgtgaaatgttttaaaaaacatcaatgatacctcaatcaccaccctcacccccaccctcaataccatt

SEQ ID NO: 35132 - DNA, 595 bp, Oryza sativa
ttaacgacatcaccttgttccttttatgaagatcatgcaaaaaaatatactagaattcctctaccaccaccacccccagaaggtagccacggaattttagctacaacttctactgaattgattgatgctggtcctcaattgccaccattatctcatcttgaatggaaacggtgtccacatcatcctccagaaaggccacattatcttccaggagaagttggaggagctccatcgccaccatcaccacctccccctcagagagaaaatacatcagtaggaattcaaggtggcattccacctctgccaccacctctgtcaccaactctgggagattatggagtggctccacctcctcctagcattggtgcaggggcttcaccaccttctcctccacctggaggaatcacaggagttcctcctccacctcctattggagggctaggtgggcatcaagctccaccagcacctcctttacctgaaggaatcggaggagatcctcctccacctcctgttggagggctaggaaggccttcagattcaccaccttcagctggatttcgaggtggaactccacctaccaatgcacatagagggg

SEQ ID NO: 35133 - DNA, 560 bp, Oryza sativa
ttctctcaatgaaatgattggatggtaaaagcaatgtattaatgatgaaatttttttggatcccctattacatagccctaaagttttgtgtgagccttcttgggccgcaacacctactagcccttttgttgaagacgagccccattgggcgaaccccttctgcttcgcgccatggcttcacccaacagagagacttgatgacgaaccttatggcttccattcttcgacttcgccttacagcttcatcctatggcttcacctacaagcgaccccttgtgattttagtcggcgctttgctaatctggtggtttcggcagatttggtcgaaggccctcgtgatatgccttcagcaagcccctcatgggcaagagcgagtagggagcttttggcgagaccgtgcaaatatgtggtatggcatgaggtgccccctttcggccgatgtttctgccaaaacctatgtacacctggagaagctaacccttgttatttcatgagttctcttaaacgttttcatgtgtgtttttcgaccttctatcctttttcagacgtgagttatgtca

SEQ ID NO: 35134 - DNA, 645 bp, Oryza sativa
atgtacattagctcatcataaattattaagaactactctctctctcgtcgttatatatggaaattttgtgggtccaagactagtcaatgtggtcatcgagctaagaaattaagatctatggtgcaaaatgtgcctcatatctttagaagtgattaaatggttgattaatcatcatccagtaaagtccctgaaacatgcaataagggacggttaaaggtatgtttgtgctactttatattccattcactactacagaaccaccctttttaccagataaccggtcaaagtgatccgtctcagataacatgagctctaacatgtaaaaaaaaaataccattcgagatatgacaaaagggaactacctgtatatgatgtcatctatgatgagtcaaaattataaaccgtcaaagatcatatatgatgaccccacatatatggcaggtccaatcatatggcccaccagacataataaagacataagtgcgatttataaataacaatcgcttaaaatgagttataatctattatggctctttcttttaacctatcatggaggacatactacgtcatacgctcctaccacgtgttgacgtcatcggctctctttatttctcgcttgctatcccctctctttaaattatctct

SEQ ID NO: 35135 - DNA, 503 bp, Oryza sativa
tctacacagaagtggtaatggagaggaggcgatgcagctaggaagagttgaaagcgagctcggcgttttgaggatggcgacacgtcgtgtacacgtgtcagccacgcccagaacgcctctcctccctctctcacgcctgctggtcggttaaaggagttggacggggagagggcaagcccaagtggctgccaagcgggcccaggtcgtggtaaactaggtggaagagagaggtgtgggtagaaacatgggtgagtttggtttttggacgaatttccggaattattttcctcctctaactttgtagcttcgtaacttaatgtgtgataacttaatgtgtggaccacattaactagtgttgattttactggaggtagatgattatacctagattccatttttatttttggttgggtttgtggcacttaaaaattatggatagattactcacagaaattaggagaagaggggctctttggaaactagtttggatttttaggagacct

SEQ ID NO: 35136 - DNA, 1046 bp, Oryza sativa
ttcctctggactgggttcggtttcttaccaattgatcgcggtaccgtaaggctttggcgacactgtcctccgcatttgcaggctccatctccactgattgtctcactgcatggaaaaaaaaagcattgtgtcgttctgtaatttgagcaagagctagcaatagataagcacctaatccaaagcaaatctaactgataaatctacctaatctcaactagcacttcctatgctcctgtctgcccaaataaaatgctgatttgcatgtaacttcgccgttcaatcccgttgaaacgcacctgccgttgtgtgacaaatcgtcgggtcccagtggattgaaaaaattcagtaattttcctgattacatcatcagctgtgagacacctgcgtgcagtacattaagaaaattcagtgtttgatcaatttcatccattcattcattcagtacagtagaaaatatcatccattcagtgtttaagaaatttcacatatagcaacctacaaatgaatgtgctctcaggtgatacacacatatgtaaaatcatgtgatgaaaagcaacataaagggaaattcaatttcttcagttccatggcatgggacaaatttctgagtgtgaaaatcaaacaaatcaattagtgttgagagagagaaagagagagagtactgcatccaggagttggggccgcgtcgccgcagcctggagacaaaggcggggtacggagtgagggcagggacggcggtggcgcggttcagggaagaagacgggacatggagttgggaacgcggcggcgcggccgggggtggagaaggctgctcgcgcgccgggggtggagaaggcggcgcgattgggaaagaaggaggtcggatgcgcgcgattgggagaggagatggcggcgcgaccgggagaggaggagccgagttcgcgcgctcgtgtagataggagagggcaatctgttcggttgatggcataggtgggtaattttttcaattatctaggggtagtggatctttatccactcaataatctggaaaaagctcttttagagca

SEQ ID NO: 35137 - DNA, 1206 bp, Oryza sativa
agaggagaccggatttggaggggaaatcgacggcaatggcggcatcgggctctgtctccagccggctggaggttgaagatgccactgcagcgataggaaggaaaagtagacttccggctgggcttctacttcttggcccgattgaaagagggacacaaagcagacttcgacagagagagggagaggggctacaggcagagaggagattgggccaagaaagagagaggacttttcctgttgcggcccgaaaaaggaaaagaggaattttaattacttttccaattaaattaatcactgaaatgatctttgaattgttaaaaatacttccaatactcaaataatttcaagaaaaatcattaaaatacttggacactcaaagtacttaacaagattataatcaaaccatttaatgattaatttaatatgtggataattactgaaatgttgtttgtattattaaaattaggaattgagctccgaaaaatccgagaaaattccagagagtataattaaccatggagaatttactaaaaattaaatccatccatgctttatatttaggaaattttatttcccacatttaacttcacttgtaaattaatgatcatttaatataaattctaataataatttattaaataatttataaatcctgaaacgaaaatcaggatgtgacactccctatcttcaaagcagacaagcatatcttgtacaatcccaaatccttcaataatatttccgttcgggtgcttgaagaatttgtttgtcggggttactgccttattgctcagataagcgaatgcaaatgactcagagatgagattaaccccgacagttggactgtaaagaataccaacggcgttcccctccggatggcaaggaatgattcggggagcggtatttatccgaattacttcggatgaaagctctacctcccttagccattcgtcgctcattatggatgttaactcccgaacagtttcccttaggaacccaagttccataggatcaggaggcggcaaggggacgagtggtttctttttactgaaatagttcagggtgttgccataatcttcgtcaaaaccgtccttgaacaaaattgcggcacgatccgagtttgaatttcttcattctcaatggatggctactcgagaactttctcatcaatcgagtcagcggaagtggaaggctcatattgtgactcga

SEQ ID NO: 35138 - DNA, 724 bp, Oryza sativa
acagggtatgttgtatagcgttggattaatattgtttaattattactgaactgttttattaaattctgaaatatttattaaatgctgtttatgcaaatgaaaccctattatgccatcctttgctatcctgtgcacttgcatatttgctgcgtggcttgctgagtatgtcatatactcaccttgcaatcattcatcagaggaagagttctacaatgatgctgatggtgtggaggattaggtgtagccctggtcaagctgcctgtggggtggagccgtctgcgccgtttatttttttttccgctgcttagatctttaatgattgagaggaactatctacctctgtaatgacattttgttcgcttattaactagagtaataattgtactctattatcaatttgttattgtgtgcctcggctgattcctggacgagggttcacacacatgtaagtgtttggaattttggatggaaattccgggcgtgaaaagttggtatcagagcccctttgaccctaggttatgccaaatggttacccatagaagccctctaaaaatattggaaaagtagaactgttctcctctccttctcttttaattaaaccaaactaatggcacatgcatttcctaatatttttttagtggttcccgttcaaaatttattttagcgttgttagtactgtacatctactactgtactaatggcacatttaccagcaaaagttcta

SEQ ID NO: 35139 - DNA, 534 bp, Oryza sativa
tacagagatcaccagatcacagacaacaagatgtaaagggcagacctaaccgagtagtaccatagcaaagcaaagaactcagcaacactaaactcctgaacttctttattccaaacgtcttgcatagattctccacccaaatcgggaactgaagacttcacttgccacttgtcttgccagcttggctcccaacattaagcttctttgtcttgcctccgatttctgcaagttagcccaattttcaataaaatgacatgtaagatatatcagctcaattggatcattgggccattttttatcaaaacacactttgtttctggacttccaaatggcccataatacagctgccaccccccaccatcacaagttgcttagagtgtttgtcaaaattagataaccattatccaaacatatggtttttatctctagcaggtgttatattcaaggcacacaacatcacattccagatcaatttagcaacagagcattcaaaaaataaatgctgtatggactcctccttatcacagaattggc

SEQ ID NO: 35140 - DNA, 2109 bp, Oryza sativa
tgagtcgaaagttttcaaatcttaactttaaagttttccaatctgaagaaagcttcaaatctagagttgaaagtttttcaaatcttgacttgaaagttttcaaatatcgagtgtaaagtttttaaatctgaatcgaaagtttttaaatctgagttgagagttttcaaaatttgtcttacaaatttaaattttgagttcaaatttttcaaagtttgagttaaaagtttttaaaatttgactccaaagttttcaaattttacttgaaagttcaatttcgagttgaaaattttaaaaaattgaatttagatttacaaaatttgagttgaaagttttaaattttatgtatggcttttaatttttcgattgaaagttttaaattttagatgaaagtttctttcacatatagatttttcttcaatctgttagtaaaaaaaactctcctcattaccgtcattatcctaaactaactcagttagttaggttaactccggaatcgcgctctggcttttcccaaactcaggttcgagagtggtgaatctaggatttagattatgggtggtccgacctaaatttttttctaaacacggtaaatctaacgatactaatatatacaatgcaagtatagataatagagtaggcatatattaataaaacatattaaaacatataaaattagtaattgagtgaaattttgacttaaagaagcttatatgaatataaaggtttgaagaatattaccatactactttttctcaacgtcttgttcttgagtgtgcttctcaactataacctagaaagaatgcaatttagaagcattcttctttgctgcatgtttttgaaaaagagatataatgtctctatctttcttcatgtttaaatttaatataacaatatagttaaattataaaaacaaaaattgaaaaagctacagaattaggagacctaaaaataaagaagccggtcaatttgttagagtatatggtagttaaagtcatattaggataggattgatttgcgtggactccatccatttatgtaatccttcgttatctccttcccatgtactcttatatatatcagccccctgagactcactacaatgtgtccaatattcgcaatatctcctctccctacactatccaacatggtatcagagcaggcgatctagtgccgctctcacgcttccgccgccgctgccctcgggagtagcgatctcctgggggcggcctccattttttattttcctctcgtcgtcaagtcgtcatcctgagagattgatctctcatgcgtttgcgtcgtcatcaagcagcagtagcagcatctccggtcgtcgttgatttgcccgtcgccccttccgcggtcggcctctaggacagtacccatcgccgatctgcggcgcgtcaccggagctcgccgcagacgtcgtccgccagtgtctccaccagatccatgccgtcgtcgatgtgtagaacttgcccaggtcgttgccgccgtcttccccgccgcctccctctggcgcgacgccaccggctccatccgcgctgcctgacggcctctaggccgactccacgccagttcgcatccgcaaccaccgctggctagcccctccacggccgctaccaccaagggccctctctgccgatctggtgggacgccctcaggtcatcacccccgtcttccccaacctaaccaagccgccgccccgacaccgtcgatgctcaactccatcatctggatggctctaccccggaaacgtcgacgctcaactccaccatgtggctgcaacgacaccctttgctccggcctctggtctccacatatttaggttgtcgatgccgtccgtcgtcaccccggggagccctctccatgctagaggacggtaccctccgcctttggtgcgccctccgcccactccatctgcgtcgcctgtctccgtgggcgcgagaatgggattgctgcagctgccggcggccgagcgccctatctggctgtcacctgtcagcctgtcaccactgcagtgcctccattcgaccctgttgactagccatccgctctgctctcgatctagtctctctgttgagatcttgtgcatgtgttggtatttcttaa

SEQ ID NO: 35141 - DNA, 3154 bp, Oryza sativa
ttttaagagcacatattcgggtaaggacaagattggtccggactacactaaattagaaaatctggaccaggctgcactaattgattcgtttttgatctgctggaaactgaagatctctactcgaagggtagtaatatgagtaactaggaagaaggcaagacagaatctgtctcgtaacttttcctaaataccgtttatgcatccaacggtagaggtgtaccattgcttcgctctctcttgaagagagaacggaaacaatttccaccgtacagtttcttgtctcatgccacgaatcttaaggcatgagcagacttgctcgaagtctcgcagattatggtagggattttctggatcaaagctagaaaaaggattctccctaaccatgctaattagttcggggcgaatttcatagcgagttgtataaattggctccgatgaaggaggtggctcatagaattcacccctaggagcagacagctcgaagagaggttgatctatagttgagaagagtttgacaggaatacttctctgggtagcaggggtaaaggtagaataaaaagtaaaaaagagatacgaggatgaactgggttcagaaatgatcagcaaccgttccccggcaacggcgtcagaaatgctgttggtaattcttacggtcacaaataaaatctccaagcgcacggatataccgatgtagcacttcccctacaaagtattccaaagggtatcgaatccaagggaacgtgtgtggtcagatcttcctccggttcatccaaggacaccaaataaaggataggccaggatagagaggatttactagtgagaaacagtgtctagggaaagcttaagtttaatcctaacacaatacttcaggcactggcaacccggacaggaaggacttaagtgatctcatactgtgggatacgcaacaattattggataacaattacttaaacaccatgtctaagcaattaatatctactttaatgtttataactcaccaaagcaatcactatattttagttgattatagtgaataataatcccgtaagctatttaggaactaaccaagagataattctcacaagataaatctaaattactcaggaagaatattatattgaaatcagagtaataaacagaataaaagaaatgagagaagattaccgacaactccggaattcttccgacgtcttctactctactctcttcctattctagtatacaatatagtacaagagagcctcttataattcagctcaagcttggatgtgtgtgtgtgaagtgagggagtgaagtctatttatagggcagttatgacggttgcgagaaggggaaatgtccgaactgccgcacaactgtcatcaggagagcatctagagcatccacgccaaaccccaggatcaacggtgatcagagggttttggccgaaccagggggttcggccgaacctgggctgggccctcccggcctagccttcggcctgtggactctcgtgactctcctctgtccattttcagaattttgggatgagtctttgatattctgatggcgttcacaacccatccttgtatgaatacatgtttctcctcactttagtctagatttcctcccaacttcgggttcatcacctgcatacaaatatacaccaacacttgtggaatatgtgagatttaacacctatcactatgttggatgttttattatctagactttatgcagatgttggcggtatagaatcggcatttagcagccaccaacagtagggtagtaggggattggagcacaatctactatgttggtgatatcaggagaaaaatgcaactaaaaagcctaaggtggtgacaaacagtgatttggaaaaaatcaagttctacattattagtggactagagtaagaatgctaaggagttgacgctagaaaacgagtcccaagagctagaaatacctttgagtgaaccttttcggtcataaccagaacctatagagatgacatatgatgaggtcgatagaatagagaagtgtgagattcccacatattataatattgagaggctaaggtagggtgaaggcaaataagaggaatataattttcaagaggtgttacacaagaaaaagagcaagcccagaaaagctaaaccgacagtgacctcaaggacgagtctgagcctgagagaattggcagttgtcccagtgccaaagagagctaaatgttgactgagaggaggaacttggagtcatcagctacgttttctaatccttttgccatttttcaaattatgaatgttgatgaattgaataacatcgatgttgttttacttaaatatcccttgtacattggctgttgatggttggcggagagtcaacataatgtggtgatgtacaatgtgaaaccctcgtaagtggcaatgttgatgtttgtagaccggcattatacgaggtgactctcttatggcacttaaatctattctgccaacggttgacggttgagcgtgaccgaacaaccacgggatttgaggcatgcgagcctggcggttgacacagaggaaaaggtgatgggcattcgcgccagagcggctacaacaggcagaccttgggcagcaggaaggaggacaacaagagagtggcaggctgtgctgagctgataagctgggcaagttcagccaagggacaagaggaagtaaactaagagatggggaaagatgggttggtgctgcgtggcagggggaatgagagtggaaggcagaatgggccagctgggtgagaaggaaaaagaatgggcgcccatgaagcatagtaaactttgttattttccctgagaatgacttgttagaatagtagagtatgagcatttaaatttaaatttaaatttgatatttgacctaagataaatgagagggattcaaggaatgcttctttgagtggatgtcctgatatgttttggaatgaattttgtatttggtttggatggaattggtggagagattatctcttcagacttgaaagttggttgaggttgaaaccaaacactactagaaaaagcattttcccaagcggtcaaaattgatttttgcaggcggaggtttggaccgcctgtagccaaacgactgcgaaaatccattcaaaaaaacaaaaaaaaaaaatcacgggcggccgc

SEQ ID NO: 35142 - DNA, 878 bp, Oryza sativa
attttgatcttaattttaaatcttaaatcttctcggcattacactttaacctaaccaaaatatttaagttggtatatgaacaattggtaaaagcaggttttacactattgaatccttaatagtaacaaaataaaaatggttgcatgtgcataaatactaaataacaccctaagctgctagtaattttagtttgaatttaacacttcagatgatacctcaaataattcctacaactcagctagaaatctggaaaacaacatataacttagcctattttgcatcttcaccaaaatttaacgataagtcatctagcaaaaccacttggtcagaatgttaactataatgtactctaacaccggtgcaattcttaataaaattcgaaatgtaaccacatgaaatgagagtcaaaagttacttaaacagtatcttgactgcagcaataaattaactagtaaacttaatttactaaattacaatagtactccctccattccaaattgatctacaatttcttagatacaccaagaccaagaaaagctaataactctttcatactatatttactctagcaacaaactctaagcatgcaccatccccactatttcctagctaatagtaaatcaagattttgcatgtgggttataaatacttgtgtgcatggatgtatgcatcaatgtccatttactctaatgcacaaataacgaatagacttaatgaatgaacacaaatatgtagatcatttaggaataaccttaaaaaaactatatgtagatcaatttgaaatgaagggcgtaaaatttaaagtgatcaaaacttcaaacttggaaaattgaaccatcaaaaccttgtccaccttgaagcaaacttgtctcctccaa

SEQ ID NO: 35143 - DNA, 503 bp, Oryza sativa
ttttaatttcgaatttcagctattttaaaattgtatttctacttgggtctctttttttctttctaattttggattttattttatttttattttgaattttgattaatcttgtattgggttcttatatggaaacttctttcaatattgcttatttttaattccgaatttcagctatttttagattgtatttctacttggactctccttttctttttttttctttttctccgattaatgtgggaatttctagcctctacagcgaacgtggttccttctttcaaagctgtaatttattataaattaaattttagttgttaaaaataatatcattggatattcatttaaatttaattttatatgattatgattttgttgctacaatgaaaaatttaaagttaaagtttagtttttaagaccgtactaaatttgaacacgccttagcgagttggacggagagatgtatctctaccaatgcataagttttctggtctattttctctttt

SEQ ID NO: 35144 - DNA, 739 bp, Oryza sativa
  unsure (1)..(739): unsure at all n locations
tcctgcagccccaagtttgagtaaaccgggttaggctctggttggctgccgtagccaagtctaattgaacattgataaatacgtcattaggacattgcaaacttcttccaaaagctctttgcggctccattgttgccgagtggcagatacaatcatacaactgtatggcgcacatgggacgacggaatcattggcaaagacatcttgtagggtatattatttttgctgtaaaatatattatatttatattataatcgcataaaaacagattataatcaatacatttaaacaccaaagaacttctacaatgatattggcaaaccgcagaaagcaaatgcgtagctgtgctcgtgcacggcatgtagcacatgaatcgtaatcaccccacttgatgatgcattaaaaaagattgagcgagttagaaatgaagacaagcaatcatatacacaaagatcatatgatgatcgatacctcgtgtatgaaatattactccgtcccaaaatgtaagcatttttaagattggcacngggtatttaaagaaaaanagntnangngnntngnaagggaaanaaattggggaaatttntttgggnaananaaaaaantnggttnngngngntngaatttgttgaaaagagaaattaagtgaaaaagaatggttgtgattggttgagaggagaagataggtagaaaaatagctntattttaagacaaagtattgtgctagaaataactatat

SEQ ID NO: 35145 - DNA, 519 bp, Oryza sativa
tgctgctgtccaccacctccgcgccggggacgcggccgcacgccgccgtcttcctgggcggcgccgccagcgtcacgggccactcgtcggccgaggccgcgtcggagctggagctgctcccgtcggcggagtccgtgaacgccgcctcgctccgcgcctccctctcctcctccccgctccccatccgatcggtcccaaccacgcgcgcgtgacggggtctatctaactagttacacctctccgtacgtgcgcgcttgctttcgcgggcgcgggtgtagtacgcgcttcgctgctccgttcctcggccggcgcggccgagttcagctccgcgtgcgcgacgagacgcgcgcgggcggggcgtggcgtggtgatttgcgcggcgttttggcgtttcggtctcggtcgtggcgcggtgcggtgggcgaacggaaggctaggcgcttaaaaaagttgggcttggctggtcgatggggaagagtgaccgttgggttttgagttgtctgggaggccttggcgagt

SEQ ID NO: 35146 - DNA, 615 bp, Oryza sativa
  unsure (1)..(615): unsure at all n locations
tttatatcgaatcatattgaattgaatgaattcggatttttttggtagggtctaccctgggttcaaatcttaagtcggccactggttgttgcaagctatcgctggagttggtcagttttgaatagcttcccctaaccanaagagctgggcgtgtttacctgatatgggcaaaaggatgcaggagcagaattggtgaacggccgtccgaagcagagtcggtacaagacaagaacggggcgtgtctcttgttacacttggcgaggcgcctgtacctgtgacctcgtctgattcctattgcctgaataaataaataccttagttagctatgcttcgcttttttttttttttgactattaagggtgaccctcccaaacaccccctgatacgggaggagcatttttcaaantacgggatggtttaatgattaaagaactgaagctaaaaaaaatgagctatgatctggaaaaggagactgctgtgagcctgtgaccaacccatcaacgggtcgagactactccaactacttactccctccgtcctataaaaaaactaacatagtaccagatgtgacacatcttactattacaggccccatcgtttgcctttttccctgat

SEQ ID NO: 35147 - DNA, 528 bp, Oryza sativa
agaggggaagaggaggaggaagtggtggcaggcagaggcggatgaggaacttgcgccaacgacgtggatatggagggggcgagtgggcgcggtggaggaggagggtggaagtggaggtggaggaggcgacggcaatggggaggcggcgatggaagcgaggagatgggcaggcggcgggcagcggtggataattttttttctttttctttttcggaccttttcacctgctcggtgatttttcttttttatacggcacgacggcttctcctattcgcgacgcctcggctggaccatggaccgttggccactggagcattctaccatggtccagattttttttttcactcaactttactacttcacatctgatggctggtgttgaattcattgtgcatccaacggtcattattaaattgataacgtggcgcaatgaggtgacgaaacactttacttttttcactactttagatatgctctaattcatgacatattactctgatcctacagtaatataaataaattattaaa

SEQ ID NO: 35148 - DNA, 727 bp, Oryza sativa
  unsure (1)..(727): unsure at all n locations
tgctgggaccctnttgatggatggccggttagtgatggacctttttacatttgtctattattctcaggtaatgcactgtttcaaaataaggtctacaccattatattgtgtatccattatattaacaatttaaaatctatattaactaatttacacttacagtagaactggtggacatattattataatcattggatctattgtttgctaataaataaagcgtccgaaattctctttttgccacgttcaccgtcactgttaatatatccccatgtagaaattaaggatgaaaaatatatactttttactatctttttaaaggaattataaccctggcctctaaactacaaatgcacatcattatttgaacttggagtaaacctctagaggaaaatttgcaaaaaataaatagaccaagactcgtattggttgagctatatatcctagaaataggaatggagcaacaataaataatttgtcagaaaaaccttttgtggtttaaaaaccaatgttgaaacaaatcaggatacccccccccctacaaaatttagtactcccttcgtcctataatatatgtattttaataatttgcttacacttgttaagcactcgtcttattaaaaaaatctgggcaaatataaaaaacaaaaatttgggcttaaagtactttggataataaaagtaagtaaaaaaataataattctaaatttttttttgataagacaaa

SEQ ID NO: 35149 - DNA, 601 bp, Oryza sativa
  unsure (1)..(601): unsure at all n locations
cagcggntttgcaagctcatgaggactcttagcttatctttgttagcatgcgagctttttttaaatagattcttatacgactctgtcggtgacatgggaccggggatatcttgactagaggtttggggcagccgcggtcacccacgtggcctgaccccctcggggggggtcgggcccgagagtgatgaggctgcccctccctctatctccccgaggggtcggnncnnanaanatnnnnccaaagggcttnatacaccccaaccccccttcacaggaaggtaacgaccctactcctgttggccgaaggccggtgttattctttatttatatggatcacacaagtataataattgggataacctatctagctgtcatcgacttggcagaatagatcatcaacatgtagtcgacgacagagtagtcctcctcgtcgaatacgtacttggcgagatcagagatagcactagatctctcttgtcagcctccgcaggcaccggattgagtccatctaggctatctccaatatcgatgtttagcttgtcttgacttgtgtgttgtgtctcctctcctcctagggggcttgtatttatacccatagaag

SEQ ID NO: 35150 - DNA, 1089 bp, Oryza sativa
  unsure (1)..(1089): unsure at all n locations
gcatctttttgtaaaancccctgtttggacaccccggaccananaaagttggaanagcccatgcgatctgatctgcgaaggatctgagaacctgacaaaaaaaatggccttacaaactgcaatagatttatttcattttttgtttttgggagctgcagcatgcgttccaaaagagtggttctaatctattcttgtgtgctgttcatgttcgtacttacgtttgatagattcatacaacgcgtgaccataagaagaacagcagtagtaggtaatttttagtgaatttttatgagctccattatgacagcatatgctgtcacccgtgatttgtcctttttttctattttttttaatttaaaatcactatggctatatttttatgtttaactctttaccattcatacgttttttaggtttaactatttaccataaatatgtttttaggtttaacttatacggaagagaacatattctcttttgttttgttttccaaaattcagaacagttatactagaattcaaactactaagcctttggaaattattggtgatgatgtgcccaaccaacgtttcaatacaaaaaagagccaaaaaaaactatttatatgaggaactgttactttcagctgcacatcccaaatgcttctaagctctgcatattccctccccctcaaacacaaacacatgcaaagtttatctattcatgtgtcaatatcaaagttccgtgcctccatttaactttttttttcctgcacgataagctgtatggttgtaaaatttgacgaggttcagtgggcgggaaaagggtttaactgtcctggagtgaaaattttagttagctcctggctttatatgtctccatcactgtattagttacaccactatccctataatttattgacctagtgtatgctacaaattcacttcgaggaagcagaacaaaattgcaatgaatcctgtgctgatgttccattaagctgtattacatgcataccgtgctgtgtcaattttgttctggtgaaacatgaatcctccatagaggttaggcaaggtccatctatcctccaagggacgtcaattaaaatcacca

SEQ ID NO: 35151 - DNA, 999 bp, Oryza sativa
  unsure (1)..(999): unsure at all n locations
gaaatatgttccttatgaggaaaataatctttactggttttattatggttaaaaacagtcttcatagggtttttaatttcggatttttaaagtttagagcgcatattgtccttaataatcattaccagaacatgtaacaaaatatgttcttttcctagttagaccggccggcacctgttaccctcncctttatattagttattttttggcggaaactagataccttctggacagcagcgtactccatcctgcaatcctgctgttacgccttgccatgcataatcaatgaaatgtgaagcaactcctgttcggatagcgcccctcctgttattagcggctttaagtatcccggtcctaaatacgggccggatcagtcactagatctttgcaccaaacactagccatctcgtccaaagatccttagcatttggtggtacgtgtatcatgaaatgtccagtatacatcaataccatcatcgccgaaccctacccgtacgtagtgtacgtagtagtagtacgcatcgtcccaatccaaccataataggctcacgcgcgcacggcccgatccatccgatcagcggaccatcacacgattataattcccgagaaaagccatgcatgcatgtacgccccatgccggccggcggcctaacccggtgggccactcccgaccggtggttatccagacatgtcatgctagtgtgctaccgctgctacatgcacgaacagtgctgatatgagcccttaagctaaaatatgaaatgcagatgtctcccaatctatatccattgataataataacagcagatgcttagcagattcaaaatcaaacaacatttatgtgttggaaggaatgcgacatgcgaaataggggttaatgtcacatttgcaggttaaaggaagaacagcttgtaaagtgcaaaatatctttcttcccaagagcactaacggtgccttcaatatccatcacacaacggccgtcgaaanaaaaagggctctc

SEQ ID NO: 35152 - DNA, 678 bp, Oryza sativa
  unsure (1)..(678): unsure at all n locations
attttccttaganatcacgtggcttgttcatcaagatctgaacttgtccgaaagcctcgaccatttattggtggagcttgaaaaggaaggtaaaatccacacccttgtagttgaagtattgcagccatttgtatcttgacatgtgttctgcaaaaagtgctacttcctccgtttcacaatgtaagtcattctagcatttcccacattcatattgatgttaatgaatctagacatatatatccatctagattcattaatattaatatgaatgaggaaaatactataatgacttacattgtgaaacggagggagtattttattttattatgagaaatgatgaacagttatgtagctcaacatcaaagatgttaattgtttgttatattacttgtcttgaaacgagataatattggaccaggtgtaaagcacgtggtagtaagcaagaagggtaagtgctacttagttttgagtagtgcggattatacatgccctaaaagtagagcggatctgcccctactttcttccttcttttttgtgaaggtgtcatcaacctttctaaagcgattttgctatatctcactcgaaagattttttcttatctctcactcgattttctcactcaaatttacagtgcattttcttgtaagttatagtgtaatttatgaaacttacactgta

SEQ ID NO: 35153 - DNA, 720 bp, Oryza sativa
ccctaaaccaaaaaatggatattttcacccctaactatgcaaaccggaggaattatccccctcaaaccaattcagagcggttttgtccaacgtggcgcacacgtgacaatccagtcagcgtttttttaataaaaaattgtgagacccgcctgccatactcttcttcctctctctttgtattctctctcttgctcttttctctctcgcggatcatgcagcgtgcacagcgaggatggttagcgaggacggctcgaatgtcgacgcgaaggcggaggcggcaaaggcgacggaggggagtggcgacacagacggagactgaccgggcgcgtgcgaacacgtggtgggtgcctcctcatcgtgggcgcatggggacacgtggtgtacaccacggcctcggcgggatcgtcctcgtcgtcggtgcccggtggtagcccgtgccctagccttaagctccaacccccgctcgcgtcgccttgaacagcgcgagctcccggcgccaggacgggcatggctggagatggactgaattttcccatggagaaaggtccggggtcttcccgactagcaacacaagctgcgagctagccggtccgggtttgagcctcacccccttcttaattcaaaatcaatctagtcctttctagattggtctcatttgtgttcgcgaaaaaattttccatggacgaaaatgcccctctctaatgatgtttgtcatgtaaa

SEQ ID NO: 35154 - DNA, 543 bp, Oryza sativa
ccgtggaaataactgtggcttgaagttatagtaaacctttaccctcgtgcatggttcatgattgaagtctcaccgaacgttttgtcacaacgttatagaaatcgaccccagaacggctcagcaggaaagaggcacgtccaaatgcgcacgaccgagacagaaacaccatagttctgccaccgaacccaaacagtgcgtctgtgcgtgcagcgacaccagtgttgccaccgtatgcggaatcgcagttacctgtaccgtggaaatccttcgtgtagcctggcataggtacgtaattccagtactaggctcccatcggttgcccatttggcctaaaatggcttatttggcttattagaaatttcaaattaatttataagtaaaacttttatagatttgttcgtagcgacttaaaagccaatattaacaaaaaaaatacgttaaaagcattttaaaatcaacttcaaaatcaagttcaaaaatttaaattttggcttattttttgcttgtctaggccaaacgatggggctactagtgttcccggcc

SEQ ID NO: 35155 - DNA, 3749 bp, Oryza sativa
gtggaaattatctcttttttttttacttttgttgtaaattgcaaaaagaaatttctaatttcctccatttaaattttagcatcagttatatcattgaactattttagtgtgtttgctggattgttctgatagttaagtataatttcatcacttaattccgcacccttaatagcaaaatcctgaatcggcgactgatgtgacagatgagcatggatgcatatatcaatgataaaatttatttcgaggcgtctacaaatcaggcgttcgatttttttttcaaaaatcggacgatgtttcaccaagtagatcgaacatgtttcactaaatagataaaaattttggaaagctgaaacacaaccaaatcacctcatgaaacattttgctacaacgtatgaaacaacggttttcaaaaaaaaaatcgagtgatgtttcaccctatataaaaataatgtttcagcaaatagcgaaaaaatgtttatattcactgcaacatttgatctatacatagtgaaacattatgagtatactgggtgaaatatttttggtggaaaaaaaaaggaacggattcccttaatagaggttttccataatatgtgggtgatttgttgcaaaaaaatatttcaattcactgcaacattttatacatacatagtgaaatatcatgagtacactagttaaaacattgttggcggaaaaaaataaaacggattttcttaatagagcatttccgtaatatgtgaaggatttgttgtaacaggaagagagtggggggacacgtggggggcgcccgatttttcttacgcgtgtcgggctcccgatcccggcgttttccaacttatttagttgtgatgttactagaaaagatgttcgtgcgttgcaatgggtgaatactattttaatcttattattgttatacggtttggctagggtgaaattcactgtgggaatttgcttggatatttttttctagaaaatattgagctgcaattaggagtccaaaattcataaattagcatgcaagtgtttttaaagagattttttatatgacaaaaagaaagcgtgggtgaatcgcacacgagattgtttgcgcgggcttgctctctgtttcgctgttaaaaaaaaaacaaatccgatcattgcggcatggatcaacgatctgatgtgttagggggtaaattgatacggactcacgatgcaaaccaaaaggatgacgtactaaatttattggcaaaaatattttcaatttttataatagtaaagaaaagaaaaagagagaagtcgtgttagtacacttctccttgcatgctggaccaaatctttccgagattatccttccccaaacgattaaaaatcctgaccaactttatctccacgttgctgagcagtgagcagagctagtatatctcggatgagcattgttgtttcttctttgcgagttgtgaacgaagttttggagccatcgactcggacaacgaatcggacaagtgcgtatggtgctatggtcatatgaacttgagaacagtcaagtggatagtgtgatcaaagtgatcatgagctcacgctaacagaggtggtctcacatggctacacggcctgcaccgctgaggagtcggggcacattaataacgattaaaccagatcatgcaacgcgatgccatcagttgcctttttctttctgtgctcctttatcactttatcagtgatgtatcgtaaactaatccttttctttttttccctgtcacgacacatctcttgttcgtcgtgtagaaaagaaaacgttatttacagaagtataacaaaaaaaaaatatagatggattgtggatttgttatgctgaggcgtgatgatcagagttttagacatcaaagtatcaaaacaaatatccagtgataaggaaagatataattttatcatatcgtattaaatctttagtttagttttagtaatccactgttaacaactacgatcgatgtcatgtgccgcatcttcaccgtccatcttctttcgagaaaggaatgaaaacggccacggaaggtcctaactaagcaagtgtcattttcatataagtgtaccatttctaaccatttttttattatagtactatataaattttgattttcctaatttgtttagcgttgttttggtattgacactgaatagttaaattgatgaatatgctctattcccaaccggctgagaatcattttgaatatatgttgcaccgtttcattcctatttctatatgcatttgcctatgcctctttatcctcgctgccccatgaaagtccctacctctttcctaatccatactcgtcgttgcccatttctctacaccttcttgatttgcatgttctcctttgttccctcttcgtttgcaatgtctatagattgcagttgatttgtggacagtcgttgatgccattttgtttgcaccaagctgttgtcctccccacccagttctttcccaccatttctgcaccggtaaccacgacggggctcctatttgccgctgattatgacaccggattgagaaggggcacatggcattgtgttcgtcaatggtcatatggactacatgttacgttaacgagtccaacaacggccgggaataatgttgtatgtccagattcataatattataaaatatcttatttggttttagatttttatattttaggactaaggggagtagtatttgattgaatgtagagattcttgtaataggattctttgtttggtttgcttgtattcttaattcgccgagctagatttgtccgcttcacctggtgcttgctgcagagtgcagaccacctctgaatcaggttggttatctgtttctgcagatgctttgaccaaaggattgtgcacagtaattgacaagacatttaatcagttattagtcaatattggttatgaatggttcaacttcaatttttagtaatatgttgtagtagtcagatactcccttccctccgtccttaaaaaaacaaacttagaattgaatatatcatactccagtttatactagaacgtatctgaaaagatctatctaaatttagtaggatatgttacatcgagtcttaagttttttttttaaagaacggaggaaatagttctcatcgtgttgttttatttattatcctgcgggttaatgacttcagatagttctcctggtgctgtttttatcgtccaggtcttggtacaggtttagtcagcaactatgatgatataattacgccctttgttctcctttcatgtagaagatgtagatgcacataataagaagggttaattggatcattgtaaatttgcttattaagaaaaatgacaatacaattcgtctattcatagtcatgccactagtattttataaaattaaaaccgtgccattaccgtcacgttttctatcaactccttccatacaacaccgatgagaagccacctgcggatctgccccaatgccacagcatcatcaccgtctctagccagagccgcgaaggccgcggcgtagctgctcctgcaccagggacgctcccatccacgaatcgtgggtaacgcaccgagagcggcggcgcacggaagccacggccatgggcggcggcggcggcgacgacgcgctgtacgcgcgatgcctggtgatcctgtacctgatcagcccgatcaccgtgttcctgctccggttcgtgtcggcgccgtacgggaagctctcccgccccgggtggggtcccgccgtgccggcggcgctcgcg

SEQ ID NO: 35156 - DNA, 547 bp, Oryza sativa
ttatgtatctttcgttgagtttcaggtgtatgccactgcattgttttgactaactgaaaaagtcggaactgctactgaattttcaatgttcaaaaattagggtaacttgcatcattcaccgtaataacaggctgttttcgaaatgatgcacagatggaacaaaaagaaaaatatatcaagagccttcctcatttgataaatgatgaacttctatgtgcaaaacgcactcaccaagtcaacgtaacaagcatctgacataagatttagataagctcggcatctctctcttttcataattaaagtacttaaatattggaactctagaaagtgttcctaaaaaaataattttgacggtggtcaatcaactcaagtaaaaccaaaagaatgcacaagtgtgagatatataccacccaaaatggatggaacatgcgaaagaacactgacataatattgcatatttcacacaaaaaggcctagttaccttactaaactttacgtgagattctatataaaatctcgaactattaaaccgggcatcaactcccct

SEQ ID NO: 35157 - DNA, 705 bp, Oryza sativa
  unsure (1)..(705): unsure at all n locations
aagattttttttgagagccgattccggacagcagcgggcagcatgtgtcgctggccttggtgccgactaccgtgtgcaccagcccgttcagcatgttcacttacgccagctgttgtatttgtcttttacacaagtcatgtacgaggctactaattttcaagctttatatggaactggtattctttgggtttatttgaattcgtttatatatagttgtgcttattattatgttccattttcgcaacagtgtctttaatggcaccaaggaataagaatgtccttcctacataagagcaaggaagagattgggtcaatccacaagaccacaactacctgcagtcccagcttgtgcagtcccgttctgccctttgtagaaaatggagtatatgtcttctttgccttttgcctgaaaatggaaaaatgtaaaggaattcactaagtgtaaacaaagcgccggcaaaacaatactttgggattggataaataccatcaccatcaaactatataaacaatctctaaggttgatttccaaaagtattctacaaactatcgcgtatccacttggaaagacaggcgcctgtacattgaaaattactaattttcgcaaatagaaagaggaggggggggggcatatctacattaaaagcatactaaatttatgcgtgtgcaacagcgatgggatgaaaggcanattcagcatgtatt

SEQ ID NO: 35158 - DNA, 1185 bp, Oryza sativa
  unsure (1)..(1185): unsure at all n locations
tgcctggcnnnatgagatcatatcccctggcaggnngcagcgcacgtgcttccctgaacaggtctaataagggataaaataatgtttctatgagtatcctggtcttgacgtttcaaaccaagtactccctatgtcccaaaatataagggattttggaccacagggccttctcgcttcacagcgcaaatgcttggaaacgcttgagtatcacctccccctccgacacaagctcctgcgggggatgtttcttcacgacacaatactcctattgcgaggcatgatttaagagtagtcccactgtattactagaaagcccgcagaagcaattccactagcacatgatcacagacagcctttctaactgacctactccgacactactgaaacccacctgagtgagagagagagcgtcactgagttagagacaccgatatatctatcaccccatagcctcactccttccacaactgtcactatatcgggagtacacgggagctgaaacccttatgaggtgctttgacaagcaggccctattattcggtcaccagacctagagtgagcaaccacgggaggcgacaaggcctcgctagccaggatgagaccgaacatcatgccagaacctgggagcgaaaacacaatcaattcgatgtgaatcaccgccttcatttttgggcaccgggggacagactgactggctgtcctaccacgctttataaaaagatggtgcatcaccgtcctcttttgaacccaagctacaggaaaaagttccacttagcagggccttttacctcacaaaatatattggcgcccacccaagactacccgcccaagtaaaaatgtttgggccagccaataaacaccaaatggcttgccaacgttataaagctgacacaaataaccctggtcccaaatacgaaggaatttggcaatggtagggcacccggcaaacactcgcggtgatttcccaccccttaatctttgaaagagcaaaggggtttttcccctatccccgcaaatttgggcctcgcccggggggagctccgccctcagaggcccccgcggaccctctaaccttggtgtttttaccaaaacattttttcctgtgcccaaacaaaaccaccccaccctatctccgggggcctacgaacccccaatagagtccgtgacccaaccacacttacgaag

SEQ ID NO: 35159 - DNA, 524 bp, Oryza sativa
ctcgagttaaaattcagcctatgattttttttttgagttgagatttaaaatttatccaatgatatgagttttctcgagttaaaatttagcctatgagttttttggcattgactttttttttactgagttaaaatttatcctatgagtttttgcaaaatttctcttctggcattgacaattttttttttgctgagttaaaatttatcctatgagtttttgcaaaaattcttttctttgtatttgcaaaatttctcttattttgtgcattgacatttttttcactgagttaaaacttctcccatgagtttttgcacgctcagacattgcagttttttacattgacaatttttttttgctgagttgaaattttgctatgagtttttgaactctttcaaatatggtcaatcctttcaagagctgaaaattccgttgggttttgagttgtctgggaggccttggcgagtttactttttagagtcggagagagagaagggagtcctctccaggcgcgtctatcaggcgct

SEQ ID NO: 35160 - DNA, 1001 bp, Oryza sativa
tttgtgactctgagaccctgtcttagggtctacaagtgtcagcgcgtgatccggaaggcgttggctagcgctctcgatcgcggccgcagtccagtggccggcgggacgcgcgacggcgggctggtaggtccacgcacgcccgatgcgcgcgggcgctgctgcctcgctcgctcccgctttctatcctgtttgccgtggacggggacggctcggtggcgacgagacggaaaaggcgatgcggatgacgatgccgccaagggcgcggggccgaaaccccgtccctgtccgcggggctcgcacggggggaaagccaagccggagatttgcactccgcgaaagtaaccaacgcgtcgtggaaactcatgattttataaaaaaaatatccaagcgaatttccacggtgaattttaccctacctaaaccctataacaataataaaattaatatagcatttacatgttacaatgtacgggcatttttctagtgatttaataaatttgtgctcacatggtgagaaacccgaccttttaaattcttaccaattctctctcaaaaagttcggtttcccaaacagtagtaaaccatctctgctggtggtttcttgatttaatttactccggtacccaagatagcaccaaccccattttaaaatatatataattagtatcgataccgacattggagatttatactattaccaataggaccgacaagggtaaaggtatgtcaattagaacacggtggtctccccttcattaggttcagaattcacttatttttcacattcttaaacacaaattggaaaaagacacattctctcgtggcatcaaaaactaaaaaaatattatttattttacccattttgcatagcaaatatttttttcatttaccaaacttggtacaactatttctttataaaaaaccttttatagggaggattgagaaaccgcaaaacatgtcggaaagggaaaatttttttcatattaaggggtatttttcct

SEQ ID NO: 35161 - DNA, 502 bp, Oryza sativa
ccagcccgatttgggccaacaacgccccgaatcggttcgaacaggtggcacctttccacgacaccttgctgctgcttatccagttatcccaaacccagattagacgggccgaaaaagaggtttctaccccattcatccaacacgccgcacatcgaacttcttatctagctttccgagtacttccaagttccaagtccaaccccttctatcatgctccatgccgcgcgcatgcatcatgcacgctggacgcaaactacgtgtcgaccatggatgcgacgcgacgcgacgcgaggcttgcgtatgtgctcctcctccctctccgcggtgaaagtgaaaccgatcgatccctgcaaataattcaccgcgcgcgcactcctcctcgggcgccgatgggtggatacgtccacgacgcgttggttactttcgcggagtgcaaatctccggcttggctttccccccgtgcgagccccgcggacagggacggggtttcggccccgcgccc

SEQ ID NO: 35162 - DNA, 526 bp, Oryza sativa
ttgctttgatttgcaccttattcacgaaagatttcttgcaacattttttctctgtgagaaacaggtcaattctagctttgttcaggaatactatttttttccatagcaccaaaggcgtgccacaggcatagtatgattgtgctatttccttatcttttgagccatgatatggatgtccgtatgctctacaaacatggcgagaatcgttacccatcgcttgtgtttgtgttgcggggcattcctgcagaaattgataccagcaactaattaatggtactcctgtggagtcctggttcagtaagtgtttaactggcactcctgttaagtcctggttcagtaagtgtttaactgctaagggtatgactttaagtacacagggagattaagtgattaacaccgactagtttcagctgaggtgatggtggaggtaggatctatccaatgctgcgttcgccgcagctgtgaccatcatccggccactgccatcacgttgtcaccatcacttgcttcagccttggtcgtggcc

SEQ ID NO: 35163 - DNA, 1029 bp, Oryza sativa
atgggaaaaagaaaagaagaaagagagaaataaaaaagggaggggaggcataggtacccaggcaggtaggtgcatacctatgatgaggtgggacctcgtagtatttagtttgttctaagatcaatttaatctagcggtttataatattggacctacggatttaagtgagaatcaagtaactgatacttggtcttttttttcttagaatttctaatattggccctaatttattagagtatcacgtgcaggcttgagagcattttaaggaattttaaatgagtaattagaatattagctgcgcaatatataggtatgggacgtatggtaatattggttccaacttggtccatgtttatatatatgtagagagaaattaattttggggctaggcaagccattagatgtctaattaatagcaattaattttgacacctattgacaattgttcagagtaactcttacatattcatcttacgacttcgatgatccgttgatcaccaatttactgatcaccatgactcgcatgaaaaaaatatgtagtacttaaggtttaggatagctgaaattgatgaattatataatttatgtgatagctatttgagggtataaacgaatgaattgacttctaaaaagttataatgttgtttaaatacacgtcactgcattatcatgtgtgatctctgaactatataattgatgcttgttgctgcgcatatgtttccctgaacaggtgtaataagggataaaagaatgttcctaagagtatcctggcactgatgttccaaaacaagcagatgctaacaaacaatacactaagtttctacaatctagtatgcttcgaggtaaacaaatttctttggagagtatttacaagcaaatttgtttccaaggataaaggttgtcatatagaattaagaaacattttatggagaacttttgcaacatcagcttgctctctatatatagcccggtatcaattgttaccaagtatcaatgtaattttatccggcactacaacggcttcaaatt

SEQ ID NO: 35164 - DNA, 1008 bp, Oryza sativa
  unsure (1)..(1008): unsure at all n locations
accaccaccccanaaccgaccacggaccgaaaggaaacacgccgaaagagaaactgacccncgcagcgcacagcaggggccacaccccccagacagcaacgacaacactaaaaggcaccgcacgcggagcaccgccccccccagcagcgcgggcccantttggaatggacaaatcccttgaaacccccccctcccccgagaactccgagggaaattgcggggaacccacaggctcaaggaaaccgggtgggcaaccgctctaataacctttctataaaaagggggacaacttccttggcctaggcggaaaacggaggaacgaacctggggagaaaacaaaaccaaaacggggaggaaataggccctaaggccccggccttccggcaaaaaaagccggggtggacaaaaacaaggccccggaacaccaagcggaaaagggcaaaaaacctccggcaaggaaaagccccaaaccggtgggtcaaaaaaaagcgggtgaggtgggaggaggggaagaaaaaaccggggggggaaacccggaacccggaacggaaacggggggggggaaaaacaccccgccaaaaggggcgaaaggggccaaagggcccgaagggccccccaacccggcggggggggggcccccgccggtacccaaaaaaaaaaaggggggggggggggaaactaacccccgggttgtgtcgggaaaaaagagcccccccccaaaagaaaacaaaaagggaaaaaaacgggggggggggggggggggggaaccctacggggggcccggggggggcccccttaaaaaaaaggggggggggggggaaccccccaaagggaaagggccccggaaaccaaaaaaaacgggcccaacaaaaggggggaaaaaaaggggtgggggggggagagcccacaaaaaaaaaaaaagccggggggaaatatatccaggcccgaattcgccagaaaagcaaaacaaaacgaaacccggcccgaacggggcttaggaaaaaaagc

SEQ ID NO: 35165 - DNA, 557 bp, Oryza sativa
atatacaccatatatacatttatggaagcagatttattgaataagatattcagctggaagttattaaataaagatatctttaggctgcacattttttcatatatgccctttaagcaatatgaaattaccatttatagtcttcatcatgtgcctttaaatactgccaagttggagacacttatcagtcaagtgttcttgagaatcctcatctccaccctcaccatagaaacaggactagagtcctttcacgtgtcctagatttgggcacctttcttttgatcaccgaaatggaacgcaagaatctatatgacataaataatattatccatctttacctctctctcttctcctaatgctacattgtatccatatacattgtgattgctatagctaaagtttatttatatgaatcctatctatatagaccatttttgccatatacattggtgatgcactaacaccggcaatgctgatatgttgcggcttgtagctagcctaggcttctagactacccatctaacagcacatctagactgtagtataaatgagtacaatgc

SEQ ID NO: 35166 - DNA, 538 bp, Oryza sativa
  unsure (1)..(538): unsure at all n locations
ccgtccaatagtacacatcttgcnnnnnnnnnnnnnnnnnnnnnnnnnnnnnnnnnnnnnnnnnnnnnnnnnnnnnnccgagttcttctcccgcttcaccgccccgcgatcctactccaagtggaccagccgcctcaagtgcaacctctactagtaagtagtacggcttctatctcgaatctacctcccacctctgtgcctctcctcacgaatcgaagaatgagtgagctagattggttggcccactgtgatttgggttaaatcgggttggaatagggggcgatgcatgaggtgccaactgtttagattcatttggaacgatacgttagctgctgcagagatgtttcacatttaatgtgtgtagggcatcgatctgaattctacttttggagttaaacgtggaatctagatttgattataacttgttctgtgaggtgtacgtttgctgataattctagttaggtgtagctcactaaatcgagacttgaaatttattggtagcttggctacatcatggaattttatatgtgagacttag

SEQ ID NO: 35167 - DNA, 684 bp, Oryza sativa
  unsure (1)..(684): unsure at all n locations
ggggcaacttgcctcgggctaattgactcactgtgactgcttcatgacaaaaatacacctatatagtacnngtggtttatttttttttataaaataagctatggtatcccaattcaataagctctccagatagtatggcctcttctgagttctcaccctgccactgtagaaagcttcggtacacaggccttctgcttgcttccttctccaggtacatgcctgttgaaagcaaagcttcaattttgtttctaactttacttttttcttgtgaggatgggcacagggggcacatgagcaaaagttgaggcagtggactactagagacctttccttaatctaatctgtgatgatggattctcgttaagcatatgttctttccactctaagatacggctgatttgatccctcattggatttggaacgcttttcaaaatgcttgttttttcgacttggtgatctaaatagtggcattcctgctgcttgtttgatgcattcttaatcacgtattaacttcctggatttgttgtttctggctgtaatgtataaatgtggtggcccggcttctcataagtagagtggcttttagaacacgttaatgctggaattaacttgccagatgnnnnnnnnnnnnnnnnnnnnnnnnnnnnnnnnnnnnnnnaaggaccgtcatcaatntntccaggc

SEQ ID NO: 35168 - DNA, 646 bp, Oryza sativa
tagctttattgaaaatttggcatagcccagctagaactggacggtaaaacgagccttttacactaagacagaaaaccccataagtaacggttatgaactagctatggtcgctacgtttgctccaatgctatacatgtcggcttattaaaaaaaacgccacgctggcttccacgccgggggccgccacccaatgccgcattggtggaggggggaggggggcccaggcccccccgccccccccccccccccccccccccccgcccccccccccccccccccccccccccccccccccccccccgcccccccccccccccgccccccccccccccccccccccccccgccccccccgccccccccccccccccccccccccccccccccccccccccccccccccccccccccccccccccccccccccccccccccccccccccccccccccccccccccccccccccccccccccccccccccccccccccccccccccccccccccccccccccccccccccccccccccccccgccccccccccctccccccccccgccccgcccccccccgccccccccccccccccccccccccccccccccccccccccccccccccccccccccccccccctcccccgccc

SEQ ID NO: 35169 - DNA, 524 bp, Oryza sativa
  unsure (1)..(524): unsure at all n locations
atgaaggaagacaacatgaggacacataaaaaagaatccctactatcaatccccacccaaaaagaaaaaggaaaaannnnnnnnnnnnnnnnnnnnnttcaatgacatactgcttgaaactaacctttggatgaattagccccaaagtcaggtaaggaggctcaacattaaaggctttactttgtttattttagaaatgaaatgccaagtggagcataactattttagaggctttcacttcaagactgcccataggtacaggaacgaaaacaaaggcccagagggaggttgattattaggtgtaaaatgacaatatctcacatgtgtaagttatgaattatatagaacatctaagaattgcatgaatagtaaagtgcattgttattgtcttaatggagtcaaatacctttaggaagaaatgtccacgcagcaattttttcctctataccagcaacaattggatcctacaaatttggacatgattgttcattacataagaattatgtaaatttaaaggaaaattc

SEQ ID NO: 35170 - DNA, 599 bp, Oryza sativa
gacaaagagcaaaaatatcatattgtctgaaaaaaaataatttaagaccatcaactatatctaggctaaattctttcccacgagtctttaaaaaaagtatgttttcatgaaaataccgtgttgtactgcattgaaagcttttttgttaactttagttatcaaatatttaatttagttttataactaaatttgtaaaaataattcaataaataatttgttttagacgtgggcaagatttttttttactagataggcaccggcgaaaatcccggcatgacaagtgcgcaagtgtggccgtggccggccgtcgacggcgacgcttcatattgaagactactagcaccgtggatgctcgtcgggcgtattgcccctcagcttgtctgctggcaaagtcgtagactaaacagatggagtagtaaacttaatcacgtctactatttattttttctctacttaaatattaattaaaattttaaagtttgatcgaatctataaaaatgaaatgagcatagcttcactagattacttgtgatggaaacagctcatctgagcctaaatcatagaattgacatatatccttggaattaccgcttattata

SEQ ID NO: 35171 - DNA, 509 bp, Oryza sativa
ttttcttgtcataatcaaatggtacaagttggtcattgtttaatcacctgagcaacgagttagctggagcaatgaacgttccaaccttgatgggggtagaggcgaatcatactcacacaccttctgcactgagggcgtaggaggatgataaaaaacagggaatcagcttccaggtcaagagcgaggaagcaggtatgattaatccttcctacttagaattttctatatattgtatgctcttactttgcttattataatggactgctttcaaacataaaggccttatggattcgttcctcttaatctcaggatgtaattagggggcatgtctcttactcgaccgtagctatgctagtatagtaatatatctgtgacatctgtccacagctgcaagaacataccacttgcaatagcaattgaatgccatccaacccttatgttatggatcatgtataattattacagcggtgtgcgcattctaactggaggcttacactaatgagcttgaa

SEQ ID NO: 35172 - DNA, 590 bp, Oryza sativa
gactctagaggatccccatctccggctggtcggagaggagctgcgcgtggagggggggactatctagttatttgttaccactttggacctgttggtgtaacaactgtggcaagtggatagcgagagaaaaaaataactagctaaaataaaacaggaattgtcgactgtgcaacaacagtatttcaaagccatatcaacataataacacagggagtagtccttagtggaatatcatttgtctaaaggaatgacaaaatagaaacagtacaatggtaacagcagagaaagtaccttctgcttctttagcctctcattctcctcttctagacgaagaactttgttttcaagctcattagtgtaagcctgccagttagaatgcacacagcggcgaaataaatatacatgatccataaaagaaggggaaaatggcattccaatgctactgcaactggtatgttcttacagctttggaaagatataacatatatattgatatattagactaaatactgtatgagtaagagaaatgccaactttatacattcagagatttaaaaaaaagaatccatgaggcctttatgttgaaagca

SEQ ID NO: 35173 - DNA, 505 bp, Oryza sativa
cctctttgtttaagcttaggcttattggcctagacttttaagtcagcttattggcttatatgatttataagccagtggatttaatgtcctaagtttaatggtagagtcatacatttatctcatataagccaaaaaaagcttctccaacctagcttttggcttaatagtggtagagtggcttatggcttaaaaaagccaaatgaaaaaacttgcctgttttgttttggcttagacttttcgacttataagttggcttataaacctaaacaaagagggccttagttgtttttctccgaaacccatcttaatttggccctttggctagatagaggtggttggcgactccatatcaccgcaaggcgtttaggtgttgcgatcgtgctcgtcgacttgtcaaaaaagttgccaacaaatggttctctagattgtcacctttttaataatgtgaaggtgttggactggtacacaagattccaagttattctaggtgttgcaaaaggattac

SEQ ID NO: 35174 - DNA, 506 bp, Oryza sativa
ggtgatctgaatgaacccaatctgcagaatgttctctccctttccggttgccccgggggagggatttatggaatgggatatggtggggggctttattctgctgatttttaatgaactcaccccacacaaagtgctacaggtctaaaattattctcgtggcctatcggataaacttatgatctgcactttattccaaaaaggctaccggttgagattatttttttcttgcagtcaatagttaagtttcatgaacaaccgctaaaatgctgacgctagcgtatgcaatttgatccaaccttgggagctcaatctttacagaacatggatatgcactgaaataaaattctctacaagccgacatcatcacccatgttcaggagattgacttctggatcctgaaaacccccatgtttttctcaagtggctacctcaagataataacaaatcctctcttatggagctgtacatatatccactgaaagataattgtgcttctaacatcttca

SEQ ID NO: 35175 - DNA, 1188 bp, Oryza sativa
atagccgatgccgtactagccgatagcgatatggtttaagcaatcggctatatgtccaatgtagataatgatataaaggcaatcggctgatgatgatgtaataaaataataatataatccagtataaaccaatcggctagcattgatatgataaaaaagcactaatccgatagttaaagcatacatcggctggaggtctgatgtcatgaaatccacaagattagattaaacagtgaaacatttgttgtcatcggctaaatccaacttatatgtatatgcaatccttatgagccgatgcaacgtccagataactcaccagctgaaacccttattggcagtcaaagagcaggctagagattatggttctaagcacgacttggtatatcaaacttaactgatgcagcactaagtatgaaaagaaacataatatctagacaatcaagccattgactgagttttcagggtggtagatgtctaagctaatctaatctagcaacgtgatttagccgataccggcagaaaccctaaaacgagaagcagccgatagagctaaattgatatgctaagactagattaacagagacatatgataaataggtaggcaaatatatcatccaaatcagagcaatccaacaggttgaatgccctgatgcagccttgaacaacgccgacgtagacgatacaattgcctggaccgacggaacattggacttaccccttcgccggagatcgaacaccgatttagccccgcgtcaggtgccaagtcccgccggtcgataaaataaagtagaaaaggtaaaaggtggcgatgcgccgaattgtattgatcgtgaggatagattacatagaccccgggtgtacatatttatacccatgggttgatacaagtccttgtcggacaagaaagaaactttcttaaagatagaaggaaaagataaagtccttataggacactaaacacactttcctaaagataaaagaaaactaacaaactattcctcattaatagataacttgccatgctgcattctctttgaactcagtctcttctggataagattcctctgattgatccgactccaccaagaacacgacatcgcggcaacttgactcccatcggctgattctaaaactttgaagtcgatactgactctaagccgatagtaattttgggcttaccaaatttca

SEQ ID NO: 35176 - DNA, 623 bp, Oryza sativa
  unsure (1)..(623): unsure at all n locations
gtctatctttgataataagaatttgccgattcggcctatggttaaaaatgaaccgataaccaaaataaccccaatttacacaatataagttccattccggagcgttttttcttaccatggcggttttaaaccgatatgggcctttaggcaatcgtttgtgcccaatttaacaagcccgaacccccaaacccgtggaccccctggttgttgttcgctcccctcaacacaaatgaaccttcgggggtgtggtgggggggttccccccccccccaccccacaaaggagccaccccctccttttaggccactcccaagaagaggttttaaaggcgggggtatgaggggccccctttctttttctaaaaaaaaatcccccaaaaacctctattatttatttataagagaggttttctttttgcgccctctcctcctttcgggtttntnttttccccccccccccctncnnagagacaacagtggggagaggataaatattattttctctcccnccctccccgttttttcgaccaatttgtgtggttcgctctctcctttagaggggggggtnnnagaggcagaagaccacctctccaccntncgaaaaaactccnnnntgctaataat

SEQ ID NO: 35177 - DNA, 1350 bp, Oryza sativa
  unsure (1)..(1350): unsure at all n locations
atgcatgtctgccttatattatgaaataactttaaataaaagaacggtgtgccttgttttattgaatggagtattgaagttctacggggacatggaattaaggaagagactattcaattattggttttcataacccaaacagtttttttctctatcatgattttgaacaaagcccaaattttttttaatttcaaacaaaaacaagctggagtactagtaaaataaattaaatgggccaatgaccaaatgacatgccccattttcacccctcctattttctctttttcacgcatctcgacttcatctcactcttcccccttccttctttctcgctcgctgcgatctgcactggtactacggtaggtcttctcctccccccccccctttctcgagcggccgggggcaaccgccgtgaaaagccccgccggggggcgctgaacccctacggctttttccggggcgcgggccccgcaggccggccacggtgtcggggcaaaatgaaaccaatcgaatcccaaaggatttctctttggctttttttcttcccggggcccgtttggattgaaggctcggggtcgccgaagatagggaaatctgttcccgggttgggattgggttggggtaggaattttcttttcccttcccaattaacccccccgtccaagttgtgtctataaattttgggaagccgcttggacctgagggaaggtaagtttttggacaaagaaaaaactgtggggttaatttgaaaccctaatggcccccaggtttagggcaaacctccctctggttatcgccggttgctttaaggttaacttggaaaaggggttgggtggggaactctctccgggcttgagatttgcgtcaaattggaaaacccccatttcattgaatttatggacaatggttcttccattctttaagataatagccacgccgccccacgttggaaaaagaacccgaattcttgttttttcgccaacacgggccccatttcttagtgttgtgaaagcacaaggggcccttttatgggctctaccattcaatgaggttcaaaacaccattgggggggaccgtctcttatataaaacacctgatagacgtgtataaaaacggtgttctggaggggcgccaacctctttgaagggggggggtggggtggcgggtatatatggcactacatataacacacaccctcgtgtggttttaccccncacggagagaatatacaaacacntctcccgctccttacaataaaaaacacgggtggagagtggtgggagagctctcctctctctctccacaaaaagatgtttctgaatagtatgtcccccggtgaggacatacaaa

SEQ ID NO: 35178 - DNA, 852 bp, Oryza sativa
gggcttcccggttcctagaaaaacgaacaggaaggctcccgccggaacctgacagtagacgcccaatcctcccccccgagggggaaaagcggagagcgaccccggggccatcacgtactaagccggcatatagaagaagtataactaccagcccgccacagcgacaccgtgtacgatattggaataccccccagtcggaataaatcgccgcgttcgagcggaatgtcggccaccataaaggcaagggcacaccacgcgaagaacgagtaatacaaacgctatcccgtaggtcaaatgggagcgacaacgtccatacgaggtctgcctcacgatacggtacccggtgattcccttgggagggtgcggcgactattgccaccgaacccggcggcaataaagaaggggtgaggcgtggccgccaccaagggggtggggcaaaaacccacgtccgaaccccccgtgggccttaatgtaacaatactgttgggtctcaccccgggaacagcaactatagcgcccggcccaggccattggtaccaggttctcaagacggggtgttggcgggctcaccaatccttgagaggggcggtaacccgggcactaagaaaacacattgggaattgcctctgtataacacctcctattaaaaaaaagagagaatttgtaatgaacacaaaacatgtggagtggcggtttttgttgcaaggctataatgcgccaaaaaaagagttcagaaatctgtgttctctggggggggcgccgggggcacaacactctggggggtgtgcgatagtataaaagagagtcgccattattctcttaagagagagttaatctcggagctgtgtggcg

SEQ ID NO: 35179 - DNA, 864 bp, Oryza sativa
gatttgagctcaaccgccttctttacctactttctcatttatatgtaacactctcactctgtctatcatatctttacacttactacttatttctcactctactacataccatcatcgaatatatattttgattttatgtttggtcacacactctctacttatcattattcttcctcgattgtagatctatttaattcactacattccaattttatcaccccatctcttatcgtattccattctcacactccacacttgccttgtcattacttcagccgctcacatcatgccttctttctttttctcattagttcgtttaacttagtaaccattctccatcctcttccagcctttatttatatccggttacaatcattcttacgctactctcttacttccattccctttcctatccatcttttatcttctacaaatataatgttcattcatcgtgaggcttctgttcctcttactccattctacttaggtcgtaatcaatcatcgctctctactcatctctctcctgacatttatcttctaatagtgtgcatctcttgccactagctatctgtcatcatacccactgatacaagtaccggcatccattctattcatcaatgtagttcgacatcgtctgtattctttccttcctgcttcactcatgtacagtgataacgaagatgataatctccgccgctcaattttgttgcgcactattgtgtacaataacacaattttggttttctccctctcaccacatccttaataaacgggagtttatgtctgctaaacaccctgtgcccggtgtttctgttacacattcctcacaaagagatcaagaactctattttctgggcgcggccg

SEQ ID NO: 35180 - DNA, 701 bp, Oryza sativa
  unsure (1)..(701): unsure at all n locations
ccgtgttcaactttgactatccgtcttatatgaaatttttttataattcgtattttcattattgttagatgataaaacatgattaatattttatgcgtgacttgtctttttatttttttcataattttttcaaataagacggatggtcaaacattggacacgggaagcagggtttgtctttttttgggacggagggagtagtaaatttacaagagtgattcagacatatttcgaattactacctccgttttttaatagatgacgccnncnnntntctttcccctccttgctccctttctttttctcctctttttttatctccctttgtttctattcatctctctcttggtcctcttctcgtcttaagtcatacccctatgcgctctttgcacatgtaattcttacgcttactcctatcgcttttgcttttccctattctgtttccctatcttccatgcccactctctttctttttttgtatcctactctcactttttcttcattacctctttttcgctaatgtctcttcgttttatcgtatcggctaaccgtcattctctctctcgttttggctattctttattatttcctcctttatctcccatgtcattatctcttcgccttcgttcttccgtatatgtttatacctttgtttttttcctttcatcccttatgttttatacttcattctcatccccccg

SEQ ID NO: 35181 - DNA, 1156 bp, Oryza sativa
tatgacgaataagagtggcattattttgatatgccatatttgcacttttgcagtggcatggatccaattaaccaaggcccaaaccctacccggccgtctccccatctcctccccaccgcgccccgcaccggcggcggggacctgtctccgccgttcgtcctccccacgatgccgtcgtccgctctccccccgccgccacctttcgcccttcccctgccgccttcgtgcgccatcccaccgccgccgccgtcgacgacgacccttctcccctccctctccctcctgcccgtcggagctcggcgccccctcccccttgtactctctcccttgtggcggcgtctgtgcctgcggcggtgtcggagtcggcgccggttcacccctattctcactcatctcgttgcgtagttcgacccggcgctagccttccttcctcttcagatctggagcaacaccggtggtgacggcggctaagaaagaggtgttacgggccggacgagtaggacaagcggtggggagtgggacatgggacgggcagatggcccggtgcctccttacccttcatatccccctaccttgggagagagacgggcgtagtgcatcctttccctattctattccagatactagacggatggtgattcttccggtctcacatattcacaacggcggcctttccctgcgggttcctcaaactgtgcgcttcgacttactttgaaacagtttctttttctactttcaagtttacggtaacaaccgcttctcccttttcaatattgggggtgatacccctggttgtgccccattcttctatggttcgggggttaacgttatgacttaacattcttgttaccaccggaaaaattttacatttatcaacaattttttaggcggcgcctttacccttcaaaagggggtgtttggcaaactaattacgcaggggttttattgcctctaaacggggggacaaatttgtgacaccaccacagggcccgcccatttccccatgggttaaattgaccggcctggcccgctaaaaattctttattttccgggaaaccttttaaacaaggatttttttttttagggaaagtggggttcccccgcgaaaaaaaaaaaaatcccggtattagccctaagtatccaaaaaaaatacctc

SEQ ID NO: 35182 - DNA, 570 bp, Oryza sativa
ccaataaatttacctctgaattttctggaaaataccggattgatgtacacatgtgatcaggatgatcattagctgcttaaatattcagtgaaactatgagctaattaaccaattaccaaagactcttaccaaaaccatgcagctctgctggctcattgtaccggccaagcttacactggccaatctgaatacagccaaagaatcatcagattgatgtttcgcagattcctgccgtgtagattgctctcacactgccactagcttccaggttgacctagtaatactactcaaatgataactagggcgctctaatctctttccaattgtaaagtacataaatagttatgaaaaaattcggaaaagacagaggactagatatcctccctattcaatattttaagttacgtattggatactacggagtttgcacacactatagttattttaaggtaatggaaacattttatttgagctacagctaatattctaaaattaagttttaaaatttaaaatttgattgcggttgataataaacaagcaagcagcctctgctggttgccacaaaaagta

SEQ ID NO: 35183 - DNA, 629 bp, Oryza sativa
gtggggattagccccagggcatacttgttcccagggtcctcctgttacatgaataatacatatagagcccaactcccggcttcctttcctgtaatactgtagacataacaagtacttttggtccaaatcactggctttaacacttttcactgctttccataccacaccctgtgcaatgcaacttttcaggtcctcacatcaagagatggggtctatttctgcattacttgcattagggctgaattggagacctgatttgatcaataaaatataatgcgagtgatgtttcttggaaccctgccactgtctatggccaagcacaggctagcctgttagcaggtaagagatcacgtggaacatatgatccatcccggccaaggctgttatagactggccagtacctagctgaacaaccaactgactgcagagacaggagtgaacccctctgagatgatctaagcctagcccaagttagcataactccccagctgacttgtagacacattaagcaatgttaaaaggttattgacttaagccattgggttttagggcaatttgttatgcagcaatagctaactgatacacttcctccttacttagcaactgaagaaacatctgaatcacatatc

SEQ ID NO: 35184 - DNA, 551 bp, Oryza sativa
cactaccatgtttactgacgatgcataaggattaattagctaaaaggatgtaaagaaacctttgcaacgccagtaaaatggtgatttgaatagactgcatgaaaatgaaacaccatatacctctgccagcaagataggagtgcattgtcaaccacaacagcctcagagtatgtataaaacagacaggaaaataaccaattaaaggtgatatacagtagatagcattctgatagcattccaggtttcctctgtagataccagctatagaaaaaaaaaactagcttcttaccagcacagatggccgtgctactgtgctagaagcctagaaatgaacgaccaagggaatgtaactaatgaaactggacaatacataaaacttatcaatttacataaaacaaaaattatcacaaaagtttcaagaatcacatacattacattaggggggaaaagcaaaacaaaaggtaatgtggctaaaaaaataattcagaacttgaactaccgattgcccctaacgattttagctattgacttgggtaaggtcccgtgccaaa

SEQ ID NO: 35185 - DNA, 585 bp, Oryza sativa
agcttcagtaggtaaattagtttaaaaactgccgaaatctatcctagcaattgaaaaatgatgaaggttgaaagcacagacaacatttaccagtttctaaatcgttgtttaccatcctaacagatcagtaagcatgatagtgtaaatgcacatcatacaacacacttgacaggagcctgtcacatacctggatcttgttgaaccctagcacgccgcttatgtgcaacaacagaacgcttgaactctgaaacagcctgtgccttcttttgctttggtagggaaccgtctacagcttggagaagaccattagctgcgcttaacgcatatcctgtctgtacactaccgggtaaaatgagttaatacaagctcctgtgtgccaactgccaatataatagaacaatgacattaagccagaaacatagcatgctaagtgagcatttgcgtgccattcgtctttagttctatgccttctataatagaacacataatcacaagtcctaaccagacatcatgaatttatgagcgacaagcacgacacatttccaaaaaaaatctaacaatgcatgacctaaaagtacacaattt

SEQ ID NO: 35186 - DNA, 1198 bp, Oryza sativa
tgtgtctcttatcctgttgtagattaggggtttactggtgagatgtaaggtggaaaaaatatcactattgcagtttatgtgataggatatgcttcattgttgtgtttgggagctaggataacgatactatgcccatgtttgatgtggtgaacccagttatttcatattagtgatgagctcacttgcttgatatatggtatggtattgctcatttagtctgcttagaaagtaaaggtgagaagtcgcagcttcagttgatattaccacttgaacagagcaagatgttatgtaaattatttatttggttatgatatttggaaattcctaaacctcctcgattgctcaagtgaaccgcaatgacagctatttttcaaaaaacattgttcaacaaaaagttccaagtgtaacgtttatgttcttattcctgcttttcgcatctgatacttgccttgcacaaaaagtatgctatacagatttgacatctctcctcatattgttgaagcctgataatcccatgttctgattccctttacgttttctatgatgcaggcttttcataaggtggtccgaagttgggcttcaaagaaattcatgactggatggtaagtctctgaaggatgctgcctaataaatttctgctcgttcttctatgcatctgagtactgtctaccagtgaacagtataattctttctagctaaaagaaagttctatttatgctacagtgtctgtgatggtttatcatacatgacacggttgttgtgggtatgtattatagcatacttaaggaatgtggttacaattcaaaaggtcaaatttatgggttccagaattaataaaatcttccagaattcaaacttctgttctctttgcagaactgagagtaattcaggcaagtgctttggcaagatcactaggttcattgctggttcgtatgatagtgggtgcctatttcttggaatctgggatatagtctttattttttaaaaggaaatcagcttggagaaattggttaaatgccaagatggtcacgtttggttggaagttatgtagagttatagattgatactcgtgtggttgcttgattagtgattgtgtatatattcacatggcaatgacaacgatgaagcacacaattagggtttaacactgttttcttatgctatgataatttcaatgatagtatatgaaattatcttt

SEQ ID NO: 35187 - DNA, 587 bp, Oryza sativa
aaccgccagacttttgatggtggaacacccctcgtcgaactcgttaagttcggtgaacaggctcggggtgccggcgggcaagaaagattgcttactccctccacaaagggaataaggtccggccgggtctcgaagtcaccaggggcgaagtggggcgccgcaagggaatactcctaggcaaatgcttcggcggccgcacacttccccttcgccttggccagcggcgaaatggctggctcgcgcacagggctcccgaaaaccctcgccgcagccgacaagatccgttcggcggaggcggaagccccggcggcggcgctaccgcctgccccagcaacgccgagcggagcaaggggagcagccgaaaggtccaaactgcggccagcaggtgaggtcggagtctcgtcagaagactcgtcgtcgctgaaaacgcgagcgatgtcgaggaatcccttcttttttaagatcttcttgaccagacctcctttcgccgccttgcccgacgagaacgcaactaaggccttcgccccttccaaatcctttcggcgaagaggggagctgttcgactccaccccagtctcgttgtgatc

SEQ ID NO: 35188 - DNA, 559 bp, Oryza sativa
atatgcaagtgcacaggataacaaaggatggcatagtagggtttcatttgcataaacagcatttaataaacatttcagaatttaataaaacagttaagtaataattaaacaatattaactgtcgcgaccgagaaaaatacattttcccgaacgctagtgtattaatccccgtcccaggaaaagccggggtacaccaaacaaacatgatacaaaaggcacatctttaatatatcgataatatttacattattacaaaggcacttcggcctgacaaacaaaaataaacaacagcggactagcgggcctacggctccatcttcacaggcgctcaactggggtataagccaggactccacctaagacatcttctccgaagcttctcttactgaaggggggaaagattgaacaagaatgagtacaaccacaatactcagcaagccacaccggcagatgcatgattaatgcaagggggtacaaggggtaataataaaggggttaagttttgcaggaaatagcatttaaaagtcacttagttgcccaaagccatttaaaaagacga

SEQ ID NO: 35189 - DNA, 713 bp, Oryza sativa
cgatgttcccgatattgtcagaagaatcaggaagatcaaagcccctctaaagattaagatcttcttatggtacttacgtcatggagtagtcttaacaaaaaataatctgtattaagaggaattggagaggaaactagtcttgttctttctgccacaaagatgaaactattaatcatttgttgtttgattgtcgttttgcccgcgcagtttggtctttaatccagtttgcttcgaatattagtttacctaatagtacaactcatatgtttgggcattggataagaagacaaccacgcaatttgagatctttggtcttattaggggcaacaaccactatttggtctatttggctttgtagaaataatgtggtttttgaaagaaaaaacatatcttctcctttgcaggttatcttggctccgctcataggctatccttcagaaggtcaatttgcggggtactatcattgcggcttgtcaacaattggagctagtggccatggagttttctaccccggcgcatgggtggcgttctaggctacggttagagggctcctgaagttctttttgtccctgctatttggatgatgagtttatcttttgtttctttcttgttggctgtgtgcactctttgggtgcagaagccggaggtgctctcagaataattgtttcacttgatagaattttactgagattaataaagcttccattatctta

SEQ ID NO: 35190 - DNA, 2479 bp, Oryza sativa
cttcctaggaggaattctggaggagtaccggagctgtcggtacactctgctccgggtccggagaacttcttctgtaaagtaagcattcgtgtttctttcttatgttatttaataactttgtctatgtaagatatatttccatctttgtgggttcattgtttagtattcgtaccaagtgctctagtactaggattctggatagagaaggaagttcctgcgcaagtattagagtagtaattaataacttagaagtggtgtgtaggttggagattatctttgttctttgtgtatcccacggatttgtcagaggtaggtggcaagtggtgacaaccctgaatcccgtcctagtaatcctccacgttcaaatacatcatagagctatagccggaaccacgctggcagaccagcaggggtcggtgcccgaagcaatagataggaaattacctttaacttagcttagataattaaaacacatagaaagtcctctctagcctgcctagcatatctatagttgttgtccttggattgtcttagccttaggtagattacagaaaaacacacacgctagcctgggagatctgcttaactcctgtgcaggtcctaaatcttcctcttaggttcaaagtgtgccagttgatttgatcttgcaatcaacgagaaagaagcacaaagaaatcatggttaaatccaaagacgatagccgatcggctagtgccgatgacgtatcgttcaaactctgagccaatggtattggtaatagattggcaatgagtaataaaaataatataacgttaaatctactcgatcgtttgtagagattaacgatggaatgcaggaattcgggagctgtcggtacactctgctccgggtccggagaacttcttctgtaaagtaagcattcgtgtttctttcttatgttatttaattactttgtctatgtaagatatatttccatctttgtgggttcattgtttagtattcgtaccaagtgctctagtactaggattctggatagagaaggaagttcctgcgcaagtattagagtagtaattaataacttagaagtggtgtgtaggttggagattatctttgttctttgtgtatcccacggatttgtcagaggtaggtggcaagtggtgacaaccctgaatcccgtcctagtaatcctccacgttcaaatacatcatagagctatagccggaaccacgctggcagaccagcaggggtcggtgcccgaagcaatagataggaaattacctttaacttagcttagataattaaaacacatagaaagtcctctctagcctgcctagcatatctatagttgttgtccttggattgtcttagccttaggtagattacagaaaaacacacacgctagcctgggagatctgcttaactcctgtgcaggtcctaaatcttcctcttaggttcaaagtgtgccagttgatttgatcttgcaatcaacgagaaagaagcacaaagaaatcatggttaaatccaaagacgatagccgatcggctagtgccgatgacgtatcgttcaaactctgagccaatggtattggtaatagattggcaatgagtaataaaaataatataacgttaaatctactcgatcgtgggtagatataaaccatggcctaggaggaattctggaggagtaccggagctgtcggtacactctgctccgggtccggagaacttcttctgtaaagtaagcattcgtgtttctttcttatgttatttaattactttgtctatgtaagatatatttccatctttgtgggttcattgtttagtattcgtaccaagtgctctagtactaggattctggatagagaaggaagttcctgcgcaagtattagagtagtaattaataacttagaagtggtgtgtaggttggagattatctttgttctttgtgtatcccacggatttgtcagaggtaggtggcaagtggtgacaaccctgaatcccgtcctagtaatcctccacgttcaaatacatcatagagctatagccggaaccacgctggcagaccagcaggggtcggtgcccgaagcaatagataggaaattacctttaacttagcttagataattaaaacacatagaaagtcctctctagcctgcctagcatatctatagttgttgtccttggattgtcttagccttaggtagattacagaaaaacacacacgctagcctgggagatctgcttaactcctgtgcaggtcctaaatcttcctcttaggttcaaagtgtgccagttgatttgatcttgcaatcaacgagaaagaagcacaaagaaatcatggttaaatccaaagacgatagccgatcggctagtgccgatgacgtatcgttcaaactctgagccaatggtattggtaatagattggcaatgagtaataaaaataatataacgttaaatctactcgatcgtttgtagagattaaccatggaatgcaggaattc

SEQ ID NO: 35191 - DNA, 2280 bp, Oryza sativa
acccgcggggggtttttaaaccagtggatcccccctttttttcttattcttattatttttgataataatattgctacagaaaacactattacttgcacatgaatactaagcagctagctcatgtgtgtatgctccgtaatatatattacctatgtttttacatgaggaataataactattatttttgttaatgatattgtatttataaaaggtatctgactagttttttttaagagaaagatatttttgctaaatataatctagaatgctataaaggttaataatattaaacgatatagtcatataattttttttggataaactagtgatcaacacttgttatgaatccaatgatcataatgcactatatatattgttcaagtgagttgtgacattcactatttactagttacatgcgtatgcattacaatgagatctacatataaaaataagatttagtttatttctagtcttgtttttatgatgtattggattttttttacatttctttagaaataatattgtataacaactaaataatttattgttttataaataaattattttatcgtacccccatctataaaatcctacgtccgccactgccaaaaatcccttcttcacattagcaactctaccagtcaaactcgatttctgcaatataaacagaattgaattgccatcgaatttcagttcaatagtgccaccaaattcgtagtaaaaaaagatcatgaagcagtgtgtcatcgacataattatgacatacatacctagtggatcccccctttttttcttattcttatttatttttgataataatattgctacagaaaacactattacttgcacatgaatactaagcagctagctcatgtgtgtatgctccgtaatatatattacctatgtttttacatgaggaataataactattatttttgttaatgatattgtatttataaaaggtatctgactagttttttttaagagaaagatatttttgctaaatataatctagaatgctataaaggttaataatattaaacgatatagtcatataattttttttggataaactagtgatcaacacttgttatgaatccaatgatcataatgcactatatatattgttcaagtgagttgtgacattcactatttactagttacatgcgtatgcattacaatgagatctacatataaaaataagatttagtttatttctagtcttgtttttatgatgtattggattttttttacatttctttagaaataatattgtataacaactaaataatttattgttttataaataaattattttatcgtacccccatctataaaatcctacgtccgccactgccaaaaatcccttcttcacattagcaactctaccagtcaaactcgatttctgcaatataaacagaattgaattgccatcgaatttcagttcaatagtgccaccaaattcgtagtaaaaaagatcatgaagcagtgtgtcatcgacataattatgacatacataatatgttaacagatggatgacccaaactttttttcttattcttatttatttttgataataatattgctacagaaaacactattacttgcacatgaatactaagcagctagctcatgtgtgtatgctccgtaatatatattacctatgtttttacatgaggaataataactattatttttgttaatgatattgtatttataaaaggtatctgactagttttttttaagagaaagatatttttgctaaatataatctagaatgctataaaggttaataatattaaacgatatagtcatataattttttttggataaactagtgatcaacacttgttatgaatccaatgatcataatgcactatatatattgttcaagtgagttgtgacattcactatttactagttacatgcgtatgcattacaatgagatctacatataaaaataagatttagtttatttctagtcttgtttttatgatgtattggattttttttacatttctttagaaataatattgtataacaactaaataatttattgttttataaataaattattttatcgtacccccatctataaaatcctacgtccgccactgccaaaaatcccttcttcacattagcaactctaccagtcaaactcgatttctgcaatataaacagaattgaattgccatcgatttcagttcaatagtgccaccaaatcgtacgtcaaaaatatcatgcagcagcgcgctcatcgacataatcagtacatacata

SEQ ID NO: 35192 - DNA, 652 bp, Oryza sativa
ctttttattttaatcgattgaggcattgggcgatagaattgtgttaggtttatttctagctttgccgtactatcaagaggggtaataactttggtaaagaagtgatcaaaatgacacattatgtcatttgcatgatggcttggtttgatagttttatttatctatctttctgtctagggctggtcagatcggagtgtcctggcaagtttgaccgagccaagctcggtctgaccgggcggcggatgagtccattgcacggcctcggcttcgcgatccatagccaccagagccgacatcggtgttaccaggtcgagacgggtctgactggagctgctagcgttctaactatccgagccacggtggtctgaccaacaagtgttcggccacgcattaaatgcaatcaacggctagttttttagccattgcccatttgccctaaggctggtctgaccgaccaccccttggtggtctaaccgacaggtatccgagggttggggttttgggcccaacggcttgttttggtgggtagggatataaacactccctcaccagcaacaagggttctctcttggcgcattattcactcgcatacaccccttgcattcactctcacaccaatagagctctagttcattcattgtggttgtttgaa

SEQ ID NO: 35193 - DNA, 548 bp, Oryza sativa
  unsure (1)..(548): unsure at all n locations
tttccagaacacttctttcctcatccgaagctgactgatgcaagttgtatcactcccattgtacaaatcatctaatcttgttttcctgaccaaatctctatccaccaatggaccatacttccttggatgtcgtctatttcttatacgacgtcgccagcgaataattgccaacacaacagctaaaacacccaaagttctagttcgttgatggacaatatactgatgagtagaatctagatccatctgagcatcacacgacnaaaagggcggngcacgaaaaaaagaaactagtgaaaaaaagcacacattttgacatagttttacttctaataggcatactctctatggatccttgaataacaaagcancnnnanannnnnnnnnnnnnnnaagggaactgccacggtgttctcaccttgctgcagaaaatcgtggcaaagattgtgggggcttggcaatctgacgcgcacagaggaaaggagagagttagaaattttgattcccttcagatctggacaaagtactcttctttttctacttacctgcta

SEQ ID NO: 35194 - DNA, 791 bp, Oryza sativa
actgaaagcctatctacaggaggtcaagagtgtgccacatttcaagactggaaagatatctctgcaagtacaggtgcacttttttcatttcaattttaaactgtatgataccctgtaaattttctttcacagaaccagggttcaagattgaagtgggaaacatagtaatcctggtctgctctgattttctttttttttaaaaaggcatggtttaatttagttccattttttccctcgaacatgcaggagggaatttagttgcgaaaattatcactaagaatttcaaaaccaaacactaaatcattgcaagacttcccttaaaaaaaatcaatatacacctgtaaaggctgagtgaaaatggagtcgaaatgaacaggattgcttgtagattgtagcaattctgttcgatggatcggttgccagttggtgacacatgcattcattctctaattgaatacgataaaagttcttttttcgtgaaaattacgacaatattgtgctggagtatttggactgaaagcaacttgttctctagtattctttcatgtggcaccatgacatcctgtcactacaatccacaaacggctcctcatgcttcatacctagtatagagattgttccagaatttccttggattgactagtttggatgggatttttcttagatccatgaaagtgaatcccgtgtagaactactagttacaccaactctgttaagaagctctgaaccacatgaaagtttatttttttcagctcgtggccctttgccaccataaacaaagttccagttct

SEQ ID NO: 35195 - DNA, 836 bp, Oryza sativa
caaaacggtatcagtgcagttatgcagggtaggttgaagcaagttgtttagatatacgccagtgacgattaaattggtgcgcatgctgattatcttagaaacaaccactacaaaaaaaatattttgtggagtttttttttagaaacacagcctgcgtttgtggagatatttttctagtactatatagaggcaaacatgcctttacaatgcagcagagaccttttaaaaatatgtctaataaatgtattttgataaattatctttagaaaagaatatgtatttttttaatgtctgtacaggcattaaattttgccatacctatagcaaagcaatgtgaaaatagaaaaaaatatatttccttgctactccctccgtttcacaatgtaagtcattctagcatttctcatattcatattgatgttaatgaatctaaatatatatatctatctagattcattaacaacaatatgaatgtggaaaatgctagaatgacttacattgtgaaacggaggaagtattaccaatccttaaactcgtgagtatattatttttatcttcaatgcactaattatctgaaccttatatcattacttgtaaatgtatgtgttgtgttaattctatatatgcacatattaatatttagaaagtgactcaaccgaggtttagatgtcttgagaaaatgactttacatatgagaaaaattttgaagtaccaaaaatatacctctacaagatagatttaacaaaatatgcctaaaaatgtctatatagcaaagtattataggcaacgttaaaagtgccataaaaactgtgctagttttagtggttgttttaact

SEQ ID NO: 35196 - DNA, 548 bp, Oryza sativa
gccaggtatagctcttttcagagattgattagagatgaagttataggaagtatataaacttatacattttgctacaaaataaattaaacctatactttatttctatcattatagcataatatttccatagcaaagcacgggatttcatctagttggcataatggttgtgtacatcgatgtggattttagggactggattgttatcctttatcttaaaaatgttggggaaagtcatcttataggggaccaggcattgataggatcaggaaaaacaatccatatttgtgtggatctggaaaatgtgtagtaaaaaacaattattttacggagcaaggagaaaatgggactacaagaaaattaatgggccacccaaaatggactttatcctatcttatacttactcatccatgtcccgctctctgttttatgtgtccctcaaatttgttgaactaatctttttagtctccctattccttgtgatatttgttgtacacaattaacatttcaactaaacatgttcttctatcccattgcgcaattcacgaatg

SEQ ID NO: 35197 - DNA, 787 bp, Oryza sativa
  unsure (1)..(787): unsure at all n locations
caaccatctccatctagcaaagagctaaacctagatgggttttgacaaataaaccggctagcggagccaatttaagataactacccgtctcgtgggcaaaacggaaggttttcaggacaaacctacaaagagatgtcacactctcgcagcggcggcagacggtttacgacgcaaaccgacaaagatggacaaactaagagaaaactaaaagcaatatgaaaaaacgattcaattgattgattgtagattggatttttacgatgaanaaanccccccccgccatgtcccttatataggggttggtcttgccctctacaggccctcctccacgtccaactcggggtagaaactaaaggaaacccgaaacatgccttcacgagcaaggaaacctcgaaacccgacgaaacacagtcagacttggacctgccggttagaccggccacacaccgcaggtctgaccggccctcaatcggcggtctgaccgcccaacacacggcggtcagactggcccactcaaagaaaaccggtggacttccaaattttggcaacctttcctattttaatcctaggtgccaaatttgggtgtaaacacatgccccctgcctttttgatgaacaacgtgaatctaaaagcatagaacatgttttggtcttagggcgataatctaattaccgggcatagtacctcctaagcgtcttgccacacactcgggaagtatttcttcaagtatttcccattgattgctcgctgaaaacgctcccttgaagtgtctccaaaaaatatgcgt

SEQ ID NO: 35198 - DNA, 635 bp, Oryza sativa
acttggtccattaaatacattccttctaaagttaaaacttttatttggagactaattagacaagctcttccaacggctgcaaatcttcactcaaaaattttggatattcctgatttttgctcccgttgcaatgatgctgaaaatgttcatcttttcttccgctgtgcttttgcaagacttacctggaaactttaagaactctcttttcacaatctcattattgactcaatgcaaaatgtttctaatattatagcatatttgcttgcaactaataattctgaaaacagccttcaaaaagttccaatccttctttggtttatttggaaagctagaaatgatcattatttcaagaaaaaagaatgggagcctttgcaagtttgtaatgtagcaagcgctatgtcaaagaattatatttcagccttgtctaatgagaatgataatgaaactattccaatcatagatgaattctgttgcttctgttaatttgttgccagtaactggatgtttccttgacgcttctgggaaggataatataacaaggtttggtcttttttctacatgactctataaatcatcatatcatctttgtgtaggccaaatcaactctttatgtgtcgccaattcaggcggaactt

SEQ ID NO: 35199 - DNA, 1195 bp, Oryza sativa
cacgcaactttgttctagaaatgtcatcgccgttagggttgtgcccatcctgccccgttaaatgcattgttcatcctatagcacataaatgatagctcctaacggaaccgtaatggcaatggcattttcgggacaacatcactgatacgacgacatttcatggaactcgcacttgtcgattgcatttcttggaatttggcgcttgtcaatggcatttcttggattttctctattcgattaagtataatttttattttcttttgcttttgatgttcttttgccctcaaagagatgacaaagctgaccttggtatcaaatgaaatctgcaaaagtgcactaatctggtttgtattctgttgttgagctatagcagcaattaattttatttatttgactacagatcttgccaaacaagttgaagaagccagctatcccaatcgcttggctctgttgcgtgggcttttcttctggttggaggtaacttcatactgttttgtgcaatgctagtttttttttttttttttgatcaagggcttgtcaatttgtgcaatgctagtaattatgatgttggagaacttcatagtgtctagctgctagtattcacatttccatccctgttaagctctcaatatatttgtgtttacttgcacaaactactcccaatcagagcagattatttgtttttggtagagttaaagaaccatattttttagtgtaggtttacagtttgtctagccctgtgatgtatgttacacttggactgctacgtgctaaatatggggctgggactaatttctgggaatgatgccaaatgtcactagtttgcttccttttgcagcattagtgttcgtattatcttcgtactagcatgcagtggcataccatttggctacatgcttgcgcaatagtacgattttttttttgaacatttactctagttctttgtagttttcttgactgtgtattgttttgtagaatattgggcaagatgatcaattcaggccgtggagagacgatcacaaacgctacaaaattatgtctctctgagaacacataacaaagttcttacttgcatgtgattatctgcagcatctcgcccatcattgttgtaaatacgtacccagtaaaaaaccgtagaatggaaatggcactgaatttaggcccttctctagtctccatagataggataaccttg

SEQ ID NO: 35200 - DNA, 555 bp, Oryza sativa
cactttcctgatgtgaaactctacaagaaacaaaaactcatgttagatatacgactgcagccaaacaagaaacaaaagtataaaacacattttcatttctgtcatcttatcaaattggttaacgaaatgtcaaatgcggtgcatggacatatgcgagcaccaatgggaaagctcatactaaagcaattacatgaagtgggttaatacatggcaattttccacttgcatggggtggattagttggatgagttttgactttgattgcttttttttaatactaacattatcttacctttttttttttttctgttttcccacattttcttcccttgttccatatctcttagatggcaagacttattggaccacattattctcaccagggttgactactagttccttctacattgaaagaatgcgatggaggctaatagttcgaatcattcacgaaaattgttaatgttgtagtatttgtatatttgtgtaccatgcttattcacagtgcacatagatttttaaaaaggaaggagcccatgtagttctgatccttttgtt

SEQ ID NO: 35201 - DNA, 648 bp, Oryza sativa
atgaatcagaaagggagcatatgaattctcaaaagtcagttgatccacttaggccctgtttctttcagcttgggattattataatccagattattgggagtaagctgaaagaaacagacaacttattgaagtagcttattataatctggagtccagcttattataatctgataagctcatttaggtgagctttttccagattattgggtgaaaaattacccaccatgccaccccactccttctttagacttgcaaacccctctaataatctaggaaagaaacaattaaccgcttattctactatagattataacaatctagtctagcttatagtaatctgactcaataatctagattataataatcttaagctgaaagaaacagggccttaatctgatcgaacttgaacacttctcaaacctgtacaatataaaattgagtaaatttcagaaaactacagatggtttggtcaaattatcacaaaactacagatttaaggagatgtatcacaaaactatagatttaacaataaatttatcataaaactacagatttaaggtggagtattgccaaaccggagatttaataaccaaattatcaccaaactaatagatttggagtttaaatcttaagcactagtgtatattt

SEQ ID NO: 35202 - DNA, 2046 bp, Oryza sativa
cgagactaggcttggggaacttatttataaataatattattttaatgaaaaattgcaaaagtagaagctgatcgactaaaattcgcaagtttaataacttgtcgaactgcgattgttcgacagggttatgaatcactttttaaaaaatagaaaatgacaagaaagagcatgacagggggcctatcgaacatccatggttcgataagtcctgcatgcatagtgctgcacagtagtgtacagtggcacatagtgattgttctctttttttttaattattttttatcccctgtcgaacaactgcagttcgacagggtattttttatcccccatcgaataaccgcagttcgacaggtaccctatcgaattgcggtggtttgatatgtacccctatcaaattttggttgttcgatgggtactaaacttgcaattttagtctatcaacctttttttttgaaattttctattaaaacagcattattactaaaaagaattccttggcttggtatctctttttcagcgcgcgagagcggcaggggtgtggggcccgtggtgtggctttaatggcgtgttggggggggctcgcgatctcacatgcttggaatgctagagtggcgtcgatatcgcggtttcaacacgcgatagcgggagggttgtgggtcccgtggactcgttttattggcgctctggggcagccgcggtctcgcccattgggagcgcgataccacacgtgatcggtggggtggggcccgcggtcttgctcattgaaagtgcgagaccagctttgagaatcgcaagtgacatggggccacattattttttatatttcaaagaaaattgcgcgctagcgttttggagcagcatgcaattacagccactcttcccctctcttcctttttgcacggggagtcacttcatgtctaccacggactccccatttcactcaactttctctttattatttttgctagccgagtcattttatgtcggacacgatcactcagctcgtaacatctctcttcatatgaatccaaggaccccattccataaaaggagaggagatggtccccaggtcaagcagtactgaggaggagacaaagagcaagaaggggagtgtactgagggggagaggaagagctagaagggagtgtactgaggagaggtagagcaagagggatggtgcacataggaagggaagagcaagaggggaggctgtagaggagaggaggcagtggagagaaggaaaaaaaaattacatgtaagttgattagtttttatattagtaaaagtttgtaggatcgaggatttagaaaagattatagttcacatagtttctagtaggataataaatgtttgttattaattatttaagaggaaatttgaggtatatatattaggttgtagattttttttatacgtcacatgtaaaaatactcacataggatgttaataaatataacatatttataatgtagtctcaactagtacaatactagtatattattattgagtaggataatggtaatggaggtagtttgtgtgatatgatttagagtcggttcgggttcaaaaattaggtagacagaattaatttatatggtaaaaaaaattaaagttacaattaatttatagtaattttaccgattaattgtaactctcatgatagccgatccggagtagggacctccgcccacactcattacaagtgggaccaagggcatttaggtcttttctttaaggcatccacgtcagacagggttaaaatgcaaaaaaaaaaccagccacgtagatgaaaaacaggtcaaaagtggcgcatgggagagaatttgggtggggaccgggtggtaaatgggaacggaattttgttagagtggcatttgagaactggatttgggaggatggaaaatagttaattttcccactttgcttgggatttgatctccaaggcattgctgatgaaagctaatgggtgaccctgttgcattaaaactgctaaaatcgctttgtcactagcatctgtctccacccccaactccttagtaaaatttg

SEQ ID NO: 35203 - DNA, 596 bp, Oryza sativa
caaggtaaaggaaatgttttatttttaaaggaatcttgcctttccagatagaccacatttcagtatctttaactcccccaaaagttaaaagcctatacattgatttagcagtaaaagacttattttttgtgtaaggccaaatcacttcatccctgttaccatcaagctggacagattggaggatatccttcacaccatgtaattctccctctctctctaaatttaggcttctcctaaaaatcaaattgcagtcgccattagcccacatctccctaacagtagctttttgttgtaaactcacttcatacagcttggaaaggtcactttcagaggtgcatcaccaagccaaacatccccccagaagtccaccctaccgccatcatgtactatttttttgcaccaatctttgtaagtgacttttacaatggtgtaagcccttccagaattgagagccccctacctctaaactctggaagaagcttcccttcaagtattttctcctgagaacttcatagcacatgtcagtagctctattatccaatttcataatccacttgctgaagaggcaaatattcataattctagtgtccaaaaaa

SEQ ID NO: 35204 - DNA, 1687 bp, Oryza sativa
gagaatacacttgcaaccggtgatggacaagttgcaatcaaggttagtgggatggaaagggaagttaatccagcaatcagggcggaagacgctagtcacgtctgttctcagctccataccaacctacttccttactgccttaaagccgcctaaacagttcctcacagacatggacaagattaggaagaaattcctctgggccggcgatcaagagattagcggggggaagtgcaaagtgaattggaaaaaaagtatgctccccaataaagatgggaggactaggcttgttggaccttgataaatccgagagctttgagactccgttggctatggtttgagtgggagtgccctgacaaaccttgggctaggacgacacccccctgtgatgagttagatgagcaaattttcgcggccgcaacaaaggtaacaatctgtaatgggtggaaggcaaaattttggacatccaactggattggccaccagccgctgaaatacctagcgccagcgcttttcaaccactctaaaggaaagcaatgcttggttcaggatgcgttaaccaatgacaaatggattgatgatattaggcatgagttgtccatgccactgatctgagaattcttcgcagtattccgccttatctgggataatgagacaaacctggaggaaggagttgatggacaaataccggaacttggagacggcgcaacatttattcaaggattgtccattcaggcgagaaatttgggacaaagtaacggctaggatgaaccacaatcaacccttcccggtgcacaacccggacaagagactagtgggaatcaagaataaagcaacaaagcaaatgtcaaagtaaggggatgcaatcactgcacatgctcttgagttgggagatctggtgcgagaggaacaggcgagtttttaaagataaagaacttcaaatccctcaactaacggcaagaataatggacaaaatacacacatggtcggcatgtggggcaaaaaatcttatgagaatagcgccttaacctctcaccctttgttgtaattttccttttttctgctcttctcccccctgtctttccccttgtcaccattgatggcatttgtacagtgcttatctcctgaaatataaaactagctaagctggctaaggtttcaaaagaaagaattaacagtgcttgctagtttgtatttcagatgatactccactcgcatatgaagcgcccgcgtgccctcaagccgatcaaattcagtgtcgacgaggagatagattgccgagtgatagtcagctctccccgtgagctagagctacactacacatgtacttctcccaagtccagcctacaggctggtacgtagagcgatctattgaaagttctgcatattttttattagttcattgctggctattccttaacgcctgtctgtaaacccttaatcatatttgatttggttatgcactctaaatctatggtggttactgattgtacataaccgttatacaccttaatagaaaccattagttcttgaaaacacacaagaaagccatgctcatcattaatttactacatccgacataagcaagcagttcaataacacaggaagtgtatagtttatttttcagctggttagactgagttctggcagattcaggctgagaagatcattatcctcaatcagttgctct

SEQ ID NO: 35205 - DNA, 632 bp, Oryza sativa
aggggtacacatttttttattttaggggtacacatttttttttggatgattttccttagttcaagggtacatattttttttggatggttttccttagttcaggggtacactttttttttgggatggttttccttagttcaggggtacacttttttttggacgattttccatagttcaggggtatacatttctggtattgcggttaggggacctcagacagactcggtgtataattgagggacgtcaagtgaacttattccatgtggaaaacatgatgttgtgtgagccttccctcaagaaccacgtagccagcccaatcgacaagtgggcccacttacatacaccactccacttaaactttcatcctcacttcgtgtaaaatagttaactcaggagcgatatggttagagggaagatgccttataagttggtttcactcttactaaattagcaatgtggtaacagatatgtgcacacagctctcatggatcacagatgtcaaattctaattaggccacgacgttacatatggtcatcaatgaagaagttgtttgtccatcaaaaatcgagagttgagacatgtttagtacgtggaagaaatcttggtgcctgatcgacaaaggtgagatcaa

SEQ ID NO: 35206 - DNA, 2103 bp, Oryza sativa
cctgcagccctagtatattattgttaaagatggaaacagtttgactgcttatcatccacttttagcatgcttgatcaactttagctttgcactacttgcccttccgagtgcttcttacttcacaattttggctaaaacatgacaaattagcctacgtgcctattgctgtgtaattctgtatgaacattatagtcaatatgtttttacaattgaaaaatgataacctattttcgattgtgaaatttatattttccctgttgcacttcatgaacttcatcatactaacctaacaaccctcacagctgtttgttttcttttgaatgaagttcaacatcaaaccatgaaacaaaaaatcttcaaacttttatttccagtacaaagaacccatgatccaacaccagttgattttcttattgattgtttcctgttacaaaatttgttgatttagcgctatagtacatgctaaatggttgatgaagtcagccattgagtccgctatgagaagcactattttgtttgtttccaatttctaacattcatagtttgagtgttactggagtacttttgttggtgctcatggaagaagtgggtctgagacctgggatggctcagcaggagggaaaaacaaaatctgcctatctggttaggcttctaacgataattaagagagatatgtgtaaagactaaaacaagatatttggatttgttgttttttgtttgtccgccttttggcattcatgctttgtttctgtggcccccagaagctactacagggctttgagatagctgcagagccaattgtacagaattaggtggtttgagattatgtttgagctggtcctgattagcatgcattctcaataagacacttgtgttaaattgtttgcagctctttctgttcataaatccagcattggatctctcttttttgtttcggcctaccacagcttgatttcatgacacttttcttcggatgttttgtttgacacttgtgttaaattgtttgcagctctttctgttcataaatccagcattggatctctcttttttgtttcggcctaccacagcttgatttcatgacacttttcttcggatgttttgtttgaaaacagtttgacttgacaagttgtaatgctacgtgaaggattaatgtgaatctaaaattgggctgtattgaattatagaacaggctatatctgtttaatctgcttttgataacatgggcctagcaaataaactattcattttctgttctattcaattaatgaataaatctgaagctacaacttcacaaatctgctcgacttttaccttgtctgccttaaaatgatcatcagtagttgctcgagcaattcccacttttaataatataaacaaacgcctacttaacaatgtttccgtaatctagtactctgtaattcctgcgtgtgcatactacggtttcctggccttctaatatacaatgtttcatctagtctaactgactagaagttctgccactgcaatttatgtaccaaatttggttctgaactctagttttaagcaatgtacgtgtataagacaagactcatatgtgcatggtccagtcgagaagacgtccttggcttagaatttctttttcatttgttcaatgttcttggtcactctgtatgccgttcatgactgggttcgtgcaccattagacagtgataattagtcgctgttatcattattcatgggccatctgatgggcataaaactctcttcatcagtgatagaatatatttgattattgccattagctaacagggcttattcacatattgggcctcagctcaagtacataaaacccaataattgggagataataattgaaataccatggcttaaattgccttaacaccatcacttgtaagttcaagcgatgctatgaaagcaaatccccaataattagaggatgctacaagttgcccaataatcatttgtttgttgaactatttccttaacagatcttttcacaattttgtttagttaaggaaagtgatgaaactaggcaagcacacaacccttacatcgccaagtgcttagcacttgttacaaagaaagggataaaaggccaaaaaa

SEQ ID NO: 35207 - DNA, 574 bp, Oryza sativa
attaatcctattcccatattgttggatttttaggtctaaatatgaagagaaagaatggtcttgctcttgaacaattgttcatgaattctaaatcaacagttcatgagtcccctgcctcaaacactgcacaattttcaatcctctatatatttcacatattgccactcttatgtgttgaacaattatcaaatactagttgagtaatttctatttgttgaacaattggcaattagtagttaaatcaattatataaatatatgaaattatacccaattcatgttatacaatttgtagtttagtactatataattactccttcacgtttcgcatacccaacctgaaaatcctggggccgcccctgggcgagcgtcacccgcgtggccaggcctgggcacctggctgtggctgggccaagcaaccaccagccccagtgtgggcgggcggcgagcggcggtgcgtcggtggtgccacaggcttgcgcctagcgccctcactgtctgtctgtttcggtgtctcgttggttcatgctctcactgtttgtctcaggtttgttccacgtacccaattctttatg

SEQ ID NO: 35208 - DNA, 635 bp, Oryza sativa
atctaccacgtgcttgcgctcacacaccttgcgtacctcattgaagactatattgttctttgaggacatgtactgccagtctagccacttcatctctaccactagatgagatcttcccatgatcatagagttataccaatcaacctgcaccaaggtcctgaatctgtcatcctgagagtcagctggcagagtatcaggactaaccattctgtcctttccacactggagtagattcttcagatagttcactcttgtgcgtttaggatctggatcaacagcccttgtcttgtacagcctcaaaggattgcttttagaacccggctcatcctcaatgccaccatcatctgactcagatgcaccttgaaaggaagagcggggtgcatcacgaatgacaatgctaccagccctcctggaatggatcggaatctgactcccactgtaaaaaactccaactttttttttgtcccaatctccccctaggaccacgaaccggggggctcgagtcagcaggaacatcttgagaaagcttctgtctcttctcacgaggcataatgaccactgcaacaagaatcaacaaggttggagtgcaatggttaaatgaaacagtagcagaatcaaggttattggctggctgg

SEQ ID NO: 35209 - DNA, 654 bp, Oryza sativa
agttatatggacgttgtatcgacttataaggattacatacgaattggatttagccgattgcaacaaaggtttaattgattaactaatcatttggattttacgacattggacctccagccgatgtattctttaaccttcggattagcgcttattctatcatatcattgatagccgattggtttccactgaattatattagttatgttacattatcatcagtcaactgtctttatatcattatctacattggacatataatcgattattcaaaaccctgtccacattggttggaattactccatcggcttgtcagccgatcggctctttgatcttcaatttatatatcttgtcagttgtaggatcaaactgactggcacgcccgcatctcataaatattctggaccagcgctggagctaagtagatctcccaggccattgtgttcatcgacttagttcgggccaacacagatctagcaccatcgaccaagcacggattttttttgtcaacaagagggaaagtgatatcaccaaagttcttgcaaaataagttgtttcccaaagttcgaatccttgaggggattctacgctccgttgaggagctcacaaagagccgggggttagctaactctttcctcaagaggttgcacaaagcac

SEQ ID NO: 35210 - DNA, 1029 bp, Oryza sativa
aaaaagttttgagtttttattcttcggaggaacacctccaagaagggttacaatccattgtcatatccaaccattacaacccatcgtcatcgccaaatccaacctgtgaatattagataatggatttctctccgcatctcaagtaccaattctccatggcaaagctttcaagaagcgcacctgtcgacgccattgatgaaactaaccaataaatagtagaaatatggttttcatccttgatgaattattagagcttgtagataatttctcaacactatctaattgctagatccaattaatttagactagattgatggatatagcaaagtgaagaccagatcatcataggctaccatagctgtcgagccatcatgatctccaccctgctgatgaaggaaggtcgaccgttgggaagtcattcctcgaccaccactccctccacattctagctatccccaactctatccaccgccaccataggttggcatgcctagaaaggcatatttgtcaaggtttcatgaccgctgacgatcgcgtaccatcactctccatgcagtgaactacagctgccaacggcccaaagaatctatgttggacgatgagcagtgaggatatggaaatgttgggcggtgcggcgaggatcacacaaccatttaatcggatttgaaaccctattaggtggaatcttccaactaccacaccaatgctgtttcccgagaactctttatagctagggcatgttatatagttttacaacatttttaaccttcttaatgattatgcattctggcatttttgtttattgataatgctgtataccttgttggtatataggtctttttgctatttatatgcacatagtttcagaagtattcattatttggccttatttgggaataattgaaattgtgctgggatatgattcgtactcatttccaaggctaaaaaaagacgaaaacaaatacactgaaggaattttcggtctcgcacccaatccattctcatctcatagctctgtatgttgttgcg

SEQ ID NO: 35211 - DNA, 1104 bp, Oryza sativa
aaaactatgaattactcccctcaactatcgtggttgaccgaattaccacccccccaaacccacaaaaccggacatttgatacccctaaagtattgaaaccggataaattaccccccttggctcaatctggagcgattttgatcctatgtggcgccaatttggcaatccaatcataaaaaaagtaataaaaaactatgggcccacttgtcaattactcctacctcatccctctctctttgctgttggtgggcggggcggggatcggaggacaggaggcgactgcggacgtgacgtacgagtgacgggtgtcggtggccgcgtccacggcggcgatgcacgagatggagctgtgcaggaggcgaatagcagcgaggagggccggcaccgccgctcctccctttcccctctccttctcttccgactcactccccagtgcggtggcggtggtggtccgggcggagaaggcggtgatctggatgaagaaagaaggtcgcggaggggttgggcgagcggcgggccccggggagggcatcctcgctggagcgtaagttctctatcacgcgtggcaccagctccgctttcactaccgaccacccgatccggcgccggccgcacaggcgagctaagcctcagccgctcgccacccgggcgatctgtgcgtccgccgccaacctccagaacgagctctgcatcaatcgctcgttgaccgggcgtgctccgcctccaccgccggccacccggtccgcctcctctgccggacaggcgagctccgcctcagccgctcgctacccgggcatgctccgcctctgccgccggtcacctgttccgtctcctcttccgtgcgggcaatcaccgcctccggtcggctgcacgagtgacctccgcctctagccgcccccgtgtgggcaatctccgtctctgtggctagtcacctgagagagctccgcctcagttgccccccgcacgggcatgctccgcctccgtcaccagccatccggtccgcctcctccttcatgggctctgtagctgactgttcgagcgcgtgtgcaacagagagacccactagggaaggactcgattgaggcaggggtatgacaggtggaa

SEQ ID NO: 35212 - DNA, 562 bp, Oryza sativa
  unsure (1)..(562): unsure at all n locations
cggtacggagggcggcgtgggggtgcagggcggcgccgccgcaccgtagccccttgcccgcggatctgcgcggcggcagcggcggaggaggaggaggtggagtggagtggtggttgnagatgggaaaggcgacggagcagcagccagcaagcgaggaatgagttgttgttgctagggaagagagagacgatggcttctacacgttttttttcctttcttgtgttgaataaatgaaattaatcttaactttttagctattaccagtttaatcttagaaaagtactcgcatgagactacatatacatttgtcgacaaatttttccccaaaaatttaacagatataattatagtacaattatagtgtaattacactgtaacttatatgtaattacactgtaacttgcatgtaactacacataattttgaatcgttagatctattacaagatttgttttggtgaggaagaaaataaatcatagcacacacatatgtgaaataatttgttcccacgacctccattttaccgaaataacatgttacggagagatttttgaaagttaca

SEQ ID NO: 35213 - DNA, 730 bp, Oryza sativa
tcaaacaagtgatcaaacagggaaatgaaaaccttggcatactaccccatctagctacaagtgccacatggatattgacatggcaccggaaatgcagctgattactaatttacggtaatatttcaagaatgaaagggaacaccgaagttataatataatgaaagaagttatcgacagaaacctacacatatgttttgtgtatccattctaaaaaatgtattttactgcacaattctagaccattagttattttttactgaaagggtataaaattgatcgcaaactgacagaaaacaacccatattgccagtgtttcatctctgattccctaaaagatctaatacaatcgcaatttttttcatgtcatactctcatttatgtctgattccctatgtctgattccctatgtctggattggacatgattcatgtagttttcatgtcatattctcgtctagattgcacttcttttctctcatttagattgaattatgactggattggacatttaacaatatgaaaagttcaaactgttcccctaagcatgaaatttaagaattcttgaacaaaaacatatgtactactcccctgttatttttcctttttgatgacttcatttccaaattgaaaaggaaattcatgttgctttttacaaattgaaaagcaattactagagtaatatatgagcaatgaatcacttacccaatcaccaacaacaaacaggcttacaa

SEQ ID NO: 35214 - DNA, 567 bp, Oryza sativa
ccccaccctagtcgagacctggaccgtactcctcaaaatgcatcatcaagaaggcccatcaacctcatccccgtctagatgaccgcgatcgtcacaaccacttgaacgggaggaggcaggagctcgaggaggaggtctggcgaggagcagtggtaggctctcgctcatgtagtatttttgcagtatgaacacaactcagttggatagagtcatggtatgttaggattaggataaggagttctccatctatataaggagagatcctatcctagatcagttagcattagatcaagatttatcttagtgcccatcaaccctaccttgttggtgtgagggagagcatcgtgctatttaggttcagggccattctctattacttcttctattatgatccaatctattcctcttcacctcttttatcccatataatcctagcacgtgacactttactcttttcggtttcctagtcttctcagagatttgggtatgtctttagtactttactctctttgtaaggctatgagcttagtaataaagttatcttgtttatttaattgtgttcgcagt

SEQ ID NO: 35215 - DNA, 609 bp, Oryza sativa
agggcggatatggcggcagagagggcggtggagatggcggcggagagggcggcggagaggttgaggcggtgacggtggagatggtggtggagaggacggcagcggtcgagagagtgagtgaggaggcggtggtgaagagggaggcggcgatggcggtgaagagggcgaagatggcggcagatagggcggcagagatggcggaggagagggtggcggagaggttgaggcggcgatggtggagatggcggcagagaggacggcggcggtcaagagagtggcggcgagaaggcggtggagaggtcgaggcggcggtggagagggcggcggcgaggagggcggtggagaggtcgaggcggcggtggagagggcggcggtggggagggcggcggagatggtggagagggcggcggtgaagaggtcgacgcggcggtggagagagtgagtgagtgagagtgggtgccggatctggatcgatctagaagatgtccaaccctaggtcaaccctagtcaaactcacttgtgacgggcgccaactatgtggccgtcacaggtggcctcacctgtgacgggcgccaaccgtggagccgtcacaggtaagacaacctgtga

SEQ ID NO: 35216 - DNA, 956 bp, Oryza sativa
attcctgcagcccgaactagtctcctccaagtatttttcacgagtatgtcggataagcagcttcttttgtctgcgtgctataatttcctccctgagtttggacctttccctattgaagaagaacacaaactataagtctataaataagactagcactaaatttgaaattcttctagaattcaaattggtgaaaaaaaggacatttcacaaagataataaagaattttacaaggaactagagctaaggcagtattatatagaagcttatcgagcaattccaaaaaaaaaatccagaaagcaaacatgtattagtagaactttagttcaccttagcagacaatccgtgcctcctggagaaaatcacaggtgttatttttttttagctttttagtggtctacaacatgtatagttattttttttaaaaaaaaatccaaatgaagtataatataggaaagtaatgtactttctattttcatgaaagtatactctatgggacaaattgagcctatttactcattagtaggctggtttcttctcttatcagtatttttagacgttgaacaattgaaccaatatccaaccacttgagactcatcatacccaaaaggaacgatcaaaagccaggcatgagcgcatgacatgctgactgggcaggaccatatattattgcccataggccatagccccctaaagggcttggcagggctggtctattaccatgacagaaaaatagttcagttgaaacaaatcaggagttcaggacttacaaggaccgtatatcttcctgaatttgctggagctgcttattaacctcattaccatccttatagtctggaaatagaataatatcataacacatcaaaagtacatcgttaatgaaaggatgccttaaaagtcgttagtcttacatgatgacatgtccggaatcatggtgtcctggggatgtacaataaag

SEQ ID NO: 35217 - DNA, 2295 bp, Oryza sativa
catatgcgcgggcttcctttctagttataaaaattagagatgattatgtactcacaccctcttcttccatcctcttcgtccatcattcaagtcaccattggatcgggcgatacaaaataaactgagtgatttattggtacatcatctgactcccctgcttgccctcgtcgttagctttcgcttttgcaccgttaggcgttgcacacatccaattcaagagtgtgttcgtcttcgcgtccgcctgtggttctcacatgttcacgtccgtggtccgcctacgaatcgttcgtatgtgtcgccttggaaaaggaggggaacttcaatttctcagcaaactttatagatggaagaggtgcccggctgccaacacaagtgggctggttgaggcggcagcatcctcactgatggttgttcccataggcggagacagagaggcaaacggtggcgtgtaagcgtagtctgcggtggctgtgcgcgagagatcgggagctacagggtgaaccaaataagaccaaatccaagcagtagaaaggaggaagagctagatccaacaaaaccaacctcatctagctgcaccaagctcattgaccaagacctcattgaatggatggtggtggattttgccggacaacaactcatgatgtcgttaacccggagcaccgcgcccatcttccccctcttttgtttctggccttcaactagggaaaacgatgaacagttgtcgatggggaatacccacagaccgtattctgaaggtattagggcatgttgattcgaggatccacacaataccacatcaaacacatattcccaacttctctccctcattttccgcgcgcacacttttcaaactgctaaacggtgtgttgtttgcaaaaaaaaaaaaattctatacgaaagtttcttaaaaaaatcatattaatccttttttaaaaaaaagcaaatacttaattaatcacctgctaatcgctgctccgttttccgtgcctcccgaacgcaaccataggttatactaattcaagcccctcgtaaggtaatagccctaacccagtttatagaggattacgaagaaaaccacatagtacaattgtcacgtacagaaattcatgaaccataattctaatgtgcattaaaacccttgtctagaaccggccaaggtacacacaacaaagttgatatacaaattcacatcttacaaacatattgaagtcttacatatgcaatgaaactaaaagcgagctaaactttgtgatcacaaatcacaataactctgattttaggaaatcacttgaaaatgataaacataacactctcaaaaccatatcaccactgacttagttaagcttttcaataacacgcaaaatgagataaatcattagcacatgaataattaagtattaattattaaaaagttctaaaataattaagtgcacactactttcatcaccatccttttagttgaacaaatgaccatgtgtttgtggtctccctatagttcaacaaatccttttactcattcatcattcatcatatcacatatccaatggtctaaaatcatccaatccaacgcctcagattaccccacctctccccctcctctccttcccgcacctgaaatggcgaaatcacgccgcatccaccgtcctgtgtctcgctcttccctcctctttctcccgcatctcccacgcatttcctcctcgcgctctctcgcccccgcaccgtcgtgcactcgtgcgccggatttttcacagaatcgacgcgctcctcctccgcagtccgcaccaccatcgtgccgcgcgcctctccctaccgcgaaaaaacgccgcgctggtgcccaccatcgtcaccgccgcccatcgctctccaccgcgcccccattgcgcctgacgcgaaggaggagcccgaggaggaagaagaagaacaatgaggctgacgccgacgcctgcaggcaaagaagacgaccgagaccttcttgtataagggaacaccgaagaagtcgtccacgcgcgggcgaccgggggcgaaccctagtggtctccctatagttgaacaaatggttttattcgttcatcattcatcatatcacacatccaacgatggaaaacgatcagatgagcggcatccgacggctccccactgcctcatcctgatcgcgtctctcccccacgccactcccggatcagcctccacagatcgcgcctctacgccccctcctctcccatccgaggaaccgccgcgagcccgcgatcccgtttccccgccctctgtcggcagcacccccctcccccccggggc

SEQ ID NO: 35218 - DNA, 1672 bp, Oryza sativa
gtttcgctacttgggtttgtagcatatccacagtggactgaaggacatccaccttcttctccaccgcagggatccacgattctaccgcctccttgaagaccctcatctccaaactctgcttcttctcaccctcctctcgcttgcgctctgtctcctccattttcttcaacagaaggtcaagcttagcctcattctccatgattttggccgtctgcttcgtcacaaatcgtggtttctccagggtttcagatcaagtgatcaactcttcccgaattccaccaactcaagcaaggcaaggctgggtagccttttcgcggattcactcaagagcgatccaatccttgcccaagaattttacagcggaatcaaggatttccgaggatcacgaagctctgataccaagttgttaggattctctcgcaatctctcgatcagctcactcaagaacaagaattatcgatacgatcaacgagatcgcatcgcctccgccgccaacgccgccgttcgattgatctccaaagatacctttctgttcttacaagttttgtttatattcaacacactctctctcactggttgctgggtcccagccaggctgtcgacagagccatagccagctattacttacaagcccattcaggcccactcagacgaacattagacttcttaattctagtagctcgcttcagcggcctagtaattgtgttctcctgtgcttagtcagacaacggcaactccctggaagcagtattgctgctgacagacatgtacaaaattctactgaagctacttccctttgtcgtgctatggtatcaactcaaccacagaactgatttttaagatattaaaataacttttaggtatgagagagagagagagagagcactacacttttagcatcagattcccttcttagttgacacagtgctcggcagagatctttctccatatcaccaaagcatcctagtaacacatacaaaagttatatgcatggttaattggtcgaaaggcgaggcggcaggagcgatagaaagaggagccagtgcgcggtgattttgcccgggggaggggaagcgatccgcgatctggatcggatcgggagggagcaggggagccgtcggatttaagtcatcagatggattttggatcgttggatgtgtgacatgatgaatgatgaatgagtaaaattttgataactttactttaaaaaaaatagtatggttaaaaatgatatcaaagtggacagaccataaatttacgatatacttgtactcagtacaaagtagtactattatacttgctgtgggtgatgtagcgcgtcacccgcccgcccacccgaccggaagaacccacttgggaatagcgaaaacgaaaattccgtggtcgctgatactaccacatcttgccgaactcgagcgcgtgcgttcccaccaccacacctgggcgatcgatcgatcgctacagcgatccacgcagcacagccagccgcctgagccgcggacgcacgcaggcgcaggacgtacgggtagtggtccgctcgatcggtcccgcgagtcgcggcgcatcgctggtcgcggtcggcgagtacgaacgtactccgtatacgtacgggtacgcccgcgggggcaaggagtctcggctgtcacacacacccggtctccaattctatggt

SEQ ID NO: 35219 - DNA, 1075 bp, Oryza sativa
agcaatttaattattttcattatgatgaattttgctacaggacatccaaaaaacatgtaattagccgggggacactgtaataacacgtttatgctacagggcactgtaaaaaggtggtaattagttgttggacattcacgatattattttattatacttggaggaattaaagagagaaacagatatgaaaatacagttttacccttcgaacccaataaagtctcactcccactctaggacctacatgtcaaggaatatttcttttcttttatttttctttttctctctccttctctaccccttcccttcttcctgctttcttcttccggttttcgaaagttagcattatattttcaataattttattgctactatcacctttcttaagagattgttattctaggtttctcttaaaagcaaagattaaggttcatgaaaaaaatgcaatgcgttaaatgatttactcctggttgagaggaaatgattgttgatagtagaatgtgagaaatggttgagaggggaggatgtttgagggtagaacggaaagaaatttaaatatggcatgataatctttgtggaataaatttgaatccaagagtaaccatttttttaggatattagaaataaaaaaaatggtaaaatcgtgtgaattatcgatgtccaaaactataagtggaaaaactggaacattaataattatatggtataaatgttatataatcaaattgtatgaataaaaatgccttttatgttggtaatccaaaagattaaatgctatccttggttaagaaattatagtcaataaatacagcaaaagaaatagaaattatcgagtctgtcactctttgtcagttctaaagcctgcttagagcatgtataatagcagactataaacaagctataaacacatattaagaagttagaagaagagagagatgagcagcgggctatagctacagcatgagcatggattttaagacatattgtgtgtatgataggtgagaccagatattaatagtgtagtatatatttatcggtaactattatataaattgactattaaattgattacaga

SEQ ID NO: 35220 - DNA, 668 bp, Oryza sativa
tactctaatactctcattcatgtgcatagactttatacggtaaactttgcacgcataaactttatgtatagaaatattttatatataaaatatttgaatccgaatttgaatttgaatcgggtatataaacttttgacttataaacatttgctctacaaactttaggtggataaactttagatatgtaaactttaggtgtataaacttactaaaagatgaaaatataaaaatatttgaatttgaatttgaatttgaatttgaatcgggtatataaacttttgacttataaacattcgccttacaaacattaggtggataaactttagatgtgtaaactttagttgtataaacttactaaaagaggaaaagaaaaaaaatcaatcactggcagcgatcgatcgcccgttagccttctcgcaagataatgcatataaatttgaaatctaatatctagagatctcattctaaatgaatcttggccttggcacaattttgaattcatagactccctctaagtttaaaacaatctttcttttttgcataaatggtattaaaagtttgtttttcaaatcttctttcctatcttccttgtgctttcacttactaaaatttcaatggtcctacaatggaagagaaatccaagttcaaaggggagagaaactttgttt

SEQ ID NO: 35221 - DNA, 655 bp, Oryza sativa
caatatccaaaatgttcagaatagaggcatcaaagcgattctccgataagctaaattcatctccaaacaaactagagtagtctgtacaaagtacttggtcagaagcatcatctaacaatggatcgggctccagaagttcttgcaggacctttgatgcctaatttcaaaataaatacatgtcatgaaaaccctctgaggggaagagtttgtaatcaataagaaaggaaaaggacatcaaagaacctactttcaggcaaacaattccaagggctctgtctctgtgtgctttccttaagagcagtacggctgtttcagatcgaaatgccagaaaacaagcaggctgaacagaagatggactccgtgatctcctaggttgtgcctggagggaatcaaagaattcagaaactgaaaggagcaattaagataaatgcccatatgaaaaacgcataaatcctaaatactccctcggtttcatattatatgtcacttcggttttgtcaagtcaaacctcttcaagtttgaccaagtttataggtaagtgtactaacatttaaagcaccaaattagtttctttatattcccctttaaatatttttgtagtatatttattttgtggaaatgttgctatattttcttataagcttggtcacaaaag

SEQ ID NO: 35222 - DNA, 4453 bp, Oryza sativa
aggtggggtaatctgaggcgttggattggatgattttagaccattggatatgtgatatgatgaatgatgagtgagtaaaaggatttgttgaactatagggtactcacaaataataaaaaattctttaattgagtaccttatagttcaacaaatggttttactccttcatcattcatcgtatcacacatccaacgcacctcctcgctcaacacttatccaacggtcagactcatcgacgcgctcagcccctctatccccaaacgcgcgattctcctcattctcgcgattctcccaaaaaaaaaattccatcctcaccctcctcccgtctccaggtcgccgcccgcgccgatctgctctgtaccgatctctcccactggcattgccttcctcaccgatcttctccgctccgccaccgttcctcgccgccggaagccctcaccaccatcgcactccgtcgccttcgcgattcccaaccctaaccgccgtctccccgcaggtcgccgtcaatcgccgtcgccccgcaggtcaccatcgcaccgccgccacccggtcaccgtcgcgcctccttcggtctctctacatcgcgccgcagacggatttccccgccgacggggcgccgcccatgccatccggtctagcgcgacctccgccaaggagttcggtatgtccctctcaccactgatctgtacgtactctgtactaactaatgcagggaagagttttcatattattcgttttttttatttcagtttttactattagttgtcagtcaaattctgctttgtgcagactaataattttttccttgaaaatgtaatttgaaaatgagatggtatgatgtcatgatgatgggatttacaataaattgagcttcatgtttcatgggtttttatttatttgtatatttgcaatggagaagagaacatcgttgttaaattattttacaagcagttcgagtatatatatgaaaagagtattcactacaataactatatcataataatgttacttttatttgcagatgtgtgcccatattatttactcaatcatatgtagtcatttgtttactgaaatctaaatcaggtactagactttatacattggatgagctgcagttcaatggtatcgtcactgctgcttttctgactcctgtggatctgaatttgggtgtcagacgcccacccaaacggcatctgaatttgggtgtcggacgcccaaacagccagaccctaacaacagctgctagaaaggtctttgtttctcctcaactctcatcgtgtatatatgtttccctacctgattccatgttaaaaatgttactaagtctgaaccattaattttggtatgaatcgtgtgaattttgaagagaatagcatgtgcactgttaattctgttggacagaataaaacctagacttggttggtactataatctatccaacatattcagttattatgctctgtattgtagtgtagccaatttattcaattattcttctttgtactgtagtctagccaatttattcagttgtactatttccagaataggggtatctagggtatcaaattatttgattattctatgagctacatgctagaaccattatgttaagtggtatctctacatcgcgccgcagactgattccatcaccggccggtcgccgcccaatggttcacaaactctcaaaacatgctctcagatacgttgtacttattgtccttcaatatataaactcacaatggttgagtgctcaatatatcttatctaatttgggaacatactatttgattatcattcatataaagctggtagtatccccaggtatactaattgactttgttgtggatgggtgaataactgcagatcatcagcagatgtatcaacatggggaatctcgcctaatttctaccctggcacctcaagctgcatatcaatggcctttgataactatcaaggataagaatgtagtttagttttttgtgttcaggtatgaccaccctcgaaaaaaaaggtatcacaaatggttatgagatagtagagatttatgctcccatgagactaaatctctcataaggatgccgatttactgtaagtgaaaacaagctaaagtgcatggagagtatctatggaagtaatatgagcactgagtaggcgtctgcatcaaatcttacatttatttctatctacagttaaagaatgctaattaatctgtaatttgtcaacctcctaagctatatctcgtattattccttcctgtcattttactctgccaattacatttgcttttaccaattttttaaatcttccaacatgcacaatataggccctggtattttgctttttttacaggattcctgtaagataacatgattgcaatataccttgatcccgagagatgatttttgcaatgtttacccaactttatttgctgacactattaatatccttctggtaatggttaggtttcctgttattcattcgatgttataaaatttgtaacaaaagtgcataccaaaaggttattgttgctaatatatcctcaagaattagtgtgttacagacatctgtagatcattttttcttcgtggtctttgacgagcagatcatagtactcattatcggttatcaatggtttggcaattgcatatcaaacaagtatcctgtttacgattaaacatatggttgccactgaaatttcttcctaacattttagagggaacctgatcatgctatctcatcagaggatagagaagcggtcatgggcaattatgtgtttgccatttagcttatataactgctgtgtgtgcagtattgggtatttatcctttttatgtcttttgtgctgcagaatgagagcagctcagcaagcgattgttagagaagaataggatcgagccccgcaccaagtagaggtgtttgtaaaaagtggctagcagaataggaaaagaagattacaaagctgcttgacttgaatagccttgacttgtgaaaatttttcatgcttgatacataggaggcggcaaaagcgagtgcaaaaggaacctcgacaatacgggtgaaatggtgggctgcagctcttcaatttgttcatccaattaatatacataagcctgttctgtagcttcgatgaaattcgacggatccatatgtttcaatgtttcctcccctctgaattgattccgagaggtaattttcttaattcgccgatgtggtgcttttcaaaatacattatactcatacatatgaaaaattaaattggtctgcccatttaaatatgaatacaaataaatccttaaatacactaactatcgaatgcacgccataaaaaggattgtgaaaaaaactatttaattactgcatggaaaaaaagttctcacgtgacatgaatcacattgtagtgctttaaaataggggaattcgattaatgagaaacaaaatatattttttgtctgtcaaatatgtaaaaggaaaacgtgaaaatccatcttttaatataggcattggcgatagttattaaagataaatagagttacaccgtagcgtttagcacacgtaaaatagcaaggatacaaaaaatttaagtaattattaattcttttcgtatcatttgatttattgttaaatatacttttatgtatacatatagttttatatatttcacaaaagtttttgaataagatgaacggtcaaacatgtttaaaaaagttatcggcatcaaatatttagagatggatggagtataaaaatcctgtgacactaatatactccatggagtgacaacggtcctctttattacagaaccatcccacaccgttcatatcatgccaagttgacgacaaacgagagctggcactatcattcatcaattttgtaatagggcccgtgcacatctatctgacaaccattcaatattttgggctgttcaaatggtagacaaaataaaccaaattttgacaatttgataatattgttaaaattttagtaggatttcgtatgtactaaagtttggcaaaaactctaccaaaaagtgatatgatttgaaataacatcaatataaacaagcctttcaacgtattttttctcataaaaaactaatctaaaataaaatatgctatttttttaatatacttaaatttattgtactagtaaacgtcatatttcatcatagatcgttcttttatgggacggagggaataggagccgcctaaccaccaaccgacgtcccaccacatgttggaatgcatatgacagttgatcacaccgccgaagttgtacgtacggcggtagacaacgttgcgtgggggtcggccactcggctggacctatccgcgccgtcgatcgatcgtgtacgtacggcgccccactactcaccgcgcatagtactgtacacgtacgacgtatactactcctacctaagaccggtcgaactaatcggcaaaatacgacggcggcg

SEQ ID NO: 35223 - DNA, 783 bp, Oryza sativa
ttatcagaatataatcatgtgagatcttgttataaatacttaattgttacaaacataacggtgtaatcggatcgtaaatcggatgagtagtttaagagaaaattgtatttgaagtatatgtggataatgtctcttataaatggagtggtagctggtttagacaaacaagctaccactagttgtgtagtcacgtccataaaggtaatatatttttttagtataatttttttacctcctggtacctttgataccaacgatcctatgcatacgctgtagttttgtttggacgcatagttagctgttctagactatttgttacacgatacgatatagttttcggggatatgaaggaaaacgtgtggcctatggcctcacattcatcttagtttattatgatcttttacggtgtttgcgagatacgtaaaggtattgagaggtggtgcgatatagatcattgatcaagagaaaggcaagggcaagatgtgaaataaaattattataaccaatggcagtagggtaagtaactagtaaaacaacaataattttgtttgatgtgaatatctttcttgattgaaccggtacgtattaaaaaagaataggtacttatcttccttatgcttgcttacataggtgattagttcgcaaatctatagactaggcgcacattgatccagatatccgaataccttattctaaatccataaatcctaaaatcaaggaggtagttaattttcaatggcaacaatacaggggactcctaatgggcggttgatcgctccctcc

SEQ ID NO: 35224 - DNA, 816 bp, Oryza sativa
ttttagaaaggttaatggacttttagtatataatagaagataggtaaagaaaagataaagattaggaaaggagatgaaaattatattgaatacaaaaatttagggacggaatattcagtttttgttagcaataaataaataaataaattcctcaataagaagggggtttctcttttctttgccgcgtgcgttcctctcctcaggtggtgactcggtcaccccttgcctccttcggccaccctctcctcctctcctctcctctcctcttcctcttcctccctctcctcgtcgcccttccaccaaagcgagagatcgaccgactcctctccctccgccgccgacccccctaggtgagcgatccagcctagatcctttcctcctcctcgcgttgctcgatccccactccgttgttgtttcctacctgtactgtatcgcgcgcggttcttggggggaaaaaatcctttctgattaagatacagaattgttttaaaatatcaattaattcttttttttcaagtctctctcgctctcgctccggcgtgtgcggcgcgtgtaatgggggattggtcatactgtaatgggggattaattagttacaatgtgttttcttggtgcctgaaactctgaattctttaaacattattgtcattgtcctagtaaattatatatttcatcgaagatatatagtagattctaggacgaattcgatttggacatagcaattttctgatatctctagtaaattacaatttaattccgaaatgttgggtgatacaggtatttgtctttcaccttgagtcggccccaatttccaat

SEQ ID NO: 35225 - DNA, 539 bp, Oryza sativa
ttataaactgaatcatctgtctgtttaaatttgatgctactggagctattcagttcagtctatctggagtaaacgatcatatgtgtgcgatcctatatactttgctggatgagatctctatcttaatattgatgctgctcttgattcaactggagattagggtgtgtatatatatatatatatatatatatatatgtatattctcgctgcattagaaaggacacatttatcccataccaagttgtacactcaacatagttatgtttacatcccaattttaagagatcaaaagcatttcaagaacaattgatagaacatagacctccaatattcccaaaaaaacagaaaggatgactggaattcagacaaaatttgggctaaatttaaacaaattttgttgaatccaaagcccaatataaattgaagaaatcatttgaatttttttggcttaaagttcaataactattcttaagaacacgaatttctcaaagtttagaactccaaaacaaagatttgatatgtattaaaaataacatata

SEQ ID NO: 35226 - DNA, 2259 bp, Oryza sativa
attaaaaaaaaatagttcggttaaatgtaacattgaatatgttttttttaaatgttgctatattcttttattatttgatcaaacttaaaactagaaaaaaaatcaagcaactaaagtcttttttatatgaggggaaaagagagaattgagaagatacgcaaaacaaggtgagcattagcgaataattaattgagtattaattattttaaattttaaaaaatagattaatatgatattttaaagcaatttttctatagattttttttataaaataaacatcatttagtagttcagaaaatatgcgcgtaaaatacgagggagtttttctgtttctacctaatcaatttctctcaatcagttttatgatatgaaacggagggagtagatcgctaattactggtcaggcttgggtgactggtactttttgcaaatactggtttcctaggttttatcctaacaaataatctggagatcttttacggtgtttgcattttaaaaagggtaaaagtctatcgctgcacaatgaaaggtaccacttaaatggttgatatagttacttactacctccgtcccacgaaaaatccaatcatagcatcccaagatagaattagtggaggatagaaatgactaaaatgcccttaatcattgaaaaaagtagtaagagtattaataggtaggtaaaaggtattaaagggagttttatctgtaaagagtaggtaggatggtaggatggtataggatggtagaagttggtttttttatgggacaaaattcaaactctagaagttgagtttttcttttgacggagggagtaggtggtaaaagtaaaatgataattttcgtaggagatagagaatggcataattgttttcgatattagttctaggtacataggtgcatacaatacctcactaactgtgtgcccggtaatttacatgatatgttttttagatttacattttttcctgcaaatatggtcacgcagtaatcctctgttacattatttacgtgtttgttttagatttatatttacgtgatattttctagattttcattttgttctaggagcacgattggttaaaatatgaccgaatgtttgccaggttattttgatatttacattttatcacaaagaacatctaaccttggtaaaaagatcagtggttagtaggttcatgtgtaattcatcctcaatacgatatatttatgttgtttccacgtgtttgcgtcatctccccgatgaaatttaactaaaatgtcttaagcaattaaatagcttatttccttacagttattttgtaatgtatcgggtaaaatggaaatcacatgcatgcttggatagcatgtattgttcggaagtgctaatgggcgatcgatcgcccggcgacaagggttgccatcgatcccccttccccctccctccctccctccacctggttttcttttttggcaccgtattactttcctattttagtaaatttatgcacctaaagtttatacatctcaagtttacacatctaaagtttatacacctcaagtttacacatctaaaatttagagaccaaaagtttataagtcaaaagtttatatatccgattcaaatttgaatttgaatttaaatatttttttatatatagtatttctatatatacatctaaagtttatagacccaaagtttataagtcaaaaagtttacataccccattcaaatttgaatttgaattatatcgggattcaaatttgaatttgaattcaaatattttctatatatagtatttttatgcatctaaagtttatacacctaaagtttatagacccaaagtttataagtcaaaagtttacatacccgattcaaatttgaatttgaattatatccgttcaaatttgaatttgaattatatccttcaaatttgaatttgaattcaaatattttctatatatagtatttctgtacatctaaagtttgtacacctaaagtttatagacccaaagtttataagtcaaaagtttacatacccgattcaaatttgaatttaaattcaaatattagtttatagacccaaagtttataggtcaaaagtttacatacccgtttcaaatttgaatttgaatttgaatttgaattcaaatattagtttatagatccaaagtttataagtaaaaagtttacataccaatttcaaatttgaatttttatttaaatttgtatggtgtagtagtaagagaagaaggggaggtaaagtagtaggggcaggggcg

SEQ ID NO: 35227 - DNA, 664 bp, Oryza sativa
atgccacctcggatttgagcttagcgccaacaaaagttggcgctgagacgttatagctcagcgccaaggtccatggcgctgagttcacggcctatttttggtgaagttttttgcagggactagtttcgaaataagtttttaaaaaagactaatttgttaaaaaaacggtggttgtggcggctccattttggggaattttttttgacttagattctaatttgctacatcaatgtctgaacccaacaaaccaacgtaggtgtccatcaattcatctagcaagaaaaatcatagcagcatacaagtggtaaaacatgttgaaggatacaaatatattacattgtgaatctatcaaatattaattaagagagccatcaatgcgagcagtgcttttgcatacgtagcaggtcgatgaccacatccaccaccctagaatccattgccacctctagattggtgcacccttcctctccactaccaccattccgccatggctccaccctcattcccccatggctctaccctttgaagccctgccactaccaccatcgctgaaaaaaaagtaaagggaatatagggactcacctacgctggctagtaatgatgacaatgatggacgaggcgttgctcggtcgatccggatggggcgggagctcggtaagaagag

SEQ ID NO: 35228 - DNA, 611 bp, Oryza sativa
tagggctataaattggggtgctatggactcaattcaagacattaaaccccatttcacatgatgaatccatcgaagtgttcaagagaattgtgtgcttattgaagatcatttgtcttagagtgttcgctaaattctctcccaactctctccatttctatgatcttgagtttgtgagctaatagtgggttgagttgagagtgtgtggaagaaaagatttgtaatctcagagccgccaacgcgtgtggtttgcttaggaacccttgtgaaggctctatttcgcctttgaaagggaagaagtcactgagtggaagccgagcttcatctaggtagttgcttgccagagcgagcttcaccggagggtagttgcatgctatccgagcttgagaccgagtgggtctcttgaagcacgaacttttccttggcggttgcttgaagaaaccaagacaccatcggaggttgcttggagaggaaaagggttaatcgagacccgacttttcggaacccctcaacggagagtaggataggttggatccaaacatcagtaaataaatcagtgtatcctttcctctcttttaccttggatttaccactttctatattggtctattagt

SEQ ID NO: 35229 - DNA, 655 bp, Oryza sativa
gttttgtcttgatttgcaccggcattttcttaggctggtttataaattcaattttaggcttaggaggagaacttagggtgtgacacctggtatggccggtctgaccggttctaggcagagcgctggagggcacgtttcaatcaattttaaggccgaattaattgtgaattcggacatttgtgcccaagaaacagaagaagattggaggattcctttgattcgatatttgaaagatcccacgcttaaggttgatcggaaaattcgacggcaagcattcaagtacacattgcttgatgaagatttatatcgccgaaatatagatggtgtcttgttgaagtgcttagatgaagatcaatctaaagtggctatgggagaggtacatgaaggaatttgtgggactcatgaatcggcccacaagatgaattggttgcttaggagagcggtgttctattggccgaggatgattgatgattgcttcaaatattatagaggatgtgaaacttgtcaacggatcggcaatgttcaattggcgcccgccgccgtgttgaatcctataatcaaaccatggcattccgaggttgggctttagatttcattggtcaaatttatccttcgtcatcaaaggggcataggttcgtgctagttgctacggatt

SEQ ID NO: 35230 - DNA, 660 bp, Oryza sativa
aaataatatacataattttttttgagaaataaaatacataattgtgcacgtaaataaaattctattcccatagtacgataagacaatacgaaataaaatatcaaaacatgaactaacagttaacgcgcataatttcataacgttataattttatcacaccatggggcaagaaataaagctaagtatcaaaatgtcatcgaaatcatataatcataaaattctacctcataatactgttgaaccaaaataaagcaaaattaacattagtatcaataaattaaatttctagctgaatttcttgttagttccatttagctacacatgatcttcattgcataagaaagtttataatgcaactttatggcatcaaataatggcttaaacggattaaaatgcatttatgtaaaggaaaaatcactaattcggcccgataataagggaaaagtaatttggcccgaagaccagtcacgacccagaggccagagctagcctgtgattgggcggcccttgaggcaagcatagcccattaaccaatcatggcccgtcagtgtagccgtccgattctgatggacggccacgatctctgatgggtggctgatgcggcgtatgagagtcatggtgttatggttacggataaggcggttgtagataaggcatacc

SEQ ID NO: 35231 - DNA, 706 bp, Oryza sativa
agagagagagcgactgtttgtgaaagggcaatagtgacatttttcctacttgggcccacatgtcagagctgccaaatggttaaacccaaacagaatagcgacggaatggtgtggaggacgcgataaagttcgacaatagcatagagagagactcaaactttttagtggcatagaggcaagggtcatcttttttaatagcacacaggtaaaaaccttaagattctctagcctcaacatgaatgtatctaagggtgtaaatggctaacccatgaaatccacttgtaggttaaaataagttaaaataaacggacttgtaggttaaaataagttaaaataaacgggtttgcggctgatccacttatacccctaaatgcatctagccagtggcaatttcgtttgcttcacaatttttgattttgttccaagcaagagtatgatcggaatgaagtgtcaacattttgtgtattcaaactgaatttatcaaggacgaaaaatgagccgcaaaaaattcatactaaaattacaccgcaaaagttaccaagtaatcagagtccaattccaatctgctgagtgctgaacgcaattcatttgaaaccgcatctaattctccaaaacccaaaatttttcagtagttgacacttgaacagtttgcacaatccatatccaagcctgcatcacgtgatcaccatttttctccatctcatac

SEQ ID NO: 35232 - DNA, 1318 bp, Oryza sativa
attcaacgggccaaatcttcttgtccatttggaagcctacaaggtgggaatttatggccaatccgcacagaatcgtgaggtcaagaaaatttcctctagctcgatacattgcgccaccgcttctccatctcgcgattgcgagcagacgatgccaccgagcctcctccagcgagatgctctcaccggtcctccttattcggtctacccctaccgctctatccctctctccttagatcttgggtatgcccttcttctttcccctcttctcctagagtttccgggtttcctatttgacaaagttggtgatgagccgctctgtcctaaagtgaacaagagttatgttatggttggcatgtctctatcttaagaggatttttccattggaatgggttagtttatctcttagatttagggtattttatataaatagatggccatattgaaagggtcttgagaatcgttaattttgcctagaggaggggtgaacgggtgctttgtgatatttcaaaacttgcagcgagattagaactaactagacaaaccgacacaacttccggtagtccaactatagatgagttggatagttcgactgctgtaggacaatccgattagtgcaacgataggaaaaatgataggttttgggaactccgattgtccaattgctgcaggacaatctggttaacacaaggatagaaacttaagtgatatagtaagaaacaaactagaaggtccacttaagcatgctttctacaagggcaagtgttgacggtcattatcgatcagttgcgaccgtcaatattaccaaaatagaggagaactagttatgcttgcaatacatatacaagttagaataataatattccactagtattgggtgtactaaccttttgcagagaataaccataaagtggaggagaatcgacatcagcacatacgataaatcaatcggacgatgtcgagaatcaaacttatgcatgaatgggccaagaactcagaattgacataatgaattgggccaaaattcacaagtctaagaagtgaagtaatggaggaggccacctaccgaattcggccgaaccccctagcaccgttggatgcagggtttcttctggatggcgtggatcactccccaatgacggttggagagcaattctgaccattccaactgccaccgaccatccccaaggagttcactctcttcacttcaacacacacctcaagcaagagctctctcatattctctcaagttagtttagtattcttaagctagtggaataggaatatagtagaaattaggtatggctctagtggctttcct

SEQ ID NO: 35233 - DNA, 987 bp, Oryza sativa
gcgttatatttttcatcaaaaatagtcggtatgtatttatattgtaagttcctaaattacatatttaattttagtgtatttataatgtagctctcatatttatatacataagtcgcaaaattacatatgtaagtcccaaataaatttacatatgtaatcagtatgtaattatagtgtaagtacgatgtaattagtatgaataatttatccactagtgatatagtttaatctccaagtataaaagcaaatactagcacaaatcttgaagataatctgttgagttgtgatacaaattcatttgcacttaataaatgctagcttctaccgtagtaaagcggaggcccgtcgccgggaggcttgggccggagcgtagcggacgaaatgacagtgggcttgctttccgttcccctattcctaatttgaagagctaatttgcgggattaacaagaggatggtagtggacgttcgacgcctcaagtcctcaacgcccgcatggattcaatgcaagtaacaaaaatggggtcctcctatctgttggactgggggccatatgtcatacaattagtgatatacctggcgccagtaatttttgagtggggtccagggcccccacaccttgtatggtaaatccgcccatgcgcacaaccattgctagtggactagattgctttctgtcgcctacgtataatatccttttaggtggccatcataacctagccgttgcgaaaacattcttcattagtgactgctttacgacaaccgccaacgaatatattgcattttctgtgaccttcggtcgctggcgtatgagattctcgccacttaaaacatgaaatggatgccaaggattaacggttatcctttttatagtagtgaaatgtagcctctactctatacaaactgtagagaatagcgtggattgagagcaaagtgtattttttttgaattgagagcaaagtgtataggggttatataatagagataatt

SEQ ID NO: 35234 - DNA, 802 bp, Oryza sativa
ctcttgctttctcatacatatgcaattgattgtgtactgccttgatctataccttttcataagaaaggtttggttcagttttgggggaatttttttggctgagatttgttcatgttgcaagagtatttggctatttgctgcttcgagtgatggttatggacatggattagttgggaattggggcttgtttctgaaggttgttcatatattttggggagggttgtggattgaccctgctaggatgaaactttgttctaacccaagaattttgacatttggggattttttttttctagagcagatcactaaggaatcagaacatgaggcttagaatttttgtttttaaggaattagacttcgaaaattgagtagcatgttcagaagctagggatttcagattataaaaggttggggtttaattagcgaagaagtttcaggttgtgatgctatgctgcggtgttgattgggtaacagtgacggattgatagccatggacatgaaaatgagttgggaacttgggttttatgttggtgatagtaactgtttgaagattatataaagggtcaaatatcttcggtgtatcttgttgattccagttttccaaggtttgttgacaatgaagattattcgggagggcgttgtcagaatccatttcagtttcagctctctggagttgaccaagggattttgattccaaatttccagggcgatagcaaaatgctgacttcaaatttatgtgtcaataacatttccagtcagttttgagaagtacaatttgtgttattcaggtgtttctgaaaac

SEQ ID NO: 35235 - DNA, 624 bp, Oryza sativa
aggtccggaacttcctgtcttccaggtccggaagttccggtcttgtgaaaaagattttcctaagtgtagtccggaagttccggtcttctaggtgacgtaacggctagatgacgtcacctagccgtcatacatatacagcttgattccagctcgttccttagccattccactttcatttttcaaacctagagcaattgctagcctctcccaagtgtttcttgtcttctccactcaatctagagcctaattcttgtgagaaagagagattgagagggagagaagaagatttggagatgtgtgaagactaggatcttgggtaagcacttggaatatctcgtgggctgtcatctcggtgcttattactcttcgagatgatctcctagacggttaggtgtcgcccgcgagaatccgttgcatattgtggatgtcccgggtaagtttgtgaaggatttcctctcctccgaaagggaacgaggtaagttagtgaagttcttgtactgagattttagaggctttccaagtagagcaacccacacttgtggtggatttctagaagtaggttgagtttgatcttggtggtcactcaattctagaaatttgcctaggggtgtttggggttgaagg

SEQ ID NO: 35236 - DNA, 1196 bp, Oryza sativa
gcggcgtggcgtggcggcggcggcattgcgcgcgcggcggcgaaggcggcggcggcgtggcgacggcggcggcggcgtggcgttggcatgcggcggcggcgttgcgcggcgtcgaaggcggcggcgtggcgcgtcgtcgtcgtggcgcggcgtctcgtggcgggcggcgcgacggagagagatcgagatcggagagatcgagatgcatgaagggagatctggcggtggcagctctcaccccagagatgcggcggcagcggaggaggcggaggcggcggcgaggacgacgagctcaagacgacggcgagatacggcggcgtcggcgcggggatttgccctaggcagtggcggcgaaggagagaggccgagagagatcgatcggccgaaaacgtttaagtgttggtgaagaagacgagggcgcaccgggaatatatatacccccggatctttactcccggttgttctcaacaaccgggactaaagatatctttagtcccggttgttctcaacaaccgggagtaaatatcttttcccgctatttcgaaattctttttaaacccggttagggttaagaaccgggactaaagattatagcactgcatatgattttcgcttacatatgtgtttataaaatagaagttaatgcattaacattatttaaagtacaaagattaatgacaattacttcgaaaaattatttttgtctgtaataaattaagtggataaatcgtaataagcaaatataattaataaaaattccaataatcatatatacttagcatatatatgaatgatattattacattggtacagactctaattaagatatgtatgtacatactgcatgatttaaaattaataaaaattgtactcatcatatgtacttagcgtaggaattatattaaattaaatgctaaaaactctaattaacatatgtaaatgccacatgcatgatttaaacattttagaattcgaatagtcatatataagtagcatatgaaagatagtaaattaaattgtgaaaaactctaatatatgaatgatagttttaaaaatatattacatttaatacttttaaaaattctccagtcaattataattagcatatgaatgatagtaaattaaatgttaaaactgtaattaacatatgaaattgccacttgcgtgatttaaaacttttaaaaatcctctagtca

SEQ ID NO: 35237 - DNA, 3129 bp, Oryza sativa
  unsure (1)..(3129): unsure at all n locations
ccgaaggaacagaacataggtacgtacatacaagatacgacaaccaaaataaaacatacatgtttagtactgtcaacaagcaaatatctacaatataaagatgaaatatattatcccacaaatatatacatgcagttgaactaattttaatgtcggttttcacttgatggatccattaactatttatgtgttattgatttttaaattaatggacatattgttttatataatataatatctttctcatgcatgtacataatgtttgccggaagaaaaaaatatatgcacgtacttactataaagataaagccaaaataaaacataaacataagtacttaggccatcgaaaaattgacggcggtctttcaaatagaactatctacaatataaagatgaaatatattacttcataaatatacacatgcagtgttaaactagatctacaatataaatatcaaatatcaaatcaatcatctttaattgttcatctttaaaaaaaaaattaaatgatatatttaatttgtgatcttacaaacactcctaaatcaccatgtggcgctccaacaaatgctgttaggtcgctacgtggtactgtataatctcagcatcgattttcatttaaattggtggaccgttattatagaccattagattagatgtatatatactaatactaactgttaaaaaaacataagtacatatacaaacataagtatgtacctgagattgaaaaggaaataaagcttcggtagtactattcatagcaagaaaaaaactatctattatctatctatctatctatctatctatttctattatctattatctatctattatatattatatactaaactaaaagtccattaaacttcctaaaaacgctctgaaaccgtcaagtggcaccctataaacactcacaagtcgccaaatggcacctaataaataaaagaaacccaaccatccatttttacttaaatcgggtggattcattattttagatggttagatatattttgtaaaaagaaaaaacatccggagccaacatccaaaccaacgtacaaaagtacgtaatagttttagattatatactgacgaacgtacttactatacgtacatccatcttttccttccttattttctttttaagaagactaaaataaaaattacttttaacaagcaaaantagaaagattcagccaaaattaggaccaactactaggttnctaggcattctctacccatccggtcacattnaaaaattcctaatgaatgcctcttaaatcactatgtggntgctattaaattggagaaagtactagaaaaaaaatacaaagcaatcgaccaccagtttctacttaaattgatgcatttaggttgttatatattttttaaatgaaaaatccgtgtggtggtaaaatccattaaacattttataaacacctctaagctgctactatatgacattcttaaattaaagaaaatcttagaaatttgagaaaaaaaatactattatatactaaaagtccatgaaacagcctataaatattgctaagtcgccaagtaacaccttacaaacgctactaaatcgtcaagtgatactataatttgcccattgatttttaattaaatggtggatctattatttcattttcgaaggttagatcgttttttcttttaaaacacacatatccacaacctccctctcaagtacataccaacaagccttcttcatgagaaattaaaatcaatattatttttacattaaaataccacatatctccacccgctaggtctagcaggtcctgatctgtcattctaaacatgctacaaacacttttaagatgctatacgatgctattaaattaaataaaatactagcaaatattaaaaatgaacaaagcattagactatcgatttgttagtttttctaataagaaaaaactctaagttggtatatgaaattcttaaattatagaaaattcttagaaattttgggaaacaacatccaaccataggattagacataaatcgatggacacattattttcaatcaaataaaacattattttaggtcactagatctatttttttttaaaaaaaacatcttataaacgctcttaagatgttacgtcgttatcttaaatcaatgaaaatcctaaaaattctgataagaaaacaaagcatccaaccatcggtttcgacatgaacatctgacacattattttaggttgttatattaatcatttagaaaaaacattccaaacctccctccctccctgcctgtagtgtacagcgtgcgccattcttttgtctctgtttttttatctcctagacaattaaaattaaaattatctatatgggaaaaaacacaaatggatctccatctattacttatatcacgttaggcatctaacaactttctaccaattgaattaatttctcttaacatacatatgagggctacacacctatacaaattgaccttgatactttgttgttgcatttaaaacacatacttaatataaaaattcaaatatatttatgaggactgttagaatgataaatataaaattttaaaatacaatcaaacaaaaaaattatattatttgatttgttttgggttgtaagtatcaatctggcaagttaaaataccctaaattttctgatagcaacaacctcctttttttttcgagataagggaccaactccatagtttcgacacaatatgttcttatcaattcaaaaccacatgatttcaaataattttattttataatttatatgttgaaagagtaattataagaaaataccagcgttcaaagaatacaaaataagtttaattttagtttagaatataataaaaatatttcaataaaaaaccctgcacataaatattcataataaaatttcactcacattacataagaaggtgcccgcgcatgtgcgcgggctacctttctagttaatatattaatgcccatagatagatggactccttaattgtgtttcatgcatgcttgctgcttgtggcgagggtagtacaattcggaattcaaagacacatttgttttctcttgtttggagaatacaagtcagagaatttgagtgatccgaaggtgctcacggttc

SEQ ID NO: 35238 - DNA, 1709 bp, Oryza sativa
gacacatttgttttctcttgtttggagaatacaagtcagagaatttgagtgatccgaaggtgctcacggttcaaatttctcgtgaaaagtttaggggtatatgcattgttctgatacttgatcagttaattttgtgtgagaatggtcttcaggtgatctggaagttttttgcttctgattgtagcaagtaattagtagataaaatcttcaggaatttagtagatgagattttttttgagaactcattttctagtcttttatggaaatgataagtttagccgcaatccatgtacaatacgaacataattgagattcccgatatgcttaaatatgaacttaattgaaaaatccttattattcttatcattttctcatcaatctttaaatatgcttcataacttggatttgcctaagattaattcccagagtttagtgattcttttgtgcttatctctctagatcgtttttgccttcttccagtgcagttcaattgctcaagattaaattttgttgttgtgctaagtgcaaaattgtaaataatttgtgtgctatctatagtactgcttgtctgaattgatagataagtggactaaactgacttttgctattactaaatattcagtccatttacaatcatctggatccaatggtggccattatttaaaatgtcagtgtctaccagggttcacaattttggatctgaaatttcgataattatctgtctatcggcccccaccccccaatacgatataattttggccgaaatttttaatttttttcatttttttcgtgaatttgttaatatgttgttcaaattttattcaaaaatttataaaattttggaccgaaatttcggtatttcggccaccctcgatacaaatcagcaaaccgaaacattaaaccctggtgtctaccatgtcagaaaatggtatattggttcagtctgtagatcttgttactccatagagatgattaattattggggcttggagaaattttttgtgtttcagaactgtttaagtgaagctggtatctagtgcttcagaatgctgaaagaactactgcattgcacccagcatgtgtgatatccaactatgttagtttcatgtccacatttagttctgatgcagctagtctgaatgcttaggtcacttaattaaagcatgggttttccttgctcaagcacaatcctttcttcctatagaattggtacccactacatatcattactgctataaagcagtacaggaataagccacatcatcgagggattgcagccgttagatctcatccgagagataattctagccgcgcgatatggttccatcggccgtcaatctcaggtgtgcgttcacttattgcatggttgggccaagccatggcccatttcttttctccagttggcccatcactagtcctttcttcctatataattggtacccactacctattattattgctataaagcagctacaggaataagccacgtcattgagggatcgcagccgttagatctcatccgagagataattctagccgcgtgatatggttccatcggccatcaatctcaggtgtgcgttcacttattgcatggttgggccaagccatggcccatttcttttctccagttggcccatctctgggcacaaagatgcaaggcgatcactgctcaacccaccttctaaagccctaagtccaatggcgcagct

SEQ ID NO: 35239 - DNA, 743 bp, Oryza sativa
atattataaaagtaatttgctgattttttatcaaaatataatcatgtgagatcttgttgtaaagatttaattgttacgaacacaacggtgtaatcggatgtaaatcggatgagtaatttaagagaaacttttatttgaagcatacatgataggaatatttgttctacttgcttgatcaattaataccatagtaaagcaagattcttcaagacatatctggacaacggctgattggatgatagggtcgctcattatgactaaatcgagagcgatctcgatttatattttacgttcggaaaaacattgtgcttcggaaaaacaaagaaatcaatgtagcctccatccgacttaggcagaggcgaagccaggatttatggttaggggagtgtgggcaggacgaagaagtcattagtcagagtaagcaataccgatgacaaaacaagacatcatgtgttctaccataaaaaaccttgaatttagctctttagttgtatcattgcatgtttgacagtttgagacttgaggcaccatactagatagcgagacgcaatgggaggacggagagacatgtgaagtcgaagcaatgaagacgaggagttgatttgtgttgtctctccgtctctttcttattaattaattatctatatcatgtttaatgataatggactaattaacaaactaatgcgctagttagtagggatggcaacggggcggggcggggccgtgttgggctggaacgcccc

SEQ ID NO: 35240 - DNA, 561 bp, Oryza sativa
tatcgacattaatatgatgcagaaagaaattaggaaaaaataaaatttaaaaatagccaaaaacggtgcggtcggaaacagtacccttaaacggaaacggcgcccggtcgatcggtattctgtgaccgttttcacccctatatgcaacatacaaaaaacacaaattgacttgttctgggtcagtagtgtcccggagattccacaaatttaggacaacgtgcctggtaaatgtacaaatgtaatacagtcagtttctttttaagaagtcaaacgtcaaatatattcccaagaaggattagttatggtattgtgaaacagggttggaggctgtctgctactctgctgtgtgtgaatgtttcacaaattaatgttgcaacaagtaggcatcgcatcaataattaacaattacatgaagaagttttcataacaagaattagacctacagagaaccaattgttactagccacaacaccaacaactgagctttgcaaacctttccttgtcaattctgcaaaggctgagcaaataacttgcgaacaagtgtggaactgtagaagggaa

SEQ ID NO: 35241 - DNA, 601 bp, Oryza sativa
atagtaccgatcctcttttccggtccacacacctaactcctccctctatctctttttttcctctctaacttcttatctctttccttatctctaactcccctccgctccttccttttcccttcaccacaatatctctttttttcctctctaacttcttatctctttccttatctctaactcccctccgctccttcctttttcccttcaccacagtgcaggcggccggcgcggaggtggccggcgcggcagcgcggggggccgcgcggcggcggcggtgggcggccggcgcggcggcgcgggaggccgcgcggaggaggcggctgcggtgggcggccgctcggcggcgaccggcgcggcgctggccggccggcgcggaggggaggaggggaggtggcagtggctgccggccggattttttttctttttttttgagatgtgaatctgtgatgtatttttgtgtgagatgtgaatctgtgatgaattttttagaaccctgtgatgtaatttttttaagagtttgtgatgtatttggagatgatttgtttgaggatttggagatgttatgtaatatgtgatgatttggatatgggaggggacggtg

SEQ ID NO: 35242 - DNA, 584 bp, Oryza sativa
ggggtgtataggagtatagttgcagagctgccgacgggtgacgggacttctagaaaataaaaaatgaattccaacgatagttatgttcaatttttagaatcccaatgacaataaagagtaggcggcggacgggccgtagaggagcatagtggcatagtttgacaagacttctaaaaattataaaaaaataaaacccaacaagacaataaactctataaactacaaggttcaatttttgaagtttcggaacttctaaaaagtaaaaaaaacaatgatagtcatattcgattttaaaatctcaatgacaataaagaagggaggcagcgggcgagccgtagagaagaacaatggcaaagtcactgacggtttggcgggacttctagaaagtaaaaaatgaacccaaacgataattatgttcgaattttaaaatctcaatgacaataaagagaagagacagtagacgggtcatagaggagtataatggcaacgtttgacgggacgtctagaaattataaaaatgaaactcaatgtgaaaataaactctaaaacctataagatccaatgtttgaagtttctaaggagaa

SEQ ID NO: 35243 - DNA, 740 bp, Oryza sativa
atacaattttaaaatagttgaaattcagaattaaaaataaggaatattaaaagaagagtccgtataaaaacctaatacgagattaaataaaattggaaataaaaataaaaataaaatccgaaattagcaaaaaaaaaataaaagaagagctcaagtaggaatacaatttaaaattagctgaaatttagaattaaaaacaagcaatattgaaagaagaatccatataataacccgatacgagattaattaaaattcagaataaaaaaataaaataatatccaaaattagataaagtaaaagagatttcaaataggaatacaattttgaaacaactgaaattgaaaataaaaaataaaaatattaaaagaacataatacgatattaattaaaattttttaaaaaaatctgaaattagaaaaaagaaaaataagattccaataaggaatacaatttataaataactaaaatttgtgataaaaataaagactattgaaataaaagaccatctaaaatacatgacgagataaattaagtaacatgcatataaaggagtagagtggtggcggttgatatgacataaaaaaattgttaatgaaacaccaaatagaatcctaatgacgactaaaaggaggggcgacagggaggccgtaaagcaaacgatcaaggcgattgctgggacttctagaaagtaaaaaaataaaccccattgataatcatattcgatttttaaaatctcaaga

SEQ ID NO: 35244 - DNA, 644 bp, Oryza sativa
agtcaatatggccagtttttttcccagtatctcctaaactttacatgcatgctagcaataagttgtggtaatcaataggaattagaacgaacatgctcccaaattaacctggaagcaaagtcaaggagtttgcatttcttaatgttcttttacaaggtctaaaccggaaagcattagcttaactgaagcatttggggcactagttagactagttcttacctaattggtgggtatgtatttaatcaattaatctaaccaaaaccactaacatgagaccaagtcttacattgcatgaaaatgtgccatttggcagaatttgagagaatgattacaaacaatgaaaatacagactactaaacatcaacttttcatcaacgccgctcaacttgtgttaatgtattgtcaggacatttgacaacttacccatgagccaagtctttctacttcactggatgaagcagtcggtctctgctagttcaatgttggatacctttcaatttgccgagcatcttttctacagacataaggattaatgaaaactgtgacaggagccgttccaatgagtatttagtactatatctgtacgaactacgaaaaccagttctttggacttctagagcttactggaacaatagttcgaagag

SEQ ID NO: 35245 - DNA, 699 bp, Oryza sativa
taccaagtgaatgaaaaggaggaaacctactctccttattttaggaagaatgaagtcctgcaaacaatgttgtgcgcccttagtaggaaagaagaattttaattattctcgacaaatattttctgttctgtgaagcaaacttacaaagtgtacatgatttcggagtaggtccaaaaatttgaacatgctttcgaagattcaaataaggtacaagtcttgtttgcttggatggatgaactggcaccttaatagttctaagctgttctttcatagcgttcatctagttaaatcaagccgttgaatatataagcaagatttacgtctttcgtcagaatgtaagacccttcaatatgttcccagcaacacacagtcaagcttttagttatacgcaatcaattttcgttggtccttgccatcaattagcaatagctaagttggttttggctcttattttgcattcatacaaattggcatccttaaagctgcaaatcaaatccaaagttctactggaaatatgctttgcgtaaactgttatagatcttggcactttaagtgtctgtatgtttttcaaaatggtgtgctctgttcctgctagtgatgtgcgacccaatgaagttatggttgtttagtaaaaaaagtagtagtgcttttccttaggaatagttgagaaggggatcatatagagtcgacctgcaggca

SEQ ID NO: 35246 - DNA, 1260 bp, Oryza sativa
taaatgttgaaaagtgtactcagttactttagttcaagttttcaattagatttaacttttcttcacttgtgataaaattggggtttataatcaatagaatttaggttaaaaaaatttatacttttttggattttatattatttacttattattgcaaacaaagcactcaaagatacggcataatacaaaagataatttcaaaatttcaaaaatttactaataatcattatcaagtattttattttgttattttgagtttattctattatttagacaaagaggagggctttgagcctttgacacaatagggctaaggctgaggtcttttcagtaacttaaatggcaacttccttatttttcattaccatatttcccaaactgccaaacaacacattatgtacatttttttcctatataaaagtttctcgaaaaaattaaataaatttattttctagtttataattaatcacttgctaatgacacgtctcattttgcgtgctggatataaactcaaccaaaacgctgagtcgaacggcactgtcatttatttttttttagttttaattatcattaaatttgatcgtgcttaaatttggaggtaatagttagcaagttgtaaatttgcgtataatttagcaaataaccaacatatatatattcattaaaggcgtggtatagtagttctaactaaagatatgttatcaacaaatatcatttgcatcgcaagagttgttgaaagttgaccagcatattgaggccctctttgtttaagcttaggcttattgacttagacttttaagtcagcttattgacttatatgatttataagccaatggatttaatgttctaagtttagtggtggagtcatacatctacctcatataagccaaaaaaaacttctttaacctagcttttggcttaatagtgttaaagtgacttatggcttcaaaaaagtcaaacgaaaaaattgcttgtttgtttagacttagacatttccgcttataagttggcttataagcataaacaaagagggcctcagcactccggttattatatcacatttccaggttttaaagattgggtgaaattgacctgatcgcagcgcgagcagctagcgcaaattgttggactcatgacccatccatgcatgattattcagtcagtcagtcagtaggttcccagaattttctccctgcaaacagggacaaaaagcctctccaaatcgattgctgtcaaaattcagagatcgaattcagacag

SEQ ID NO: 35247 - DNA, 746 bp, Oryza sativa
ccccctataacttttattttcgtatttcttcatccgataaagtgttagtaacattgctaacaaaattgacatatctgtgttatagtttataaaacaaaatgagagatatgtgaattttgtaaacaatgttactatcactttgttggataaagaaatgaccaaaataaaagttatacaattttgttgtgatgaccttttcaattgaaatcatttaatatttgaaattgttgtctgaagttatcatattttcaaattcaaattcagactgttcaataaattttatatagagaaattaccaaaataaaagttgtaagtcttgataagttatacaactttgttgttgatgacttttctatttgaaatcatttagtatatgaaagttataaaagttatatcttttataactttcatattttcaaattcaaatacaaatagtttaaaaaatgttatatagaaaaatgaccaaaataaaagttatacgtcttgatgagttatacaactttgttattgacaattttcacatttgaaaccatttactacccgaaaatttatttgaatttcttatattttaaaattcaaattttatatagttcaatcaaacccgaatggagaaatgacctaaataaaattggtagatctcaatgagttctacaactttgtttttgacagttttttatatgagttcatttcgtatcataaaattcaattcaaaatttatttttgcctaaatgtctgatttgactcct

SEQ ID NO: 35248 - DNA, 745 bp, Oryza sativa
caaagtccgtccctcctccatttcataggatatccttgggaatatttcctccaaattctgggaaatccttttcctccatttataaaaccatttgaacttcggaaatttgtatcttgcaaaccgtaactccgattgggtccattcaacttccaggatttctctaaaatcgacatctatcaaatggcactactgaattgaggtgttttgtactttatttgtaggattttggatgtttatctcttattgaccgcataggtgatatttttgatatttaacgaacgtggatttctcaaagatattggattctaaaagcaaggcaaatcactacacatccctccttgagcatgttgaacctatctttataaatgtggtgattaaaaataaaattgcatgctatttataaactgcgtacctaaacttgaatgtaacccacccttgatattgttacatttatatatttgtatatccttgttgcatgagtctattatttatacgcggtcaattattgacattgctagcattgcattgtacagacaattatagataccatgtttattatatggatatggatgtgagatcactcgatgcgagtgattaatggtttatggctagagacatgagcgccacccgcgacacaaaaaccttttgcgaaaactaaaacttaataaaacaaaacaattttgactggagtggcatggatagaatatgggtggatctatgagcggctagtaaaaacaccctggtc

SEQ ID NO: 35249 - DNA, 624 bp, Oryza sativa
tgggttttctagcttatggcttatagcttatggcttagtttatttttttagattctacaactatagtttcttagaatctggaataaacactgtattagttgggagagtttctaattcggagagaacctgcaaacaggaccatactgttgctcttgaatcagtaatgatagtacaagcggataatgatcggggtttagagaaaatgaatgaacgagcttttgggcattggcagtgccacggcaaccaccgccgcactcccatcaccgtaccctcatccactgatcgttctaaatgccgcatcatgatgattgcacgccccaaacccaaatcgcacgggctgcacggctgcaacgcaaccaccacaaaaagccccccctgctccggtgggcatccgcatatcagcatctgcttctgcgacgtgcggggggtggtgtgcgcgagtggtgcgccgcacgttcgttcgttcgtgccgccgcctgccaacctgcagcccagcaacgcagaaacggacgtggcatattttcctccgcgaccgcgagcacatggacatggccacggcgacgaggcatccacgcatcacgtacgcacctgtgcaccctgtcactgatctatctactcgcaaac

SEQ ID NO: 35250 - DNA, 684 bp, Oryza sativa
ctccggccgcgacgctgccgacgcgtgcttctctgtctcgtctgcgccacaaacttgaagctgctctcaaccatcagcacctactagacggtcaccgccctcaacttcgcctacatcgtccgtgagttctgcgttagagacaaggtgattgattccgtggcctctccttttccgtgttgtggaatctcttcttgcttttggtttgcccggtgattaaatttatatctgtttgtgcaagtgctgctgctgctacgattaaatttgtcatcaaatatgtgcaagtgctgctactacagattctttttctgtttgtacgtatgcatcatgtgaatcgttgatttcgatcccgatggaattttcatagtgtttagttgtgctccaacagatctgaaattaaaaaaaaatgacaaaaaaacatgatattttcaatatgacttgtgcttgactaattaaggcaatggtactggtacattactcttagtgcatgaaaaagtaaagagtctcagttactaataagaataaattggacgactgaaagaaaaatggaaaaaagaacacaagtttcataacacaaataaactctagttttgttgttggtgaccaccatatttctgccaaatgtgctccatcaaaactgactttagacgtcgatgggttgttcgatcgcgaatattcatgtctgcg

SEQ ID NO: 35251 - DNA, 640 bp, Oryza sativa
atctggataaaaagcatgtccgaatttattgtactatgaagtgtcttctccggtactaaattggtatattatgggacagaggaagtgatatataaaccgtatgtcatcaactcatcatgttatttgtgtagcattagaaacatgtcaactctggcgctagcaattccatctcgcattgttaagatatttaaggcttagtttagtttagcaactttggtgagcaacttcctcgttctctcttcaaacggttaaacggcacgtttcataaaaaaaatgtatataaaaggtttttctaaaaaaatagaataaactcattcttcaagtttgtaatagctaattaatcaatgatcttccatgttttcggcactatggaaaatcttacccgagttgctaaaacgaactaaccctaagtatgacagcctagttattttcctttctagggtttataaacctcttagggccaggccaatgtttatggtaaaatgcataacaggagtgggcccatctacaggtagcaatagttaaggaaatctctacaatgatactgctttgttgatggaaaaaggtgggtccgctggccccacgggagaaaaaggatcagatcactcttaccatttgttgttcgcgcgagtgaaaaaaa

SEQ ID NO: 35252 - DNA, 681 bp, Oryza sativa
agcttttgatcaggttggcaaataaatacccaatagaaaaaagctctcataccctccctgataatgcccgtgtactataagagcaagcaccatcggtagcatatgttaccccataattgccaaagaaaaagaattaagtcccacataatagtacctgacagctatgcaattaatgtaacacttgctgatggatcaccagagttttcttggtggacccaaggttgcgtattagaaacaagtgtaccattagacatagacatcacttaaccaggccaatgatagcaagaaaaagaagttatagaaaattcaaatttgatcagcctgaatttttttttcgttttttccattctacttagataatgcaggcgtagggctggaaaacatggtttttcaccagtgaaatcaggatctatgtgggcaatggggaaagcaagccttacaaatcctaaaaagcagagtagcagagggttacgtaacctgtatgtatattcaaaggttaaaaaatattcagaaatataattgttgttgacaaacacaggatagcattagcggtacctattcttgattaaattcttaaagttacccaaagttgttgtattcatgaatttgggatttgtagtatgcaacgtatgagtttcttcattgctactttggggttaccggcatgcaacatactattat

SEQ ID NO: 35253 - DNA, 554 bp, Oryza sativa
  unsure (1)..(554): unsure at all n locations
gttattccctagttatatttctatatgcactatatactcctcttttaatattcctattttttaattccgaatttcagttatttcctaattgtatttctatatgaattctagtctcctcttctaatatcccttattttttattccgaattcaagctatttctaaattatatttctatatggtttctgcctttcttttttctccgattaatgtgagaatttctatgccatgagagcgaatgtgnaggctcctttttctattcctttaataatataactagctgggtggcccgcgcaattgcgcggctagcacccaaacaaaattatatatattttttatgattttactaaaaatttattaaatagctatctcattgtcttaagagtttgaaagaccaaaccttatcatccccatgtttctaattatatagttttctaaagtcacaccagatactaccccttatgttatctccttctttatttgcttgctcgatctaccactatttctattcattctccttagaaacttcaaacattggatcttataggttttagag

SEQ ID NO: 35254 - DNA, 576 bp, Oryza sativa
tccacaggatggaagattcccccgagggggctcgcacgcccgcgtacgtacgttcgcgcgtgcggatcccgagacgcgacgaatgggtcgagattgtgcccggcgcatcgcacggcgcgggaggtgggggctcctcgaggcgggcgcgcgcgtcaaacagaacaagaggcgccggcatctcgtgcccgcgtggcctcttcctccctccgcctcccgccgcaccactacttgccccccatatccatccataataaaagtacgcacctcgcgtccgcggccgcgcggctatatatcagtaccgcgcctacgcactcctctcctctctctcctgtgtgctagcggaggcggagcactacacggttaattctgcggttgctgctgctacctgcgaccttctagcaggtgcgtttcctcctcgctttgcctatatatatatccacttacatttctcggcttgatccatggattagtctgtcgatctcttccatgccatcgatctcgctggttaagattgcgctctagtgcttagcttgttgcagagccttgactttctttttcttgctaagaactgaataa

SEQ ID NO: 35255 - DNA, 559 bp, Oryza sativa
atagatatagatagatagatatctataatagatagatagatagagagagagagagagagatttgagctcggcattgacaattttaatgtggagaacatccaggacgagaatagtcacgtgcaaggcattgtcaacaaattagatgaaagtctgaaaccatgttactttgttgaaatgttaccgacaagagatacttgattaatcgattttcttttggccaagttccgagagaatatggttgtgcagcatatgaaatttggttcgccatatgtacaatatattgaatattgaatattgaatgctgcatcaagacacgggatgaatcatcacgattcttgagttacattgcatcaatatttttctgaaatgttcaacatctggtcctattttccccatataacagctggtaacgcacatcacgtatgaccattctggtatatatcatatatgtgggtcacttgatttttttttatttcaatactagagtgccaatcttctttatgtggtctgaatgtgccatgaagaaaagtatgtcatgcatatctcattgaaaaaagat

SEQ ID NO: 35256 - DNA, 587 bp, Oryza sativa
caaaggacaacctgtgctatccatcacttgaggcatgcctggaaaagtgcaagtacgatgaataggcacgcagccgactcagaggctaagtgctccgatgtgtgattgaattggacacaatatttactaataatcatatatccggtatatttgggaataacatatgtatatgttccaacagatatgcattttctaaatccatattgaagcatatgagatgcgtggtgcttatgtttaggagttgttttcataatcaacaaaatataattccatattttcaatgctagaataaatattgggccaaaagaaaaccaagaatctcatttcataaatttcgttatcgcacataaggacccaataaattgagtctatgaaaaagagttgagcatgctagtgggcgtagttgctatagcgacactagacgtgcatggttgcgcttcccatgcaggttttggttttgcttcacgtggcatctttagcctcccgttcaaagatctctacatatcagaacttcagttttcctgaaactttcatctcaaaatcacaaaactttctctttcaacatatgaaaacattcatctgaaaat

SEQ ID NO: 35257 - DNA, 793 bp, Oryza sativa
ggtggtggagttgcttagagcggacgaaaacactggctaactttgattatggaccaccctatactactgatcagtgtgttacgtgcgcgagggactaaatctgaacgcaaccgatcagaaccagacttcacccgtatctgcggatatcaagctgatgtatatcttgcttgtgaaaccctttaccttctcgagccactccaatccgatctacgctggttattgtatgattgcggtggaaaataatttgttttagatccagtgtactgagcaagcaatgatgatttggctacgtatccattgcgtggccctgttgatgagtggctggatcattatcgcatgagcagatgcgaatgacaaccgattagtcgcgctaaggacgacgaaacgtatcccacgacacacataccttgagcgagtcgatgctctaaagacagccggagacaaagggtctgaagacagaggatcatgatgtccggcgatatctagctgaggtcaatggtgaggaacgatgtggtgccgacgatgttcttactgatcacgacacgtaatggaagttgtggtcaggtgtgagggaatgaactagacagttgcgcggatgtcccatgagattgcctgattatggaggcaatgcttgtacaaaggagtcccacttggatacgaggaacaagcatagtgcgtgagttggggcggacaatgaatgatgaccaggaggctctaggtagtagcttgaagcgacagaacctgcctctccaaatagagaatcttcttgcgattgacaagacagtttcagaag

SEQ ID NO: 35258 - DNA, 661 bp, Oryza sativa
aagtcattgttgaatcgccatgcatgcttgcatcgatggtgtggcttgccacgtatggtgttagtactaagctttgttattatctgcaccttttcggaactgtatgtgcttctgagatcaagacgacgttataagatcaaggctcagaccccagttgagtgtgggctggtgagtggacctgtagcatcgctaggatcgctgtattccggtgctgtcgcttcttattggtgtgaggactaagagcctattctgtaagtatagcacgcttaatctatgtttgaggaagtgtattacgttgtcgttttgtgtaccacgtctggtcgtggacagggattttatacacaaaataatgtggaaatatgggttaaatttctgggcgtgacagcttgtcagattcaaggccatacatgtatggtcgtccattagcttcaatgatttgatggattatgtgagagtcatgtatcttgagcggaacctctgccaaggaccacatatcaaaggaagcaattaatatgtccattatctctaggtgttcaaaagacccaagcatgtgaaactcattgcatagtgtccaccaagtaatacgcggttttagactattgcctcacacgtcaagagagtgggtacaagatgggcaacggagcatcctgggctgcaggaa

SEQ ID NO: 35259 - DNA, 565 bp, Oryza sativa
atttgagccggtcgtgggctttttttgtgcgatttttttatttgtgcggtttttttaatcttcttgtttcgttttctttttctctagattcaatgtccgattggattttgtatcggtatttgaatttgtgcaacatccgctttatgtggtaccggcgccacacgtatttgaatttgtgcaacatccgccttatgtggtactggcgctgtggcgcgacacgagtgggaacggggagggagttggacaggaaaataacacggaaaaatcgcaaaaaaaaaagatcgcgaggagggaatcggacaacgtacgaaaattttttggcaaaaacatcttaaacttttataataggtaaagataaagataagctactccatgtattatatactccatccttttaggttataagatgactgtttcaaatttgactaagtttgtaatttaactaagtttatagacaaatataataatatttataatactaaattagtttcatcaaatcaataattgaatatattttcataataaatttgtcttaggttaaaaacgttactactttttctacaaa

SEQ ID NO: 35260 - DNA, 637 bp, Oryza sativa
caacatcatacccaaatacccatgtctcacagatgtccacatttatatataaatatttaaaaataccacttctaccaattaattggataaaacaattaaacttatatatgaatactcctctgacgatcgggtgaagccgactattgccgctaaggagttttcgctaatgccttattcatgggtcccgtgatatagtcgtgctcctcaagatgagcgtggaccataattttatcggcaagtaggccagttaaactttattgtcaacggtggattaaaaatttgtggtatgatttagatgttatagttgttgaattgttcagcacaaaagttttttttctagctaataaagtatgataataggagaataaatgtgtgcaaaaatataagaaatcgagggaagaaggggtgcaagtacgtacgtacgtactatccttaaagaaatgtacgtatacatatagtaatacgtacatgtccatggtggacccggtttggggttaggaattttttttataaatctaatggtggtaaataattggtccattaatttaatgaaaatcaatggctagagaattctctaaattcccgtgatatagtcgtgctcctcaagatgagcctgaaccataattttatcggtaag

SEQ ID NO: 35261 - DNA, 658 bp, Oryza sativa
aattaacttatcaactttccaatctttaatttagtcagttaaggctctgtttgaatctcctgaagataaaaataaaaataaagattaaatgttttacgtaaaagataataacttatgattaactgagttttaattattataaatatgaaaaatagattaatctgatattttagaacaactttcatataaaaaattttcgcataaaacgtaccatttagcagtttgaaaagcgtgccacgaaaatccaaaacttaatgttcactttgttgggttctcgaacagcgcttacacccacaaaataataaagtaaatttcatccataatcccatcatccaacagcgctttaaaacaaattatgccataattatttgcgagacaaacaatatttagatattccaatcatcaaacttccagaatcatcacaacaaacacaatcatcaaacttccaaaatcacatttccttcacagtcatcaaacctcctttgggtgttcctctagaagtaacagaagtatcaaacaaactagatgcgcaggtatcaaaagtgctcctccagaagtaccaaagagtaagtactacaaaatggggctacaaaatccggagtcactctcttttgccctgctgaggagcccatccctgtgactgcgaacctctcactcg

SEQ ID NO: 35262 - DNA, 590 bp, Oryza sativa
tcctgcagccctgatttgatttgtcatcaaatgttctttaagcataacataagtatttttgtatttgtcatcaaaagctggatttgttgcaagtcagtgagcggctccgtcgtccggcttgccaatgccagaaattttgtctggtaggcagccaccgaggaggcctgatatagccgcttcagttcgcccagggcattgcgatggattggcggcccaaattgggcatggcacaattccttgaaggcgtaccaatctgggggtccgtgatgctgctcgtagtgaaaataccattcctgagcgtcaccggtgagatggtacgtggccagccatacacgatcaccatccggtgtcttctgtcctcggaagaattgttcacaatgattgaaccaattgaggggatcgtctttgccgtcatatttgggaaattccagtttatagaagcgaggaacgcccgtgccagaactgttgtcctggggcgcatgagaccgtctcgtgaacagcggtggaggaggcggaggcggcggcgggggcggcggtggtggtggtggtgggggagagccagatgatggtggtggtggtggtggtggtgg

SEQ ID NO: 35263 - DNA, 541 bp, Oryza sativa
tgttttaccaaactctagtaaatacataaaaaaatcgtcccaaaacttgataatattattaaattatcaaaattctgatattgttaaaatttaatcagatttattttggcgataaactgaacgggcccgttcatctcgatcgtgggtgggtacgtgatcgaatggactgaattgggtgtacgactagtcgatgtgcctgttcaaccgatcgtaccagtcaacggctcctgcagctagagctatagtagctcgatgtccctcttgttgctgtgcgatgctctgtagctttcagcttgtcactgcttcactggtgactagtcagcatgcatagctagtcaaactattctatatttaattgaatttatagagaaaacataatatttgtgatatatcaaataaacaccattacatacattatcaaatatttttcatagtttacttttcagatgtggtagacattaattatctcgttttctataaatatatagtacgtaaaacttaagagatacgatggtgttttacttgcgacaaactcagaatc

SEQ ID NO: 35264 - DNA, 794 bp, Oryza sativa
accaggagtaaagtttatggcgatctttttttccggttaatgttatcaaccgggactacaaatagatctttagtcccggttggtaacaccaaccggtactaaagattggaaagtacccctggagctttaaaaccgggactaaagatgtttttagtcttggtttttaatacaaccgggactattgtgaaatttagtcgaccgaccaaagatggtttctccaccagtgcatgtattatattaacactggtggagaaagggttattactaccggttcgtaacccccctatagtcccggttttcgaaccgggactacgaatccgggactaaagatcgctatctttagtcccgggtaaaaaaaccgggagtaaaaatctatttttagtcccggttggtaaagataaagcatctttagtcccggttggtgttaccaacctggactaaagaggctaatccggttgctctttccggttcctctttattattttcttttcttcattatttttaaatatattgatttcaccccattccatccccaaaatcccaaatcaatcatcctcaaattgcctccaaatccacaaatcgatcatctcaaatactcaaatacatcacaaaatcttaaaaaaaaattacatcacaacctctacaaaattcatcacatattcacatcacacacaaatcaaatacatcacataacaatctcagatccaatcaaatacattcacacaacaatctcagattctgcaaaaaaaaggaaaacgaaaaaacctaaggagaagacgcgcggcgaggcaccg

SEQ ID NO: 35265 - DNA, 717 bp, Oryza sativa
attacatctatataattgagcgaaaatatgttttatttatattagacataactttttaattatagggcatttggcatttcaccatagggccccaaatttctagagacggccctaaaaaatagtaccactgcacctttcactctctaaaaataataccgctcatgaacagatcatgcttttgaagttttccaacctaccaatttcatgtgttgccttggccaaagagcccacctacttcctaacacctaaacttcaaataaaattttctcttaaattactaatctgatatacaatcagattgtatcattatgttcattgcaacttaatttttataacaagatctcacataattatattttaatggaagaagaatatgtgtagtaaattacttttgtgtatctataaattacttttagattggattagattacttcttagacattctcataatattgtgaatatgttacttttattgttgtttttagttagttctataatttatgttgattcaatttaatttctagatagacacatgtttttaccaccacaactgatttactttaaattttaataccatgataacttacttttattttgtgttaagttacttttataatttgtgtgaattattttcaggctttattgaatttactttcataaatatctaagaagtaatttattcaaatctaaaagtaattataagtagttatatttaga

SEQ ID NO: 35266 - DNA, 667 bp, Oryza sativa
attcctgcagcccatgcctcgtccaagctttttgttgtcacgctgccaaagaggacaaggatttggccctgcttctcttcttcttccttcccttcttgcgggaagaacactactactattaccattaccattaccggattatttggcaaaccatggaccaacttggctttttcaaggtggaactggctgaacccagttaacccacccctggaaaagggcaggccctttatttgaccaaatgaagatgggaacctaataattggacaagtttttcaagggcaattttaagggaggaaaacacaattaggtttggaggggaaataacttttgacattggtgggaaaagaaggggtgggttggtctggggcctaaataaggattaccaaattttggcaatgccaaattttggcaaggtttggcatgactaattttggtaagtcaaaattggggttggattgaagcccaaataacctaagttcactattgaaatggcatattttcttaagcatgcccaaatttggattcaaaccaaatagacactaaacactgttgaaattggacaaatattggtaagtctaatttattcctcaaaccaaaccaccccgagatgggttgggtaggtgaacttgtgaacagtttggcctgcatctgcattggtaggggccta

SEQ ID NO: 35267 - DNA, 2590 bp, Oryza sativa
atcggtaaagagccaattaacttggctttgagcatgtgtagtttcacgtgcggcaaaacaaaggtaaatttaataagtataagtgggagacaacttattatagtttagctaatcaattgatcctaacataccactaccagatcgattaattcattctagtgatctactctttctccatcaaaaaaaatcaacctagtattagatgtgatatattatagtactatgtacagtccatatttatattattaagatatgttaaatttaaaagtatgttagttttttatagaatggagggagtatagttcagtgggagggtagatagaatatctaaatatataccatccactacgtactcattattgcaggtgccgagcttgccctatcattttcagctagtgtggcatgcataattccgaccataaatatcacgttctaattcgtcattatattcgatgacaaaaaaaaaacaacaattacttgcgtgtatataccaccaatgaactgtgtgcttgcgatctaggagatggcataaatgaataatgcctgacgtgtgtatgatctaaaaagggtttaggatatttctttgacctacgtctcaagtcacaagagagatcacacatgcacattcttttggcataattccaatctttcgttcacacaagtacgtacggtcagaaacacaaacgttgactcacccactaatatttcagctgcgttaattaattatctgcagcacactctacaggatatgcatatgcataatgcatgcactacatcttttcttgaagattaggatgcatcggcatcttagcttaattgtttgtactcgtcatgttcttgtctatctctcttcgttttcacatgtgtcaattttctttgcagggtgttcacaacgcatccactaattgttatgtgattgaggtgttgaaatgactgaccacactattctcgatcagatatgatgcaaactttaatctagcgagggaaatatataatgaacaagttgttggatacgtacccccccccaagcgattagttaaatcatcatgcaacattttacaatttttccaagatatactggaaacaatacaactctataacaattcaaaaaatgtctggcaaatatcaaagaataactgtcttaatttgggagttccgcactaaaccaacttacctgaatgatggttcctcaatgggttgggttgctagactcgatcgatcgattaactgcaccttgtaaagttttcttctttttctttcctcccttttcaagcctctgtatccttttgatatattctataacttctctctgccttttatacgttaattagaaaaataattgtactttacaatgggtaaaatgtattggctttcactttacactactttaagctaggatgtattgaaatatgttacattcaataataccagcatgtgtcatcaatcctatagaaatctcttgaaatttcataaaatctaaatgaaacttcataaaaacgtggtctaaattcaagaatgttcataaagttccagtcatattttacaagatttctcatagattatacgaagcaacatggtacaaagcatatactaacttaacgctgatgcaaagtgaaagtgtgtgcttaacctatgtaacgtgaaagactgtgttaattttaaccaatacaaagtactctatttttcacccatccaacacacataccaatacaaaagccaaaaaaatgccattcactttattatatcttaatgcaattaccctccactttatctattcttaatatatttgtcaccactttcataaactccaatgtaacgattgcataaaaaataaagttattttaggacgaggccgtgcaacttactcttaaaaaatgattgaggagtcccgcttgttcaaattgaaaattgtctatgtatgatgtggtattatcatagacggttttgagccatctgcaatctaataaactaaatgatgcatcgcactttgctgcaggatatagttagatattagataaatgatgaaatgatttatattgaaatattatgaaaatgatatcagaatgatgatttagcacgtgtatgtttagttttagaatgaaataaattctagatataattactatatgcttgcatgttgagctttgtgtgtttaatggtttgatgtgacatgcttacatgtaggttttaggagtgctaataaaaactatgcttacatgggtctagatcccctggagttgagtataactctaccgggtggagttggccaaatctggagttggccaaatctgtgccatccattgtttcctacagctgagatcattcctcatcaatttcacctaataaattaactccttaaattaatggttatgacttccgaggaaacttaatttttttccatgcatttcctctataatagcgatttgattaaattctcacaaaaaaataatagaccagtgttttgttattgcccaaacaactgatatagtccatcaactctaaagcttcaaggagtgcataccaacatatatagtgctttcacatataatgagccatatcaatattaatgtgtgtgatttgggctgcagga

SEQ ID NO: 35268 - DNA, 660 bp, Oryza sativa
ctgcagcccctgatcaatatggaattttctgttttccaaaatacgtaaatcaaaagagaacggagggagtagaactttagtgcatgacctaaaaagagtaaattacattggcggtacacaaacttgttaggtgggtgcaatctagagcataaacttataaaatgtttgtgttggtgcatgaacttgtctggtgcgtgtaaaccaagaccaaaaggacacaacaagactaatctcatttatttaagtgctgattaggatgcgatgtaaacatgcatgtgatatatatatgttcaataaaaggtaaaataaggcatgattgttgtcaaagaaagacataaaaaacctgagtaatgatgcaagggtggaaacaaaaagaaggttaatgtaagaaccgagtttataaatatagcatatctcatgcccatctcatatgtgcatatcacgtcctaatctacatccaacctggtaaaattagccatgctacgttattttggtcttggttcacaaccactagacaagtccgtacaccaaaacgagtattttaaaagtttatgcacttgattgcacttacctgacaagttcgtgtaccgtcaatgcatttactcaactaaaaaagtctaaacattttggtggttaagagctactaattgagagggcata

SEQ ID NO: 35269 - DNA, 575 bp, Oryza sativa
ccaacagtttggtgtgtacggatcaccgaacataccctaaacaaagaacacaaacaatatatgcaattcaatcggtagtacatgaaaatggtttgcatcaacaattatcatttaagagaacatggtgatgaactcaaattaatgttatttagaattttagattaatggagtttcatagggcaatcaactgccacaaaatgggaagggtttacataatactatagctcatttcacttctaccgatactgttacagtatatggtccttgaggagttgagtgcagtgagatctttttttttttgtttactctaccaaaggcccaaaatttgaaagaagaaaatgttaccacatatatatactgctccctccattccagaataagttaatctagtactcaatccattccaaaatataagcatttttagcatagtgacaagtcaaacattttaaactttgaccattaatagcaaaagaaaaaagatcaatcatgtaaaattgatgttactagatttattattaaacaaacaattataatatgcaactctttttatttaaaacattttacttttatagata

SEQ ID NO: 35270 - DNA, 628 bp, Oryza sativa
cggtggtttggaaggcggttttggctaatgtggcgcttacgtggctggcttgactaggtctttgtcccacgtggcattgacgtggcgcttacgtggcaattctatcccagaaaaataataaaaactgtgggcccacatgtcaattaccccaaaaataataattttaaaatggtggggcccacgtgggccccacatgtcagcctcactcctcccttcatccctctctcttctctctttgttcttcctcatcctcactcccctctctctcttcttcttcccggggagtgccggagcggacggggcgggtgggcggtggagcaggcgagcgaggcgggctgtccgagctccggcggtgggcaacggcgccagcgacgggagcctcgaccgggggagaggaggcgccgcggtagctggagccggggtggtcggcgcggcggcgggtgaggtggtggtaggcgcggcggcggagagaagctgctgctgcatctccagcatgatgcagactctgctttccggattgcttgctattggaagaattgaggagtcgatcgactactattggaagagttgagctagataacttatcactgacagttaagctatagctattttttttctccatatctga

SEQ ID NO: 35271 - DNA, 712 bp, Oryza sativa
ttacaaatgcatgcatgctgtagtaataagatgtctttgctttaatttggtttctctaatttcgatcttcttctaattaattaagtaatagttcctgatatgcatgattaatataattaattcagcacatatatacattcattctcgattaattgatacagtagtgcagcaactatgagtgagtatcagcacagtgggttcacatattaaagttgtgggctgaacgaaaaggacgacgtacttttagttagttgtatgcgtgtgttgtaaaagcgtatctactccaatatttttcataattacaatcacggtacttcgattctgaacatgaatatgccaacgaagcaaattaagcaactcagggaatgaaatgcgttgattaattttctggatttgattaacattgtatactttgattttctatgatttcatttcggtgagccacatacgcatgcaacaaaaatgtgtccaatcatgttaataactattggttgcagtaagtatagctaggacgactgctataattaaaggaatgctagtatgtatatataacatgatatcacataatctaattaaatagaaattgacttaggtagtcgtatctttctcaagttatgatgcaaactccaatggtttttggctgttacaatggcggtgaatgatgttttaagctagaaatatcccccaaattactcctttcagcactagagta

SEQ ID NO: 35272 - DNA, 730 bp, Oryza sativa
gcagccctgtgagtgatatcagtgatcatcagagtgtaagatcccctcatccagccacaatatccgtttcctacattattgagcattgtgccgcactgtaacaattcatctagagagtatttggcacacatgacggaccaattgactacctcaacatgtagcaatttgcgtggttagacttggtcaaaaccaacggggcatgggtacagaaaaaaggatattaccaatggtcccgatcagaccccttaacttagctgtctatagctagctagtctctttccaagactttcttcttcttttttcttttttttttgaggggctttccaagactttctgcattgcctagagtatgtactttctcttgttctttaatttgctcttcttttcaaaatatgatggagaacactagcacatagtttagtccgccagtgcttgactactccacaaatgtcttcaaatggtgccaccatctgctagtccaaattccctgtggaccttggtatttccgtcttagtgaatttgacgcttttgatgttcttgctcaatcgtactacgtacatattccatgccctgcttatcctacccggccggagtggaattatctactggaaatcactagaggtacaatgttggagttgtttcttaatcatggatagacgatgactcgatccacttgactacaaggattttaaatcctgctgtcacaatttcgtacacataagtgtgcttt

SEQ ID NO: 35273 - DNA, 699 bp, Oryza sativa
attgggtaggttgatccctgtgcatggcacctgctcaatttgatctgggagggatcgactttcatcaatattttgagttcattctagttttccatccctgtgctttgcttttgacgcgatagagtggagatggattctaatagctcgagtggatgtccatccgtttattgcatgtcaactacttaattacgaaaaattttcaaaaaaattgacaacatagattaatatgtagtatatcactctacaaacatgtaagttcaaattcagcttctacaagttgtaacaaaaataacaaatttaattgtaaatatacatatagtaatttgagttttgtttattatttttgttacaatttgtagaagttaaattttaacttgcatgtttgtgtattaatatattacatattgatctatcttgttcttctttttttcaatttttttcataccatttaaatgacatgcaataaatgggtagacgttcactcgagctgttaaacagtttcccgcgataaagttaattaaatgcatgaacaagttatatactgggagccggtggtctggttagatgtggtagcgctatgaacgaagcatataatagtcggcagggttaggtcggggtgagaggtcgactcgttaagataggaggtggtagatccagcagtacgtggctctaaagatgggaaggcaatgcactgtgggg

SEQ ID NO: 35274 - DNA, 637 bp, Oryza sativa
ctgctatcgtagttcctgcagcccactgctaaaaaagtctccagcttgaaggagaatttctcgcgtgttggtaagccattggcaaagcccaggaggagagcatgccgctttggtgatgatgacgaggaagaacaacggacacctcctcataaatcttctgttaaatccatccccatgcgtggagtccccacagagaagttccaatcacagacaggggttcgtgggatttcttcatcccaaattggcaatgcttctgcaatgaaatttggtgtggcaagagaagagaaacctaaaagcattgggaggtcacctgtggagcatgagccagattatacttcaccaaatcaagacaaaatgcatggtagactacagataatggggaaaaggtcaaccacaagctcggttgacacttctgctagtctgggtaacaaaactaacctggcagatcgcagatcctctgggcaattaagaatggcagcatcctctgaagtgaagaaaacacaaggaagttcttctaaactattgcaccagacaccggggaacttgcactctcaaaaccctgatgactcggaaaagaatgcactgttgtctaaatcggaaaacagtaaggctaagactaaatctggcacacagataa

SEQ ID NO: 35275 - DNA, 673 bp, Oryza sativa
tgccggtaaagatcctgtcaaataattttgctgtaaattcctgaaagcacaacaattaaaaagcaaaaaataagatatttgaacttgtatctgcagaatctcttattggcaggaaggaagcatcatccattacataagcctttcattgcaatagcaattggaagtagcatgttaaatgttaccaaaatgatatgaggcacaaatgcactgaagtgaacggtaccaatagtggggccttgttgaagttggactacatattattataactactgaaggcaacatatatatgtacttaaaaaaaggcataaaaaagggaagtaaattctgatgaggaattgaacctcctgaaaaccaacatctcaaccaaaatactccctccatctacttttgatagtcatattttatcttggcacacagaccaaggataagtaattatacttatcatccatttaaacatgctactagtaattattttatcgtttgcctggtaactaacaattattattcaaaattagatgggattaattaaattaatatttactgcagaatatttttcaaaagtttgacagtgattgatagtgatacatattaatgtgctttatcatcaacacatacaagttagctagataggtgagattctccagttctgcaagtatcggaccgacaacatcca

SEQ ID NO: 35276 - DNA, 544 bp, Oryza sativa
actggttgactgatcctgagcatctctcatctcaaccatgatgatgacgatcacctgtgacctgatgagcttcttcctccttgactcctggttggttcactttgttgaacaacagaatgaccagaagcagcagcaggaggaggaagaaagcaaaccggacactggagacctcacatcaccgagcagctgtttgggttctcgtcgctgaagtagttgtagggatcggcatgcgggtggggctgcatcgggtagtgcatcgggtacggcatcggcggccggccgtacccgtaccccatcgccgggtaccccgccggagcagcgccgccgccgtggccatggtgaccgtggtggtggccatggccgtggtggccgtggccgttcatcatcatctgctgctgctgctgctgcatcatggccatgtactgctgctgggccatggggttgccggccgccgccgcggcctgcagcatctctgggccggacggcatgccgccgccaccgccgccgccgccgccctggtagaacgccggcgttggcatgccct

SEQ ID NO: 35277 - DNA, 699 bp, Oryza sativa
tacccatgaattcagaaccccagagtccgcacatcctcaaatacaaagcacttccctagttagatgtaggttagacttcccgttcgagaaactctaccttctacctgccctcaatttatgcacgattaatgaatgccacctgggtggaagcgagaggtggaaatggaaggtcttagttcggaggtgggatctctacctgatagttgcattgccattcatgatgatcccctggcattcgtccattcagccattcaccattcacccattcaactggaattttggttgaatgccggaattgtgtccacaaattgtggatggatagttggttggctggctggatggctggctggatggctggctggatggatggtgaatggctggcggcggttcggttgctttgaagcatttgttgctatctaaattccatttaaggtcgtaccttatcgcccagcatcatcttattctctatttgtattccctccatctttcagatacggatgtagccttggatgtgcccgtgcccaatgaagaggaagagcgcaacatgaaacgtaagtacaaaagtaccggacacccacccagatcccaatagaatccgccaaatcctgcgggaaattgtaatcccattcaccagctcctacatttaattaacaagagaactattgtatttatctaacacctggattatctccacctttc

SEQ ID NO: 35278 - DNA, 664 bp, Oryza sativa
tgtgatagtagaaatgccggcatgtttgcaatggaaaaagatacaattgcgtatgtaaatcgggacatgtttatatgtgtttttaagtgagaccgtcataaattttaatatcgattcgtcagttccaataaacatattgtcatgggcggatcacccaaaaaattcttagcctaacacataaatatacgtatgtgaaaagaaacttttgaaaaaacgaagaaaaaaggctcgtttttaatatattatgatgcatatttgatccatttatacttttagctttgttatatataagttggatcacccatataaaagttcgagatacgtcattggtattgttaaatctattattaattagtcattttcatttttaagggagtattgtttccagtttataaattaattacatttgaggtcaaatagtagtatttttttacctcaacaaattgatagagaaatgagaaaaataaaaggaagagaggtctggtagggaaaaaaaataaagaaagaaagcagagcacgagaacagataagtcataagtccccattttcactttctccttcactttccccaaatccatccgctctcatctcgtgtcctttactcctgtctagctgtctcccccgattcaactccccacgcggccacctaaaacatgggggatcc

SEQ ID NO: 35279 - DNA, 591 bp, Oryza sativa
ataacctaaccctgtaaagcatgaatcatgtgccaagaacagctaggttactgtttagttggtacgttacataattgcattgcacttgtataaatcttagagacttttagcaactccagaaaattggacagatttatcagaactaattgtcggtactatcgtcaaaatcaacgggatatgacataatatgctgtcatgccataataatcccgcctaactgcttacaaactactccagtagtattgaagtgcacactcgatagcacttgattcgagcattcggggttcattcggcaaggtgcaaactgcaaaatgatttgaatttgagatgaatttggcgtcctcaagagactgaatctagtttaaacccaaaccggacattttacaaccaaaggcgcctaattttccgaatcccataaaaaagcacatatatgctacgattccgcacggggattcaaaacaacagcctgccgaaccaaccgatccaactcaccacaccaaacacaagacagacacgcccccagggtgtagggagtgcgagagaaagcgggagactcactcaccggaggtagaatcggcggcgggtaccggg

SEQ ID NO: 35280 - DNA, 520 bp, Oryza sativa
tgcatcgtattcctgcagccccgcttaatcctaaatatatgcatggtttgtttggttgaagaagagtgaagagacatgataggtttatccaatccatcacctcatccctcaaaagtcaaaactagtgacagccagcccacaagaaatggtactagcaagcaagcaggcagccagcagccagctcagccagctagcttagctagtccgcgatatctgcaagagtgtcatccgtacgtgcaataatatagcttcgcgcccacagttctaatcactgcatgtctgcatgcaaacctttagaacagtagtagtcaaaaacaagtttgcaaacaattagaacaaggattttgaaacctgttcgcctgcagttaacatactgcaactctgcaagcacattgatcaatcgatcaatccctccttccccatccaatcctccctctatataaactccaaccattcgatcccaatcaaacacaagctaaagccatcctcctctactgaaatctctagctactactactgc

SEQ ID NO: 35281 - DNA, 1266 bp, Oryza sativa
atgaacaacatatatctgtaagattcagtggcaaaattaacaaaacggagaagaaaataagcatgtttatgtcaaggagcaggcggtacctggcgatgttccattgactgaagatggggagcaaaactctgacgaagttgaagatcgtcaagctggagctgtgcagtcaaagggaggcaatctgcgtcgtactacaaggcctgttaagcaaaaccccaagtactgtgggcctaactgggccatgtaatagaagtccatattgtaataggctagcgtgaacaaggggaaagaagagagagataggatatatatatcagatcagcgagctcgagggaaacttgaatggcaaccacggtggcgtaggcggcggcggctccattcctgttggaatcggagaagactactatattgagttgccataattcctcttgctctaattctctcatcgttgcaattctctctgtaatttgggtgtgagttgtgggttgttgacaaaatttagtatcagagccactccgctccgcagatctccttggcttggttgtaaaatcccagggtaggattggaactgttcttcggaactgattctgcgaaaaggcaacttgccttctcctggttagccgagttcgggaagcgagcgagtgattctagtaccaaactgttccgtggagtcgagtatgtcgcaggaaagtaagttagatcttcttctgaaggtggtcgaggagaacgagaggaagagagtggcggcgaaggaaaggactcgagcagatttcgccgatctgaagaagatggtggaggcccgactgccggtggtggaaaagaaggtggagacactcagcgtttcggttcaaagcttgagccagaaggtggagctgatggaagggagcatgctcaaatctgaaccaccaacggaagggatcgggaacaacgcatcttggcttgctagtaagcgtgatccaaatctttaaacccctgttcattttgctggtaaggccgagtctgaattgccatcaccaacttctgcatccactggtaccaatcatgatttgagtgcttgtatccccccaatgatctgcccaaaatttgatggatctaacccccagatgtggaaaagtaattgcaagcagtactttgatgtctatggaatatatcctatgtattgggttaaggtggctactcttaattttgttggtaatgttgccttttggctccagtccattagatctcagattgttgacattacctgggtcactttatgtgaattag

SEQ ID NO: 35282 - DNA, 932 bp, Oryza sativa
attcctgcagcccggcgtatgtggggaggagcacgtggccttatgaaaataatccaacaattctaggtctcggtgtagattgtacaataaaaaagagtacactataaattcaattgatatttttttatggaaaaagtacgaatgactcccccccccgaactatgaggtcgaccgattttcatatttactgtccataccctagattgtactaccttcaatctggggcccacactcttgaccaccctatccaccttataggatgaaatggaattaactacatttagtatggaccaactgtatagatttataagattagcgccggccccatcttgtcattgacgctaacctatatccccaatcgcagagctgtaacaggccagcacctaagcccctccattgcaccatggtgccagaaacatcgagctgttgatggccctacttccaagtctacaatgtgtgccacacggtccgcccctatgtgccttgccatcacttccaaccattggctctaacaacacagccctctggctttcactagcatcttcatccctaattcgttcatgccttcgtccacatcctccacgaacgaaacataaggaggtgattaatattcattatttgcaagttaaaaaaagaagaagacaagagatgggacttcatagctgctttttgagaggtctgcatacgctacgcaagcgaaacaaccgggactatccaaatcacatatatttatagcaattgtataaaagtccctcggcgaaaaagtcaaccaacgatctccatgctgcaccgtcagtccatgcctgttatctaaccccaggcgatataaatagatgtcatccacatcctccataaacgaaacatgatgatgtgattaatttttattatataagttaacaaaaaaagtaaagaagatatgtgaatgcattgct

SEQ ID NO: 35283 - DNA, 2473 bp, Oryza sativa
ccccccctaagctagccagattaccaccacctttgcggggtgaaattgcgaaaagaacccagctactaactactacatggacttcgctctcagcaacagctctgctcatcgcatcctgatcttgcactaaggctagacgagacaagaagcaagcaaagaagagcaaagagagagagagatctcgcgcgctcacacttgggcatcttggtgttcctcctggccgcgccgccaccgccgccgccatccccgtcgaccccggatccgccgttgctcgtgctcccgcccgccgcgtggttgttcatcgcgccaagccgcagccaccaccacccaccacctcctcgaccccacgaccaagaaacctcaagaaccgggcccccggagcccgaggcccgggcaggcgggcctccctcgaggctagcttgccgcgatcttggagcttgctaggattgcaagcaaggaaggggaggatttgacctgtggagagaggggagggaggaggaagacgaagagaggaaaggaagggaggctttgctgtggtggttggcttgggaattgggagttgggattaatttttttttcatatggtcaaaacaggttttattttcactgtctttgttctagaatatttttttcttttcttttttaaggacttttcttataaaggtttaggccctgtttgcaactgataaatatgaggattaagaaagtatacgcaaaaacgaaaaaaaataataacatatgattattgagttttgattattataaatttagaagatgagttgatttgatattgtagagcaacttaatcagaaaataaaaggcctaatactaatatatagtttgtttttcttttttttagagattttttcacagctatcagttagatctattttgttccttttcaagcacttttcttcccatgtttagtactaatgggttttttttaaaaaaaatctttgagatttttcgtagctactatactcatatttacgtagttgctaaaaagttttatgataatatgttaatacctcctcttagaataaaagaggttttagagtttgacacgattgttaagaaattaggtagaattaaatagagagatattgtgattgattaagaagttaagttaggtgaaaaaagtgaatggtggaagagttgttattggttgagaagagaatgttggtggagaagttattgtattttaaaacaaattttaagtgctagaaatagttatattttggaacagactatacctaccataatagcacatatagtccctgtattatggagaaaacgagatagaaggacagtctgtactctgacaaagcaagattatgtgttacaaactatggcagaaatagtgatacggaagtatcatttcaaacaaatctgcacatgtgattttagtcagcacaacaaaaatatgaaaggtactcaaagttcaccttagactaatctggcccttatgacgaactcaatatacggaacatttttggtcatgcatgtgacacctggcaataagatattggtgcttttgtgctgcgcctctaccctctagcctttctagaagatgaacaccgttagtcgttaattaattaatcttctacagttgtagtttgacttgttcatcactctcttgctgataatttatcattatatatggaatcaatgttggtcactcattttcgtacttacggtagaaaaatcaacgaccataaatgatgtatcgtatacgttatctcacatgaccatgacctatagaacattgacacttaatttcaagttaacagtcatcgttatcatcgccgtttaggtttgggtctcgttgaaatttgaaaattcaaatgtcaaggtcaaacaatgtcatcttggaagacaaaataaaatgcgattaattagttgccctcttgtgcatcctgtccgtccaatgccattttccggccatccatcaggtaggagaatattgcgttgacgttgggaagtctttggtgggccccggctgcaggccgcgctgtattgggctgatagtgggctctagtatgggccctgatgggctggatacgtcgtttcagcctgattcgtattatagctaatttttatatattttttacgagggattgcagtttataaaggatgagtttcaccaccatctcgaataaatattgatattataagttgataatggcacaatgcctattggagactctaggatgaaaaataaaaataaaacagagaaagaaaaacaaaagaaactccggttgcgcctaatttttagcaaaatcgtttggttataggttattacatttttggactctgggagcagttagcaggtgctgagtcatatgcctctacaaataaattcggatatcatattattaattatgccattttggaacaccatcaaacaagacagtgtacatatacacacacacatatgcttattgagtgatcatgcaagaggtttattacacct

SEQ ID NO: 35284 - DNA, 660 bp, Oryza sativa
ttagcaacaaactaattaaatatatatattttttaacaactttataaaaaaatgacatggttgaaaatggcatcaaagtgaacagacgctaaaatttagttcgattaattgaaatagggaggctaagcagtacttgacttgtcttgtccaagtagctcgcgaatttgcggagctctgataagcaacgagaggagtaagtgagattcgatatatatgtatacatatatatacatatatatgtatatatatatatacatacatatatatgtatatgtatatgtatgtatatatatatatatatatatatatatgtatatgtatgtatgtatgtatgtatatatatgtatgtatgtatatatatatgtatgtatgtatgtatgtatgtatgtatgtatgtatgtatgtatgtatgtatgtatgaaaataatccacgtgcagcgagcaaccagctgcaagcaggcgcgcgcatacgtacttaaatatcaacctttataaagttggtccttaacttttagctctcattaaactaagaaaatcgctgtcaccagttactatggatggtagcttgagtttcaagcacacatttgagatgctgtcccatgagacatgacatgtgaaatgtttgcatgtggatcaccctagctaggataaatgagtttt

SEQ ID NO: 35285 - DNA, 3994 bp, Oryza sativa
cccccccacccctcacctccattcatgtttctctgtatggagttgcaacgatgttatttttgttttattttttcggatgttttttcacacttaggatcacgatacaaccaaccaccaaaaaaaatttcaactcgaactaccacttagctaagtctaccacttagtctactttgcaccttcactaaaattagaccataacttctttagtaaaaccttttgatcagcatgttaaacataggagagatcctttagtaaattagactatatgaaattacttacttaatctaattcaaaatataaccatataaaatgatagccataagttaaacagtatagagatgcaattttttatttttatttcattttttgatatttttttcacacttaggagaacataggaaccaaccatataaaaaataaactcaaacggacaaaatgtgacttgtagaattttccaaaactcaccgaaacggacaaaatatgtcatttattgaaataggcgtaactttctcatacggactcggaatcaggcaaataatatatccacggacatctacataaaaagttacacccgattctcccttgctttgccaggttcggcgatattaaaacctccaaattccacttgcaagattgtgtttttgaggagagaagtttttcggtagagctttgaaaaattccacaggccacatatttcgtccgtttgagtttattttttatatggttggttattgtaagttcctaagtgtgaaaaaatatcaaaaaaaaataaaaataaaaaagttgcacatctctctcctctgcactagttcggagagagaggagaggagagaaaaaaattctacgggttacatattacgtccatttgagtttattttttctatgtttggttcttatgtatccctaagcgtgaaaaaaatatcaaaaacataaaagaaaaataaaaaattcggggggggggggtggcgccagccattctggcgcgctctccctagtcacctcagcatcgccccgccacgtcggcggttatgggataagtttttttaggggtctatttgcgaaataagtttttcacaagaaccaaatgtgaaaaatccagatttatcctctcacttccttcctggaggtgagatcttcgcctgctcattggcggcgggccacgtggcaccagatgcgagggcttggtgtgctttctccatcatggaccgcatgtatttctcctgggcctcaaccctcatctggaggtgcttttctgcctgcatgcaaagaaatatattcactttctgggtgtccaaagaaaatgcatatgccaaatataatactcatgatgagttgaaagattattgaaaaaaaagttgtgctagcactagcagggtaaacttcccaagaatgttcctcttgcaagagacatatcatttaattttcagatagaacatgtgagaatttaatggggaacgttcatgcatgtaaagttcagaagcaacatgctattccttccgcaaatatcctcttttttatcaaatcctaataaaattatactacattttatatgctccgatcctaatacatatatctgctacttttataaatgggaggagcaaataatgaacttaaaggggtactaatttattttgagataaatgggaggagcaaataatgaacttaaaggggtactaatttcttatgtgaactagtcatcagtatgcaatgatgaatttaaaaatacatatgctctctcacctcttgttgttcttggctctgggccttcttatctgccccattcacatgcacgttgcggctgtgaagatcgacagaacagaaaattaattttgaaaacatatgaacatgcatggagctagatcgatcagaaagtatagacaaaagaaaattaattttgattgtttggctaaaaagagggtgcattttgaattaatgaacaacaaattaatatagccatggtaaatcaacttactctgaattcgtgcctgaagatggcgctgcattccattgattgtccattgctgaagtactgggaattgaaatggcgatggatcgatcgaatgcacgaagaagatgatgaaataatcagtactctgaccggtgtaataagagatatatataggagtacagtggcgcagttaaagggtttgtctatggtaatattctaaaatcatccctaattatcatcaggtaattaattagcatgatcagaggagccacatatatgttaatttgcatgcgcagatcacgctactaccaaggaaaaccgcttgtaataatacaagggacgagggcgggtgcatttcaggaacaaatatttctttcctgaaaccagaaatattccacctttctagtggatttcaggaaagaaatcgggaccatatataattgcaagtcccatgtactcaaggggatatgaaaacagccagtttttttatacagccaatataattggggtgcatgaaatgggctgattcatacccgccgttatctttactattgtacaacctgctcaccgcccctcctctttattgttattgggcttttaaaaatcaaacataatcgttattttggttctgttttatatttttttaatatcgcgtcaactgccccaccctatcatgttgcctcttctatttattattattgggattttaaaggtcgaacacgattcttgttgggattccccaacatgaattaacatacacgtttctcaaactcttaacaatacgtgatttttgaaaaatttgtacatatatgaatttcttatagtaaatactatttaatttaaatctatttcctaactttataatacttcattcatttatacctcgaataattaatcttaacagctgctgaaaaaaaaatagaacagttgcttgtgtccctgaccatatgatatgatctgaattctgaattgtacactagcacaagcagtgtgaagttcagcaattccaggggcactgtgtatagacattagactgtacatacatatgcagcattgcagaaaggaggcgacgcagaacaaacgaagcttccactctcagcaagaaaaggctgcatgcatcatgctatacagggctcagtcactgatataattggagcaaaattaatccaagctaattaactgtggatatatttgagctagctactttaaattaagccattgcatcgtgattcgggaacagtgcttaattgtgctgttatgcagtgttggtctttctctctccccttctctcccttctttgcttctctatcggtgagaggaagacagagcaccggcgacgagggccagtcccctccacccgccgctccgagctccgccgccccctcctcccgctgccccgaactctgtcctctgctgccccgagctccgccaccccctcagccctaagctcagctcaccaccgtcccgagcgccggtggttgcgggcgccctttgctgccgcccactccgcccgacatcgtcccgagctccgccgcccccttcgtcgctcctgcccgccgccgtcctcaaggtgaggaagcgagaagagtgaggattttggagagaggtagagaggtgaggggtaaaagagagggtgagagactgacatgtggggcccgctgatttaaaaagaaaaaaattgctgactggattgccacgtaaaccaaaaccgtttgtaaagctgctggggggattcatccaatatcgatagttgagggtgaaaattgactggttttcaagtttaggggataattcgtactcatccaatatttcagggggggtaatttatactttttccttttaataatccatagcaacaaacgagtaattttggctagtagttgatcgataaaaggaacgccaataatatataacatttttaagtgcttgggctcattaataatctttttaaatgcctacccccaggccccgagtaataatcatgaaaattttagaaataatgttaatataatctagatgacatgcaagtatatgggctgcaggaat

SEQ ID NO: 35286 - DNA, 2448 bp, Oryza sativa
taacaattattatgtgcgttcggcagcaacacaaggagaggaaaacttttatttattttttttaaaaaaaaggaagtctcaccatgttttttaaaaacaaagagaagaaactgttgtgtttttattaagaaaaatctatagaaaaattgtttcaaaagtcatatttatctgtttttcagttagaaataattaatacgtaattaattaatcatacgctaatgactcactatttttttcttaatattctctttttttctcctcaaacacaccctcagagcgccggtgcatatatacgtatcctcgaaaatattaaattagtttttcctgcatttattaagtttttttaaaaaaatcaaacaatatttgttaccatagggtgtataacttataaagattgttagataagtaaatcatatattgttgaattctcgattctagcaggtatacttcacccaatttgcaaaggtttatccattaataagcaggggtgaaaacggatcgagttcggtcagatctcaaccttttcatatcctaacccacattttataatcggaatcgggtcggacaaggatagtgtcaaatacggatacaaactcgtataatgtcgggcaaaaatatggaacaaatacgtaccaaaatagatacacacactattggttacgaatatttattcggatatcaagtcgaagcaacaaccttatatatcacatagacaataaccatttaacaattccatatatccataatacaattatattaggccattaggaacttaggaaataaatagggtataatacatcatagcagaaccaatacatagtaccaaaaaatgcctcacaaaaacataatataggtaatatccgtataattatccgggtaaaacccgaattttttaccggataatccgtatccatcggatactatatttccgaacccgatcttatatccgccaaaaaagacatgtattcggacctgatatccgtgaaaagtctcgggtacccgaatttgtcccgaaataatgtggccgggcaggagggcgggaaatacccgccccattttcacccctattaataagaagcattattaattccacatgcattgttcatctatcaatatatatattcttattgctatgctatgagaaggatttttttacctacttaattaattaccaggagatacaacatactccacattcttatgtcctccggttacacgaattaacactaaaattgtcgacctaattaagctgaattatgcgcgccaacagagaagctagattagtggaaacaagagatgacttcgtcttttatcactagtgcatccaatcatcatatcgttatatatatgtgggtcaaactctataatatatatgcatatatctagacacatcatgcaattagtcatggaaaaaggagtgtactcaaaaaacaccatcatatccaaatgatggcttgcagattgtgagggaattaaaaagacatgcatttgcattgagccccgtgggaatggttggttgcccaagtagacatcacaacatatacactgaaaaaaaaaaccctaaagtttatatagtgtgcattggggaccaatcaaccacaaccagtcaggcagctttagtttttagttttggtttggttcctacaaccataaaccattaattgccatcttgtggcacttaattttttttaagaactggctagctagatattcactggtgcatataaattgatagtaatatactccatattggtaaatcaaacaaattaattgttgtcaagaattgatcaggttcatgcatgattagttgactgaaccaaatagcaaattgatattgaacttgttggtagtaaattagtttatttccatcaatttcaatttttccttttgtatgttacatatatataatgctggaactgctagctactctttttctacttaaaagatgaataggtgaatgcacactctccttgatcttctaaacagtgtgttttttcagaaagaaaaaaataaagaactttctatacataaatttcatttctgtttttttttggcacactagtatgatttgttcaaagcaaattaatgtgatgaacaaattgtctacaggtattgatgccacaaagggtcaaaaaagtgagcagcttacaatcaatctcactgagagtagtctccctttagtacaatagaagattgtctcccatacatgcacacgtcactaagcatgcatcccattatgacacatacaaatccaaacaaaaaaaatggtggtcaaaattgtggcttgaggggcccatttgggagaggatgagtgagaacattataaagcaattaagctctagctcaatcgttcctagcttactcttccatgagggggatggacaagccgttttctttacacgagagggaatagatgctttcttctttgacaattaagcaaagattcct

SEQ ID NO: 35287 - DNA, 1680 bp, Oryza sativa
aggatggagacagatatcctcaccgtcctcccagcccacctccacactcttcctctactcctcgccgaggagagaggaggcatatctaggcaagcagcaaaggagaggggcgatggcaagcggagtggcaggggcgaagcaaatatggactgccagatccatgacaacagagatgagtcagcgatagcaacaagggaaggggtgcatggtgaagagcggcagtaaaggaggcggacctaggcggcgagagatgatcagattaatttgggctaccagattcatggctcggcagtggcctggtgacaacggttctgggataagggcggtggtacgaagaggaggggcgtaaggtggagggcggcagtggaatgtgagtcgaggtggtgacgacaaccgctcctagatctagtacagtggctccacaacgacgaccatgactagggatgcgacaacgatctcgacctcaatcatgacctgttggcttctagtgacgacgatcgcgatcgctaccagctacgacgtaggcggcaagcgctattttttcccctgaaaaattatcttcatatgtgggtgtcatagtgactcgcttgcaaaaatcaatgatttttacattcatttggttagatacgggccgtccgtatggaaaaattatttcctagtggagtatatatgattaatagatatatgttagctttatcagtgatgggtagtacgctttctctgtcatgaaatgattaagaccacaaagatcttctcctgcttgccaatcttataaaatatatgtaatgctttacgtggcccattaagtagcaactttaataagtacgtaatcatggttacccaatatttgatgtttagattaatgtctgaacacgtatgaacaaaacgggtacacgcacacactcgagttctttcggccgtcggcaaaatgtccctttgcaaaaccgcccagattatactactactatagtcctagaccatacagatgatttggaaggaaatccactaaagtgagcaccaatcaacatatttttgcatttatcggtctagcttctctcgtgttagaaaaaaaaaaaaaaccaacgtcacgactgctgggtgcgcatcaaaattaaactttggatctaaaataaaagctattaccgataagtcatccgtaatggtctcaagacgataccaataaaaggtgaccatcacatttttttggtttatagtacgttaccatgtatcacggatgacttatcttcaggctttgatttgacttctttgttgggttaaaattattagtgatggtcttttatatcggcctgagacaaatcactgttatcggtgaccaattatccataacgcggcctgtcggcgatgcagatgaaggttcccgtccgacacagatattttttttccacactagtgtctagttctgtctcgagttagcacttcatggccgaggtgccttgcctctctaggttggattcatcatcatcttcttcttattttttcaagaatggcaacaaaagtgtgtatcatgctagctaggccaatcaactttggacgtatacacgcgactgcattggcagtggcactttcattcgtttgtttttctcttgtgtgctttggcggcgttgagaggtgtgttgctttggcttctttgcgttgggggcttttctctctctctctctc

SEQ ID NO: 35288 - DNA, 990 bp, Oryza sativa
gattcggtgacattcccacgtgacattctcggtgacattgagttactgacaggtgggtctaggcacagacccacctactcgctagtgactgccaagtgctaactacttttgtttaggatcagagcaacatgaaatcttcatttctttgtcgatgtaaacgtagcaggtttaatctttcgatgacatggaaaagataatacaaaaatgaaaagaaaacgaaatgctgacagctttgacttttgatagtgttacttcatttatactccataaactaaaacagaaaaaagggttgctgtaaagtactctacgtctgttttttaataaatgacaccgatagtttttttttttccttgaactaaaaccaacaatatttattcaattagttatttaattagagcgaaaaaaataccagtacattcgtcatcaaaacactttacacatgtctagtatgtttaatctatttgcacaaatattcctagaaaaaacatggatagtaaacaaatttaaaaagtcaactcaatcatatattaagaatcggaggttgtaattggtaagaaaggtaatgggatgactggagtattcaagattcaaaatgcaaactgtattccttccgtaaaagctaagcacgaatttgagaggttgatttctcatttgaattcatgcgtaacacagtagcatgtggtctgcacacgattcacaccaattgatggcttgatgttacagtaccttccaagtctttttctccccttatactagcaggttagcaggttttccttccaacagtaaacgataattgttgttacatgtactactccaacagtaaacgatattcgatattttggagtactatttactctctgctccaatgaataaatcaggacatcaggtgcgcctcttatatactcctatataaaagaaagctcagcagagagaattagtatagcaactcatcagtaatcattggctcattgcaggagcaagaaccatctt

SEQ ID NO: 35289 - DNA, 1177 bp, Oryza sativa
ggcccacatggcccacctttattaattattgtttttatgtaactgacctatgggtcccacgggtattgttttttctcaaatcgagttgtcacttaagcgccacatcagtgccacgtagcatggagacctagttaaactagccacgtagacaccacgtcagccaaaaccgctatgtgccggtttttgtaagtttggagacgggtagtatccggttttggagtttagggatgaaaatcggactgggcgacgaatagagggacttaaagtgaacttattcctttgccgaacccgcgcgtcgatcgtgcgtgcacacgcgtctcgcaatcctccacaaactccggccgtattctgcacgttgatgttggcctctggcggtccaacaccagcactgacccaagccatccagatacgggtacgggccggttgcgcctgcgtttcctacctgatcgcgacgggaaaaccaatggcgatcggcgaccgggacgaccatccgtttatctgtaccttgaaggcgacccgtgcgcacgacgctcgccgccgcttcctgtactgtctttacccaatcctgcaccggaaacaggagagagagagagagagagagctagtaggaaccggggcaacttcacgacggcttccatatgctccccgttctagttgcttgtaccagtagtactttcatttctcaccaggaaggctacaccctcagtcccaaaaaagaattaaactctagggatggatgaggactgccgtttttgtgaaagtttggggacgcaaacgcaacccattggctcttggcaaatgcaacagtcagtgtcatcatctttctgagggcgacatacgtacccatccgatccggaacgaccgagaccgttccagaatccagagtccgtggcttctgccttatgtgaacttgtggtatctcagtacggatacgtctgagctccgtcttgatgggagcagcattaataaactttcttactgatgatttagtgcttagagcttcttcagtttttgctgaaatcaacctaaccgatatttagcgttaccaaattttggcacattttaatgttgtcaaattttcatagcattagttgcatttagtttgtagccctatcaaaatttggtagtgtttatataagaagaaacttttgaaatgctaaattttggtagaacagca

SEQ ID NO: 35290 - DNA, 644 bp, Oryza sativa
ctcgtggacgatccgcactagctcccatgtattgaaatgtggcacattagctttgatcccatctactaattggctctattgatttgcgtgcacacatgacgcacgtacacgtacccatgcatgcatgcatgcatcctaattaatagttagttaatgcatgcatcatcctagctaattagtaattagttatatgtatgcatgcatatagccgaacttaattagttactactaggatgttaatgattcagctatatgtgatgtatgtgtatgcccgccgatgcgatgcatggtcgcgcatccgacgatccgctccggccgcctcctaactccaccgatttcctttcctccaacccaccggccgtcttcttttgtttgtttggttagcttaattagtccctcaacctcaagagacgcggaattaatccctctcaagttacttcttgacaggtaaatatgtattaatgttctctaatcatccttaatctctatctagctattattataggaaaagaagctggatccctaccacctcaaccgcaaccgcaccggtgtggtcgtcacgtctgtcggagtcggagcccaagttgcattggtgcgaccgcgagtccgaccgacgcactaatcttgcggcgaatgaccgggga

SEQ ID NO: 35291 - DNA, 643 bp, Oryza sativa
aaaaatttctttcaattaaaattgcacgacattgctaaaccctaaaattgctgcaattttatttcactttactgtgattttcttgttatatatggttttactttatttttatgtatttggtttttttcatgtacttctgtaaaattttattaattataagtttgtttcatgtcatttgtaaatttttacatgttagaataatttattgttcaatcatttgggaatttatgagaaccataagattattagtatcatccaaggatgagaaatgtaactgtatttttgaaaaatccagacgcctgaaatgtccactccctgaaggaaaatgtaagcaaatttgaaatcactacttaagagcttttgcacgtagttttgtaaagttttattaattataagtttgtttcgtgtcatttgtaaatttttatatgttagaataatttatttttcaatcatttggggatttatgagaaccataagattattagtaccatccaaggatgagaaatgtaactgtatcttttgaaaaatccagacacctgaaatgtacactccctgaagaaaaatgtaagcaaatttgaaatcactactaataagcagcttttggaaagtccaaaaatatagtggaccgtagagactcccctct

SEQ ID NO: 35292 - DNA, 873 bp, Oryza sativa
tggtttggattttagatgtgattaagtagcctcaactggtttggtgaactgtgtataatggagatggggtgggttggatttggattggatttctgcccattagcaggctgtgacaagtcgattgactggacgaggaatagtaaccctgcacattgtgaagttcagatgatgttgcgagggtccattttcagcttataggtttatgttagcagaccagaccatgtcgcactgaattgccatttggcttacaaaaagtgggcaatgattaattatctattagtaatgtgttaaccaggatagaatctcattatggtgttggctttatatctttggtcgaaaaaaaaggggatataatctcatatttttctttttcataccatattgagttttgcaagggttttgtgcaccgaggattagtttagattaccagaaatcaaattaatgagaggataatttagaactccatagaattcatctgaaaatcatgcaaatttcatgtaaaacttgtgttccaaattgaccttgagccccgctcacacacgccctgccgtgcacgtcgtgatacctgtttttacctgtcaaaccattcactttcctgtcatttcggcctatatcggcctctatggtttccaaattccaagtctcctgccataaccaaatagcccccgattggccaatcatttagtgatcgtctatgttggttgacttgactcggtacaaggtaagctggaaacacatgaacagtagtgcaaggtaggagcacgaaacacccagcctcgcggttgcggtctccggcgagtctagtattcgggagtctagttttggggtgaattcaattgaggttgctacagtttaatttgtttattttatcaa

SEQ ID NO: 35293 - DNA, 522 bp, Oryza sativa
tttgtcgatttttgggccatatgatttgcgtggagatttgtgctaactaatacgatggataaaagagacaagtctgtgcgtagcgggggatcgattccaagagcactagttttccctgttaaacgtacaccacagagcaattaagccaagtgggttcaagacaaaataaagtttatattgaagttacagtgttagaaaactaaaattacaatgtaattatactatagttacatgtatgtaaatatggtgcaattatagtgtaacaataatataattaaaattacagtgcaattatactataattacatatgtaactatggtgtaattataatgtaacaacaatgtaattaaaattacagtgcaattataccataattacatatgtaactatggtgtaattatagtgtaacaacaatgtaattaaaattacagtgtaactataccataattacatttgtaactatggtgtaattatagtgtaacaacaatgtaactttagtagatggattggtaatatctttg

SEQ ID NO: 35294 - DNA, 612 bp, Oryza sativa
aactgttatttcataacatattcacgaatctatttctccacaagacgacaagtaatttattcaaaactgtaggttgtaaaatgttaaatacttgcattcctaaagcctagaatttaaacctttggacattttttgcatgcatgatacaaagttcaaaccaatcatttgattgccacacagtagcgctgtaaccattagcatcctaaatctagcaagacatgattactaacccaaaatttgctaaagaagacaacctaatgcaaacggagagagaatggcgcacagctcagttgccagatagctgccaagagctttgcgccagcctgcgttcgatgacgtagccactcatcacctccattttcttaataattgataccgcattcctccttgatatcccacatttatcccagctaatgcaaaaaggaactttataactcgatagtaccttcaatatttgggcattcccgtctctgcactccatgccacagagcccacatataggcgccatcccaggcgcccactctccaaatacatcactatacaaggtcagcggcggcaaacggaatccgttctcgttgccccctcctcccttctcctccgcgaagtacgacg

SEQ ID NO: 35295 - DNA, 775 bp, Oryza sativa
atcccgtaaatcaggaaccatgcaagtattagatcatagatcgttaccactcgacgtgctgcgcagcagaagaagacgctgagaagtcgaaggaactctcgcgaagtagcgcgcgtcgatgtagaggaagtagtcgatcgcaccggctcgaccttctcctcgtgcgttctcctcaccgtacttccacgccgatcagcaccgcaaaccagcggcgcctctaccggtatccacacgcatagggacggaacgccacgcgtagatgtgctagcatgcacgcgcggctagggttttgctcgggaagggaagtgacggctagggtttctcacgtgatgcaatgcctccgccggtcacacccctcacgaatatataggatccatcactcgggcctctaaggcccgtaggactcctattcggatccctatccgaattaagctcatattgggtctctatccaatccccttattccggcccattaagcttgcgaccctgtaggttcatatatactcggttgtaacctaaaaactcattttcggtccacgcgtcaacagcggcccctagcagaacgtattgacccaccgggtatacataaagatcatatcggctgaacctctagtgtatacttgtatgaacccctttgcctcacgatatcgattgagctcaaggctaaatatgtgacattctctaatagctcaatcattcactcgaacttgttgatagattatataacttgtgattgactcctcaatcacctttggcatggccatgcacttccata

SEQ ID NO: 35296 - DNA, 669 bp, Oryza sativa
gctgctacattaattccttgccagcttaattgggcggaataataaactaacaccttgatttccccaacagttttttctatccaagcgattctttccgctgaaattaaacaatctaaacctaccgacgctaaattaagtaggtgtatagtccgatcaactgagcgcacgaaacgtggggagagaaatcgttcgttcttagacctaccaacagtggcctgcctggagacttgctcgccgagcttgacgacctcagaccactccgtccgctccaagccgccgggagccgcctccgccatcatctgagaacccaaagtaaataagcacgccgccgcgccgtgagttaccgtgggattggaggcttagagccgtgctatgaccccatcgggatagagagactcgggtgccaaacctggaaggtgtcgttgatggtctggaggtgcgactgcaggaagcgggacagctcgccgccgcccgccggcttcttcgccgctccacctctcctcggcatggcaggcagctaccgcctcgtcgcgtcgcgccggcgaagaagagagggagaggaagagggatgcgagccgcggcgaggcggcggcggcggcggcgggggcggaagggtttatttcgttagggcttttgggggaagttgggcttggccggttggccctcctg

SEQ ID NO: 35297 - DNA, 1825 bp, Oryza sativa
gaggaggagcctaagaggggtgtgtgtgatttgtgaaagagatgggaaagttaaagaaaatattttttttttgtgtctcgcaaacttttacattagggtccttgcaagattggaaatagagcataagaaaagtatattggagggaagttattatacgtttattgtgatatggaattactctcccttaattttgtttaattctcttcaaatcaaacaaactgacctatcttttttcgtttatgtttatacttatcagccaaaatttaaatttttaaccttaaatttaaacctggttttgaggttttcttatcaaagtttagttttcagtctttacttttatgcccctgagaacacgtatataaaagttttattaataaattacttctagtttacaaatatttccacgaataagccaaacaatgaagccaaaagacatgctaggttcactgaccggtttaattttcttggtttaatactttaatcgccatcgggtctggaccgcaaggaatggttcctttggtgtctcttgtggaacacaatttttaaacatgtggtagtagtacggacatgatcattatagaagagctgtgcacgccttacgatgtccatgttgattagaaaaccagctgcaaatctggatctttttcaaagcttcatcagatccttggtttacaaggagagattagccaataatcacatgctaatgctcaatgagaacaacaaaagaaaccagtactagtacgagcactacaattttcgagaaagtgtagggtggtatgtgcaaatatggtcctttaatcggagccccggcccatcagcacgggcagggggggacgggcccggtcggcggaagcccccccctttaattcgaaagacacggtcacgggcggagcgaggccgaccgtccgatggggagtggcagaggccgcacggcgcggggagggtcgtacacgtgtccggccgagccgggcggtgcggccgccggcacaatcgatggcgagcaaacgtcacgggtggcggtgggcacggaccaccctgacgggcccccgtgccgtccgtctcgctgctctttccatcgctcggtcgccgacaggtggggaccgtgagacggcgtgagagcctagatgtttcctgagtgggtatgtgcctgttcaattcagataattgtcaagatcaatctttcaaattttaacttttagttacttggtataattttcaaactttgatagtatagaataaaaatatgttgtgccaaaatttcttatgcactatcactatttggtacttcctccgtttcacaatgtaagtcattctagcatttcccatattcataatgatgttaatgaatctagatagatatatatgtttagattcattagcatcaatatgaatgtgaaaaatattagaatgacttacattgtgaaacggaaggagtacataaactaaatgcaactatattttttttaattttactaaatattggtatgatttaaaatgacactaatttaaacggccctatgacttctgattcacggtaacatcttcggatacatgtgtgtgtgagagagaggatcagcgatattttcttgtagtcatatcgcccgcaatcaatggcgctgatcggtattgctggctgcagccagcctaatgcaagttcattttctaccgctgcaacaggatgcccagcttgctggctgcaacaaccagcagaaacgatcagcgccaatatggtggtggtctggctgcatgatctgcaatgaaataatagcagtagttccttgcttgatccatggggaattggggatggacgtgcaatgagtagagt

SEQ ID NO: 35298 - DNA, 689 bp, Oryza sativa
aaattccaggagaaaaatcattgcatgcttccgtgtacaacagtgcatagcaggtagtacaacttgatcgctgatcacatgcagttagtgcatcacgtgtgcactacaatcattttttccactggggcagacgttggacgacaacctgcgaaaataaataataataataaaaccgtttaaatctcactgaaatcatggtgaataaatgcattttcgtgggccaaattttgggtgataagcatgagcgaaaagacccttcgttcttgtggtatacttgtagtcttgtactgatttattcacaaaaaaaaaagagacattttcataaggactcttttggagtagcataataatgagaatagttcaacgtgttaaggaacatgccttgccggaattttctttgtttccaacaatagtctgacaagcaagcctccatgactccggtttctggcatatagacaagaaatacaaatagcagtcaattggcagctgttttggtgtaatcagaaaagcatatagcaacagaaagttcagaaaacagggaagcccagaaacagcattgcccaactgaaaaaaacctgaaatggaatgcttggtaccttcttcagataccggttctcagggtttgttctttcattcaggagctccttgccatcaactatctgtgtcacattgacaattccaagctgtgg

SEQ ID NO: 35299 - DNA, 514 bp, Oryza sativa
agctacaaaatcttcccatagattcaaggtccggccataacaaaaagtaaagtggatatagtgtacgtatcatccagcccagattttcttccttaaaaaaagagagaaaaaaattagtccgttctactgcaacctttgcaacgacaaagtcaggtcgtcagatcgagtaactaattaatcatgcaaatatccactgatctaaaacttcgccatcagttgatcccttcacggtttcgactagcctgcgtccgcccacaaatatagcgaaggaatcacacattgttttttttttttgatgcgtcacacattgttaatttggactttaaatgacatgacatgacatggttacaaaactaacacacgttcatgcgtgcatattacttacagaataatccaagttggcatcaatgggttaatattctgcaactcctgcattagaatatgatagtgtattagtgtgcggcgacgtttatgccctggctcgcaattaccttcaaactgatcacaattatat

SEQ ID NO: 35300 - DNA, 624 bp, Oryza sativa
gcaaatctttaatttcgttgcttgacattgtcttgcgagggatcaagtttcagttttggttaaaaatatggcaccacattttttttacttgttcttaatcactcttcccctatgcgattgttacttttaaccatagttctctttatatagcgtgtattacccgtcaacaacgaggcgtctgtggtgactttgtcaatctccaagatttaccggtccagccttcaaagatgctcataggggtagggtttgtgtgcgtgcgttcataagggtgagggtgcgtgtgtgttgtgagtgtctgcgttgtattgtgtagttctaaaaaaaacgtaattataaaaagacagtgcaattacgtagtaaatataggtaatttattgtgtaaaaacgatttgataatatattttgaaaaatgtggtatgataaatatagctagttccattaagttttagtccatgtttaacatatatttgtacctcgttcgtgtttccttcatacgcatagcagtaacttatgttttgcattttacaaagcagttacgatgagtaggtcattgtagctcatttacatatggagggttgtgattttgttagtaccttgacattgactcaaagcggcacatctcgg

SEQ ID NO: 35301 - DNA, 718 bp, Oryza sativa
cacacaaactttcaacttttccatcacatcgttctaatttttactttcaattttagcgttgaactaaacacagccataaaaccaaagcacattaagttcaaaagctacataccaaaagccatcatcaactgacggatgaatgcatcgcttattcgcttcattgcttgagttaaattaatcgcaagtttaagctagctagctagctagctggggagttcccacggactgatcaaatagcagaccaatctaagtaaacttttcatcgagcaccttgtgtgcatcggccaaagcatagcgaagatcctggcatgcatgcttggagcaatcctgacatggcctctgcagagagaagaataaggatgtggtggcgcacagctagaaggcctaagcatctatggggtcgccggagcatgctctacatgggccacagccgcatctacacggaccactactacgaccccatcgagctccagggcagccgccgccactgctgtgagtctacatggcactgacctcaatggttccatttgagtttcatggctttcgccgccgccaccgccgcgtggaaccagggcgcctctttgtgatggctggcgacgaggggttagcgctggccggatttgggatgggctgaccggtgatgctgtgatctctttatacctagtggtgtgccgcaatctgtgaatggggaagaaacggaggggattgggaggagacg

SEQ ID NO: 35302 - DNA, 630 bp, Oryza sativa
accgcaccatcatcaatgtcacgtgccaacttctactttttagtacactatgttagtgtatatttggattaggtaactcttgtttctatatcagtatgacagtgttgaaatatacaaccatcagattgacagagttttgatcaaccatgcgtgccatcatgcctaaagttgtttgagcaatggttttctgtttcttttctcatcatttcgggcatgctcctgttggatgctcttgttggtcctcttgaaggagtcatgagctgactgattaaccatgcgtgcagtcatgcctaaagttgtttgagcaatggtttttctgtttcttttctcatcatttcgggcatgatcctgttagatgcttttgttggtcctcttgaaggagccatgagctgacctactttcccgcttgccacatacagatggcaactttgatgatgagtactttaagggaacagaagaatcaaatcagtttcgtcgggaatatgagatgcgcaaaatgaaacaggtaatatattaattccccgaacacgcttttcttccttttcatttttggctactgctggaagtgggatttcttatgtaaggtgacctgtgtatggaattgaaattctgcaggatgaaggtttggat

SEQ ID NO: 35303 - DNA, 551 bp, Oryza sativa
gttattttttttaacggaaaacaacacgagtgccttttcattgaattgaacatgagaaaatataaccccaagggacaaagggaaaaagagaagcactatagatgtacactatacagaatgcgggattaactcacgcaaccgtttggcccctgctaaagtccaaaggctaacctcctctttgattctcgttagcagaaaactcgttgccacctctttatgatcaaagatccgccgatttctctctttcagatttcccagacgactaataggatgagcgatcgaagcccccttcttgggacactaggagtgtttgcgaggctctcccactattgtttgacagactgggtttcctcccattcagtcggctccagctgttgatagcccacccatgcagagacaaggtgccaaatcatcttggtatatctacaagtggcaacgaggtgcagtgccgtcttagcctcgcggcagtaaaaagagcaacaaccgttattttgccaccccctaatcgcaagcgacctgatgtccagactctattctggatgataagccaa

SEQ ID NO: 35304 - DNA, 724 bp, Oryza sativa
  unsure (1)..(724): unsure at all n locations
cgtggggnnngggaatgtatacgactactatagggcgaatttggctcggtacccacaagcacaagttccatttcccatcttgctctctccaagttaatagtagtagccttttttgtagtcaaaatttaaaatctgaaactttgattttaggattttttttttcttatcatagtctatttatcaaccataatttgttagccgctaattatacatgtataagttaatgttttacatatgaattattttcagttgcttcgtttatttatctttacacggctgaggcttatcacccgtagctcaaccaattagtgccgttaaaatttcgcaacaggatgtgaaattatattatttttttaaaaaaaaagattataagataaaggtaagattgtacagtcacactagcttgcctagtgttgagacatttgttagggccttagggcatgtttgcttcgtgccctgaaaaatttgtctaactcaagcacaactctcaggcgtccgattttgtgcgcccgcgactggatcgacctgcctgagcgaaagcccccggaccagggcagaaacccaataagcccttaaccctttgcagtgctttctttgcacaatatggaatgtgtaaccagcagtgaaaggaattttgcattggacatccctgttattttgggttgttaagacacaacaatgaaattaaaagtggtcccatttcatactgtccaattagattgac

SEQ ID NO: 35305 - DNA, 530 bp, Oryza sativa
cgcggccagttgatatccgattactataggccgaattcgagctcggtacccatgcagaatccgctctaactcgtgctttgagctccctgtctcatatatgatgttgttcaccataggtcatttcttaacacaagttttttttttatcaatggacatggagtgatattttttaaaccaactccgtgcaaatttaactgcatttaactacctctaatttaaatcgcatgaaatttagaaactaaatatattacttaggtgaaaaattaaagccgtccattttttgaacttatcaaattcaaggtggaatcatgtattacattaggttcatctctcaatttaaagcatgtttgggaagaaacatatttcacaaattgcacagttaagggcctagctagcagcagggctccttcagaacatatacaaaaatttcaggatttttacacgaattacttcaattttcataaaaggaatctctaaaatttctccattccaaaggaagcctaatattgcgcggaatatatgacgaatct

SEQ ID NO: 35306 - DNA, 709 bp, Oryza sativa
cgtactgcaacagcggaatgagcacccgcatcggctgggcaccgcagggtacatcggcaaggaggcaatatgggcccaagaagatgcagccgctgcagcagcgaatgtccctgccccgttttcagacatccctgaacaaagagctcgcaactgggcgcgggcaaggggtaaggtcaacccggacggctctgtcacatttgagaacaaaagtgatgccgtcgtctatcaggaactggtgagttcactacttaacctaactaatttccgttcgtataaagtacaagttcgtataaactactatcttcttttctagttgggcttggttgctgaacaagcttcacaaagcgaggttgagtccgcgccgaagaggcgcgaagatgacatcctcacaaaggcgctcggaaccaaagaacatcctagccgaactcggggaattggtagcgatgtgccctagaagcatggactccctcagtacagctcccaatacaggaaacggaaagtctccaaggaagagagggacgctcgtttgaaggccgaacttaaggttgaggtcattcaagaactagaagctagcatgaatgcaagggtggaagaaagggttaacaaggtgctcgccgacatgaatatacccccagtcacaacacctgctgtgcaaccaactcctcgtgtacaacacgacgcgagtccgtcacagctgatgaactactgt

SEQ ID NO: 35307 - DNA, 720 bp, Oryza sativa
tagtgtaaaggcttcgttatgacctctagatcacattcaacatgaagagtgtgatggagtcttgcaaactcaaaacaaactagagagttcatatcatgtgggtaaagctgtacaaactctgcagagttctttaaactaatcgattagccgtgctcacggtcatgagcgctttggtgatgtgtcatgagtatagactttatgatttaaaatgtgaacatgtgacttgatttgaaattgataaaatgtgttgagttgtgtgagtgtgatgatatattatgacttgttgtcaaggatgacaacaagagattgattatgatggaattatgatgaacttaatgttaaaacttaaaacttgttttgttaattgaagcatcaactcttttacaaaagaattgcgaaacaaaacttgctttatgctgaaaatgatctacatattgccttcctttgaatatatgccttacatgtagtatggtaggattgacttgtgcttgccagtacattaacttgtttaatgtactgactcttgctgttgatataaccttttgtttgcaggtttagtcttagtctttgagtgatgcgggttccgattgcttcttctaggatgagaacttaatggggtaaacccctagtcggtgtgcctgtgattgggtagtcaagcttccgctgctctctaataagtctatttggccggttggcctatgttgatgaactactgtacca

SEQ ID NO: 35308 - DNA, 676 bp, Oryza sativa
  unsure (1)..(676): unsure at all n locations
accacaggagccggagatcaggatcccattctttaaaggggctttcaaggggcttgggggggcctttggcggttgctccggcttgtgggggggggcccctttttcttctgaagccttttgcggggaaagagggccgcccggctgacacaacctagcattcncccgggggggggggggggggggtgggcccccggggacccccttttgggtccaaagtcccaaaaggttaggtttaccccggggcactccccaccacaattttaggtttcagtccggaggaacgcccgccccttagggtttgggtgctgcgggttttagcgtcggggggccccgcgaagctggagagctgcttcgtcgaggagacgtggttggaggcgctttccgggggagctgcacaaaccttcggcgctcgagctctgccgcttcgtcgcccacgagaggttgcatagcccggtgcccgtctaccccccgccgcatctagtcttccacgcgcttcacgccaccccgttcgaccgtgttaaggccgtcatcatcgggcaggtatggcatcctcccccattttctctcgtcactccataagccaatccattggcgtggatttctgtgctaaaagaaggtatccttttcaaatatacatagcagcgtaaacttgtggccatttgaccttgggtaccta

SEQ ID NO: 35309 - DNA, 628 bp, Oryza sativa
tccctcctcctccccttccccccgcccccggccccgccacgcgctccacatcccgagcggcgtccccgccggcccgccaccgccagcgacggtcgagcatgcagccgcgggtggctgcagggcgcctgcggcgggcgcctcgcgcgcgcgcagcacccgggggctcggcgctatgagcgccattgttcggggacccggcgcccgcgctgcgcgttggtcggcggcggcgatccggtgaggcggtgagcgaactgttcgtggcagtggcggcggcgggaagcctgagcttatccgtattgctgcgcttgcgtagagaggagaggagaggagagaagaggaggggtggagcgcccgccgacggccaggtggggtaggaagggacaaaagcgttggcgtctgggcgactgggccctaccggatcgcggaaatatctcgagattttttagtgggaataagttcacttcaggaccctcaaaagtgaccaatctaattcatgaccttaaaccgtaaaaccggatatcttcaccccccaaactattgaaaccggtgcaatttgactcccttggtggttttggatgacggcttcgctgacgtggcgctgacgtggcagtattgactcggtcttctt

SEQ ID NO: 35310 - DNA, 579 bp, Oryza sativa
gcccttggattccggtcaccgtcggatgtgccccgagcacatactatcagcggaccaaatgttgtaccaacgtgatcgaggtgtgggtcaccgctggcgtggcggcgatcggcttccgcttgccgcttgcgctgtgcgtgcgcgtagccgggccgaggggcaccaccaccattgttgcggcgagagtccttggtggtaataatggtggccggagaggaccagagagagatgttgcactgcatcccctctggccccctgcatcgtgagatgacaatgcaatgccaatgccattgccgccaagtactactgctctgctgctgctgctgctgctgctgctgctaccggggtcccccacccagccagcctgcagcctgcccctgcttccgtgttgcattgccttctcctatgtggatgggagatgaaattattcccatggctccctttttccgatttactctatatcgagtaaatcggaaaaggggagccatgggaatattttcatctcccatccacatcggagaaggcaatgcaacacggaagcaggggcaggctgcaggctggctgggtgggggaccctgg

SEQ ID NO: 35311 - DNA, 679 bp, Oryza sativa
atagctatatggagggtagaccatgaagggaccatgataacgtaagactcttgccttggatacatctagagactgcttgtgtggctttgttcaaagccattataatggcgtggttcacacacttactttgttgggctaagatccaaagtgtgctaacttgtgtatatatatatatatataccaattgtgtatcgagatacatgtgacaccttatatcaatgcagtgtccctactagtagatatagcagccaacattctatatacatgtgcttgctgagcaagcaaacatctatgcccctttgtttatgaacaactgaactgaactgcagtctgaacatatatgctactatgcctaaaatgctgtaacattgaagaattgaatcaaagccgtgcttactgctcaagctctacataggtcatcaagcttggtgtttcttacaccgaggtgaatattaataacacgttgacgcactttaacatccgcggtgtacgtgacggacaccttggggacacatgatcatgacattttctgctttatgacccaaaaatctgcgaattcacgcaaagctagaacctactggtgatgggaccagactgtgtgtaacgttaatcctctctactaaatatgggggtggttatttgactgaacaggtccgggaactttatttccaattgagga

SEQ ID NO: 35312 - DNA, 895 bp, Oryza sativa
  unsure (1)..(895): unsure at all n locations
acaccactcctctggtctatcgatatgttgttgctttngcacagttttcgcattctaaactatgcgtatggtatagaataggtaagtgatgttantcnnnncnnnnnnnnnaggttgaagccagctangaaagcnattatatagtttccactcttgaatacccaagcttgcatacctgaaggtanactttagaggatcnnatgaactatatgttcccatttccttctgagtctgttcaagttcaccattgttatcacataaaacctatcaaagaaattatcaaccatctgaaaatactcaacaagcaacaacaaaattattgagaccattaaaaagggcaacatggaaatttagctaactcagaaaatctcacattttatgatcaaagttgcagaaaaccacatatattatgatgtgtggcacacaaccacatgtattatggtctaaatatttcataaaaccccacatttattgaaatcttgattaaggccccgtttgatcatccgtttggcagatagatttttgacgcaaaacgagaaatctcattagcacatgattaattaagtattaagtattataaatttcaaaaatgaatttatttgcttttttaaacaacttatgtataaaaacttttttaaaaaacgcaccatttaacggtttgaaaagcgtgctaacggaaaacgagaaagttgaagtttgaagttgaaaaatagaactaggcctaattttgcatatcttgaacaattcttttgaattagtaaaaattttaattatcaaccttagtcaagaacttaaaaattaaaattttcatgtacacactatgatttagaattgaagtaatctgtgctcaaaatgcataagggtaggggtttgtcaaactttagaactgttatac

SEQ ID NO: 35313 - DNA, 572 bp, Oryza sativa
cgggtggtctattcagtttggaataaggtgaggtacggattagaagtacggatgatgaatatatagatgtggtacaagtagcccagcaaagttttcgtttttttattagtggaacagtcgattcgtttagtgctaagaatacacgaaagaatttagttactgtcatgactttcttttataaatagagaatatttataaccgatagaaaatatattaatctcttatacagctggctaaaaaagatctaagttttactaagcctgttagcgaattgataatgtctacaactgctcaaatcgattaccaaattattgaatacctttttaaaacaaaaaaaaaactccacctccctaatcgtccaaacaaggtagcattcaattaagcaacctcacatatgatgtacaaatccgttttttccggcttttcgctaacgcggttgatttagaattcacatcgcccttgcttctatacttaaccatttccgttcgtccattttgttagatgcacaggttgctggcaactacaccgctggcaacatcgagagcactgtaaacagatcaggggttatgatt

SEQ ID NO: 35314 - DNA, 615 bp, Oryza sativa
aattcctgcagccccaactcaattttagaagttttgagccatttaaatggatttctagaagttaaaccgaatttattgcgcaattaaagctatttatggcgtcagccgaggggattaggtggcgccgacacgcagccccacctgtcggtgagggggagggcgcacggtggaccgagttcacgcgcacaccatctgcgggtgcaccacgtggtggccatggcggacaggtaggcggaggtggcaccgacgtggcgtcacgtgggagctgacacggggcggcaccgaggggccacgtggatggcccagattgccccaaagggggatcaggcagccatggcgagcgggaggcggcgaatgcggcggcggcctcgggttcgcagtggaggtggtgattcggtggcggattggggaaatggagcaaaggccggcatgcggcgaggcgcggcggagctagtggtggcggcggctagagcggcggtggcgtgcggtcgaagctcagcggagggtggcagagatggagggtagcgtggggagcacgggaggtggtgtggggagctcgggcaaatggggagaaggggagaggctgccccggggagtatttttgataggctcggg

SEQ ID NO: 35315 - DNA, 609 bp, Oryza sativa
cagaatttgataattcagaacgaaaaacgtactggcgttttcagagtccatctagaattcatcatgtatcccaaaaactacttttgcatccgtatccctaatttcaaaatgaaaccactacaaccaacgcgtttaaatttcaaaattcaccactcacaattctcattggatctctctgttatttgccagaatccgagccccgacagctcgtacttggccacacgaccgggaagctactgacacttgggtttccaattctaaaaccggcacgaaattagcataccatgcaagctctctcctaattactgcagcatttacgacaaaagcccttttccaaagtagcccccaacccagcctcacatccctgacaaagaaacaaacagaaaggcgagctaccttagcctttgctgcttgtcctcattagtacttcaccactgtaattagagctaggtcagttcactgcacaacatttatctttccccctactttggcaaaaaaaaaagttaattagaacactacaaaattcatgtaaaattttaaacttatcgtattccaaactgccatttctgagtaaaaaaaattaagagagagagaaatgaagtgaagtga

SEQ ID NO: 35316 - DNA, 528 bp, Oryza sativa
gttcggtggagctcgttagtttagtcgatcgtgctgctcaccctagagcttttcccccttttgtttaatggagaaaaactcataagcatactgtttctgttgttagcttagctgtctattgggatttcttttggagagtttagatgcagcaacaagtagagtgctaggataggctattatttatcatttgtttatctgtggctgtgatcaatatggagcatcttcaccactacctgactgtaaataagtaattgatagtgttgactaattggaaacgtcactatcaattgatagtattgtcgatttctatgtatgttctccccttcaatctgaattaaacttaggctggcccgggtgaaaaagataatgctgaccaatctgtagaccctttgaccactgtgttttcatcaatacatatacaaatacttagatctcggcactactataaatgtatggcgcgaaatgaatcttacaatgtgttttttctttcacaaaacaaagcggctgaaattattgtcggtcaaattt

SEQ ID NO: 35317 - DNA, 670 bp, Oryza sativa
actagtggatcccctttttatggacgtcgcaggaatctcttgaagcaaatgccgcagcaatcgatggtgaaagccttcaccagtgggcagtggcaacaacactgcatgaccccatcgtcactaccaaacccttcagcacctgttatgtgttcaaggtgacggtgagatgccattgttgtgaattgactgctgctgtttacttacaggaatgatgaggaaatcctccagttagttagccacgactagtaccacactaccaccaatggttgccatgtagtgcatagtgctgatcattagatcggcggtgggggagatcgcgtgcgggcgggcgatgccggcgctggcgtcgccacgggcgggcgacgcgatccgtgcccgccgtccgccgccatcgtcccgctccccgtcccgacggagctccgcctccagtacctcgccatgggcatctcgccgccgtcgccgacttgctcccctgctcccgcgtcgtctccgccgccgccgcgtcgcctgtcgccagccgtcgggccttctctcctctcccttcttgccccggcgacctcctcacgacccactggccggcctggtagaggagaaaagcgagagacagagagaaagaggaggaagtgaaaggagggaaggagagagagggtggtacgtggcatactgacag

SEQ ID NO: 35318 - DNA, 772 bp, Oryza sativa
acctgcacaggcacctgagccatgctatggaattcatatatcttctgcattagaggggtgctaaggcacaggatgagtattactgcgtattagggatactgtaaaccgtccgatcgagaacggaaggatcaagtcatgcgctacagtattttcgaccctatagttatagaaagcatcactgttcatggcattaattcactgcccttcacacgaacagactgtaaacgatccggatccatatgctatggcggcttggcctgagccgtccaatgggataaggtggatttcggttggactgtcattaccttaggactccggtctgtgcgtgcagtagtgttggggggcaatatatataaaagagtaaagtccatcaccggtccatatgcgtatcactcgatcgcacacatattcatgttttgtgcatgttgaatgaagggtccgtcgaaattaggttgtaaatgatctgcatcaatcaagctggacagaactttacaattagagaggatcctcatgtaacatgtgcattttcacttaatatggctatgtctagaacttcaaacgcgacaagtaaaagaacacggtaaaggtaacaggaaacattggtatgcgtgtgcttagtccttatagacaaaggcgccatgcattgtgcatttggtccccctgtgggggaaaaggatcttttgataccttataccccctataggagaatggtttgaagatcattcttgaaactttatagaattgggaatgaatgtaaagcattatttttatt

SEQ ID NO: 35319 - DNA, 556 bp, Oryza sativa
cgattcacactgtgatcatcgctctggtcatataactcatacagagtatggatgaaactgaaacgtgattgaaagaaaaaaaacagtcactttagaacaagtggtaatctaagttttaatcattgagttgtgaggtgatggggtcttcagttactagctagtatacaagtagtaactagttatggtaattggaggctagcaaaagaggacttggtgcctatgacatacttcaacaagtggtgagatcttcttgatttcatggttgaataattatccttgagaccttgacaagatggcctgcttgatgtttttttttgttaggaggggccaggttgatggtagtcttcctttctcaataatgggatcaaatgtgtaattagtgtttaacaggactctgataagcttttggaggatgtcaagtctcaaatgagtttgaaaaaaagattcatgtgattaagaatactaacaagccgtcttacattcattattgcctcggcctgcttttctctgaacctgatgcagccatgcagctacaacgcgtgaatgctgtcaccgt

SEQ ID NO: 35320 - DNA, 718 bp, Oryza sativa
ctcttgtaagtcgtaactcaagaaagaatcgatgaggaaattcttacaaaaagcacaatagcccaggaaaattcagcaggtacaaaaaaaaaatctaggcctaagggccatgatgaatgaagattaaaagaacagtcctaaaaaaaggtactaacctatttgcaaataagaaacaatttgtttgtttggtaacataccttgcccatgatgcttggctgtcggctcagtccaacccactcatatgtttaccgtcaaagtaacggactgtgtgcatccccgcccatatacctgaataagaatattagcatttcagccaaaatatttagatgaagctgaacacataaaacactccatagcctactgctaagagtgaggcttatatggcagatttgttcttcctccattcacatttacttgtcacttttgaccctaacgtgcatatgcaggtactctttcaataactggttactgaaatagaaagattgctttcaacccatgaactgatagaagaagataaattatattacttcataaacagtaagtgtttaatgtcagcagtatgcatgtgcatcaggtctaagttttcttcttaaaactctcagatacatcacatcgctattcattttctatattatcatgttcagttgataagagttagatccaaacaaactgtataaaatatgcaaacccaaaaacactatattattttaatctgcct

SEQ ID NO: 35321 - DNA, 599 bp, Oryza sativa
gggtcgcgggttgagtacccaatgattgcgcgtattatattgggcgcttccccaatcctcgtgtaggctgtggctgtggctgccttttccttcgccggtgcgccgtcgattaatccgacgttgatcgatacattccatttccccatattcccaccactatcactttgcttgtaggagaaggaatggagcaaattaaggtttctttttccaaggcaaaaaagaaaagcgatcgagacgagcttgtgcatgccagcgtgttacgtgcccatgacgtatgtcgtcgagcgtggtggacactggacaggagcatgcagcaagcagcccatgcacgctacgctgacacgaccaattttgttcaaaaccgatcggaattcggcgccggttaatttgaaattgagctcgagaatgttcacgttctcgattaggctgacacgcaatgaggccgtgatgataaagttggtgggctgggcggagccgatcttgggcgtggcagacaagtatgatgagccctttcgatggctagattttgccgatcatgagaagcacattttatctgctccgttctgctttcgacgttgtatcctgtctggtttacacaa

SEQ ID NO: 35322 - DNA, 1928 bp, Oryza sativa
  unsure (1)..(1928): unsure at all n locations
agtttagagtaatctgacttaataatctagattacaggaattttaaactgaaacaaacaggaccgaaaaatatttaggtgagcgattattgttgattaattgaaagtatagtcattttaaatttaaaaacaggttaatgtatttcttttaaaaaataacttatctatattttaaaaacacaacatttaacaactaaggaaacatgcgcgtggaaaacagtcgctttccgttattctctcattctcacgaacgcacgaacactctcagtaatagtgagatcaatgaatcgtatatgtgcatctttcgtgtgcgcgcacccaaaaaaaaaaaaaactctgtaccacgtacagtcaacttgcatatcgcgaacagggaactcgccccgtaaggtgagtccgttcagtgtaccctcgccgccgtatcagcagcagcagcacatcgtcctcctcgtccattcgtccgtcctgttacgctgatttccgctgcgagcgccggtgatgaggtgacgacggtgtgacaccatttgactcaaacagcctctcctcgggcctcgtgccggtcaaatggcacggccggctccaagccggacatgccgncccgcccgcccgcgccacccgtggccgtcgcctgcgttccgcgggcttgggcccaaccccaaacaacacgtgccgatcgggacaggggccgcacgtacggcccggatcgctccggacgcggatcgtacagccagcgccgcggttgtcgccaccaccgtgtcttcctctccttatctgctagtactacgactacccgcggctaaccgagaaaacgaacaagcggaatcgaacaaattgagctcaccgtcgtcatagtagcttttacctaacgcttactctatttttttttcttctttaacaaggaccccatgcgattgcagtgtaggtagactggtgccgtcatttatccctgcccatgtatctagaccggatcgtttctacaaacaaatggtgtgctagatacggtcgaaaatgatcaaaaaaaaaaagagatacggtcgaaacctgcttaaattcggcaactgtttgctaaaaaatctgttcggcatgccgtatatgagtatttggtgcattttgggcgaatttttttcgaaaaatgtaaatgaaactcacgtgacatgcaccatcggagatacgcaaggagtttacatatttttttgtatgcattaattcggttctctaatatattttctacaaatttctttcttccaattttagtgctccctcaaaccgttcagttcatcgagtttaatgagatatctgaaatttatcttctcactagggctcatatttaaacaagatcaatttaacttataaacatttgggagtgttcggcaggccactgccacagctgcggctgcgcacagcgaggatggcactgttcatgccggctacgccgcagccacaaaaataatagccaacaggtcttttatattcaatataaacatttaaaggatatgaagctttgctaaacagagcaattataagccgccataatgcagaagctaccacaccaagacatccgtgtgtcaccagccacgtgacacggcgatgaatgggattttggatacaagacgcaaaaatacaacaaaggtagttggaactcggcgacgaaatccaccgtaccccgggttttgccagcccaggaacccccgcccgggaccctctgccagccagccccgttacaggtgcggtggccacccgcccacacgacggaccagcccaacaacgccgcggcgcctgcgcctcctctcggtctcgcggagtcggtggcgccgcggccgctgcggcgttgggcggcgcgcgcgcccccgaaggccgaagcgttacgtggaggccgcacgcacgccgaccccccctcccctcgtctccgtcgtcgtcatcatccactct

SEQ ID NO: 35323 - DNA, 717 bp, Oryza sativa
tttctgccgagcatttaatcatagtcttgtctctttttccactgagagaagaattatatgggatactaactaggaacttagtatcaaattaagaaagaagtaaaatatttctgctgagcatttaatcataggcaaaatggtgagcaccgagagcagggctcgaacgcaggtcacatggatataaggcaagatctttgccattgagctatgtgccagttctcaaggaaccacttgtttcatttatcatcttttgattcatgaccaaattagtcgatgggttgatgaaagactaatatttctcgtagaaggcaccttgctagttgcttggccacagcttgcagaagtgcgccgagacagaagttgatgctctttgttttgttagcttctcctttgccttagttagggatcagttcaagttgcaaaattaattgtcacggagttctctagtattggtattatgttggatatgttctttgttcctcatggcagtatgttatgatatcgaatctagcctaccagtttatagattgatcttgttagtgtctgttgtcaggatgtttggtgctaccccttttcaatatgcgataatagactagtagtgtagctgacacactttacgcaaatgtcacagacaaatttatgcccatcaattgaatgcgcagtaaaacaacgaattgggaatttttttaagaagaaagacccaagtttctcagattg

SEQ ID NO: 35324 - DNA, 550 bp, Oryza sativa
cgtcgggctgggcctgggtccaggcgtcgcccggcccccacagcaccagcaggtgcacgcccagcacggcggccgcaatcaggccaatgtttcgggggcgcatgcgacctcagtccagggcgcgctggcggcgcatggtcaggcccagcaccgccaggctgatcaccgcccccaggccgccgagcaccggaaacacgggaatgccgaacaggtgcacctgcgaggccagcagcgttgggccgatgcccaggatgaaggcgccggcgaccacggccagggacaggcgcgtggcggcgcgctccagggcggtggacaggcggtgcaggtggcgcacctccatgtccacgcccaggcgcccctgcttgaggcggtacatcagcaggcgcagggtcttgggcacatcggccgccatctcgtacatctgccggctggccgcgcgctgctcgcgcagcaggcgccgcggggtgtagcgggcgcgcatctgctcgcgcaccaggggcgcggcggtgcggatcacgtcgaagtccgggtccagctgcagcagcacgcg

SEQ ID NO: 35325 - DNA, 569 bp, Oryza sativa
gtgtgcaatctcgaagcaacgagtctgtgatgtcacctctgaccacgactgctttgagatgtggacatgcactgtttcttctgtacttggaatggcataggagatctctcagcttttcttttagctttcgtgatttctccattctttccgctgtgcacgcctgtgtgttttatatgttcaaattaagcagaaaactgtgacatgatgtttttgctattgtgcttaggtggtgtttggatccagtgacttaactttagtacttatatttagatactaatttagagtattaaatatatactacttccaaaactaattacataaatgaaagctaatttacgagataaattttttaagcataattaatctataattagagaatgtttactgtagcatcctaattatggattaattaggctcaatagattcgtctcgcaaattagttcagaattatggatgggttttattaatagtctacgtttaatatatataattagtgtccaaacattcgatgtgatagagattaagtttaagttttatcccatctaaacagggtgctagtttgagatgaa

SEQ ID NO: 35326 - DNA, 919 bp, Oryza sativa
tcgcccgccgccggccatgcgctgtccattgtcgcgccgcctgctgccgccgtgctggacgccgcccgacgagaggagggagcagagagatggggagagccggagagaggaggaagaagatattggattcggtcaacgacatgtggggcccacgtgggcccaccatatttattttgtgtagctgacatgtgggacccaccatttttaaaatattttttggggctgacatgtgggcccatgatttttattattttaccgagatataattgccacgtcagcgccacaccagcgccacgtgggatggagaccgagtcaaaatggccaaaaatggccaagtaggcgtcacgtcagccaaaaccgctattaaaaccgccgagggatctcgtttgactgatttttgtaagttggggatgggtcgtatacggttttgcggttcaaggatgaaaattagactggcgacaaataaagggaactcaagtgaacttattccaacgttgaaattgctcagtcattgggccgtcatgagcagtgggaaacgtcatcctgcacatgcggcctgcactaccagcccactagttgttgggccatttgaggctttgaacgcagtgtgctcggagaaggaaagctgattagctgagcctttggtattattcaggcccactcgtgtacattgccttcattgttacaagaacaacttcattgttaccaagaacaacttcgaacccgagcagggaggtcagttttctgctatctgttaactagttctatctggtatgcatctgatatatgctaatgatgctatgcaggtaaactgtaactcggatgttctccttcttttgataacaggtaactgtataacagaatgcttgaaacctgatgttcagtaaaccgtcatccagcagctaatcgaactgccgtc

SEQ ID NO: 35327 - DNA, 677 bp, Oryza sativa
aaccaacgcagcgtcagaatcgcctcatgcttcagatggtttatttatagcgataaccggataaggtagcggcgcaggcgggcgaaacaccgaacctttttcacttctccagacaaagagaccatggtgtgagacttcgaatgctggtgccacacagcttagacttgtttatgagaacttaaaattctaagaatctgagatttagagaagctaggctttttcaaaatatggtttctagtttactttttaaattctacagccatagatttttagaatctactaggtaataatatggactgtttatggactgtttagggaaactgaagcttttgtgagaagctgcagttgctaggaactaaacagacactcgattcaaagaccaccggcacaagtagatacaccaaatacacaggatatactaatgtagcatctgatttcagacaccacaatacatcagctgttacactgcatcagacattcagaactatctcatttcgcaagccaaatcatgaaaattgaggctgaacaagcatcccgcttacggatcataccatttaacttgcagaagtgcgcaaaaggattccggttagttacagtaatctagaccacaaacacaggacccatgactaataatgggttctcttggcctattgtttccggatcatacctattgtcac

SEQ ID NO: 35328 - DNA, 643 bp, Oryza sativa
acagctttaagagcttgggtgatagtatgctctgcaagatgctgcttaccttttgttcttgcaataatcctcgggctagtttttattactagtaccagctcagaaagagacaacagcagcgagcgcacacacacggacatggacatggcatgggcggatggtctctctccgacttcgtttccaagggccctgctgcacttgcaccctgcactgcacttgcttgcggttgccggcaatcgacgtgtgactgtacttgccgtcgtggaatcgtccgatttcacgaccaactcagcatcagcgatgacatgaacagtctgtgtgcatgtgtgatggattgagatcagggtgcacttcgatattgcaagtgcacactaaagaactgcaatgaatctgagcctttcatattttaatctaatggtacatgttcgctgctacgatatatataaattactattattacttgatatagtgaaatggagctacaataatgcattgatttgggcctgctttctcaaatctcaacacgtggtgttacactaacagctgcaccattcgtgtgtgatatatgatcatagtaaaggttactgattttgctttctagtgcatcaaaacatttgaagtcttgattgtgaagctatggatg

SEQ ID NO: 35329 - DNA, 655 bp, Oryza sativa
aaaaacaaattattattgttggttctaatttggtaagcctccaaggcttttaaattctggcattatcgaattttatattttgttgttacaatgatgatcagttaatctattgcttatctttatctgggcatcacagaagtaattcctgttataactctagaactaccatgcatagttgttactcaatcaaatcattaacatacgttgccgcgtgttatttagccatgtgctttagctctagcaacacttttgattcttctttatgagtttatttgttattaaaagaggaacgcttgaaccttataggtaagtagatttgttaatttatacaattatgtccctaccatgtacaatattttcttttcgagttcttgtgtagaacctttggttggttctttgctgatgaataacaagaattcagcatttattgagtttttacttacatttcatgtcaacttttcatcatttccaatggccagggaatgctttctgcttcagttttgtccatcatacctctgatacgcccatatcagtggcagagtctactcataccggtacgttgacgttgtgactttggatgaatcaaatttgagcagagctaagcaatgtatttgctctgatattctacattatttgtttccaggtcttgccaaac

SEQ ID NO: 35330 - DNA, 575 bp, Oryza sativa
aagtaattcgtaattcaaatgctaacatctgaagtgaaaaaaataaattatttattgtaacaatccttatattttaaaattgatggagtaattatgtgcttggaccttctagtacattcagtaaatatatactgtttagaatgatttttttctcttaaatatatcatggccataaatacgtttggtcatgcaagctactagtttcatgccgttcaatttggaggactggcactttcatgctgctttgtttagatacgatgtcatttcgaagaaaacaagtatccaaaccaacagattagtggatgctagcatttgacgacgacatgtttaaatcaagccgaattatgggtccaaacatggacatattcttcctatttgttgaaaacaacagcgtggaacatgagtacccgttccaacgccaaccgagtaatcggtccgatgctaccttggctgtgtttagttcagcgcaaagtttggattttgcctgaaattgaagatgatgtgactgaaaagttacgtgtgtatacacaggtggaggtggatgtgatggaaaatgattgaagtttggatgcaaa

SEQ ID NO: 35331 - DNA, 612 bp, Oryza sativa
ctccttttgtcaaaaaaaaaaaaaagcagtagtgtgtttctttgtccaacgaagtttaaccatctatcttatttaatttttttttattaatacttttatttttattatagataaaacatactttatgcgtgactttttttaaaaaaaaaatcatattttttatataagacagacggtctaatgttagacacaaaatctcataattacacttaaaaataggacggagggagtatatttttgtactctcataataaatcaacctaagattgaatgtgacacaatctaatacaataaatttggatatgcatgatcagatttaatttattatattaggttatgtacaattcaattcaatgttaattagtttaattatgaacggagtatattgcaagtacaccacgggggcaaaagcggaatctcgaatgtaaagtggtagcacaaactctgatctgattcggccaacaccaccatagcacaaaaaccagcagaagtagcagcaaagcttgtatagctcagcacgagctcgttctcgcacgcagttgcagcagctatagcggtacccggggccccatgcgcagtagtgatcacatgacagcgcagcgagatcaagcg

SEQ ID NO: 35332 - DNA, 524 bp, Oryza sativa
ttcaagttcatgtaggggattaactgcatgaatcaaaattattaattaataattatgtaattgtcatgttattattgaataaataaatcgagatcatgcttgagatctttgtactgggacacagtttcaattaattaatgctagtaacaaccttggagtgaatgaatgtgagtagttgggctgaagttgcttgttcgtcttttgctgctgtgattgcaacctgcgagggagaagtgcacggctgtctcgtctcatgcctttgcttgctttgagcctttgaccgtcgccggcggtggatggcagctgacctcgacgtcgacgtggtggaacacaaatttggcgccacgcatagttctgaagatgacaggtcatcttgtgactacaataaaacgctacttccttaaaaaaaattcagtttttaatacaacatttaactctccgttttatttaaaaatcttctaattagtatttttattttcgttagatgataaaatgtaaatagtattttatacgtaactatattt

SEQ ID NO: 35333 - DNA, 563 bp, Oryza sativa
caattcagtgatagcttcctcatacttgccaatgatgtaaaacaaaagacaaaatactccctatgtttttaaatgactgatagtggacactattcccttttgaatttagccactcgtcgttttactaaatatttacaaggactaaaaggaataatatgttattgaattgtattatattctaaacataaaacatgaaacttttattcaattactctaaccatttcagagtaattactagtcaatattcaaatagtaaagctaaagttatcagttatttaaagatggaggaaggcaccgaaacccgtcatgctgtaagcgggatggagtaatctatgtgcgagcaaagctcgtaataagcttgtcgtttgcttgcacccactccaattaagcaagcagagtctctgtagtatatttgcggctgccggtgagtgccgcggcacagcaacggtggaaaagcacatggcaacatggcgatcgatcgattgattcgacgaccggccagccagccttgccttggctttggccttagccttgcactgcactgtctctcctcccaccggccg

SEQ ID NO: 35334 - DNA, 529 bp, Oryza sativa
accatgctcaacaccacaaatatgttccacattacaaccccccaaaggttggacctttctatttttccgggctctttttctagaaattactgggaggaaatcaccatcgctactagcattactgcatgattgcatttcttgtgtaccactgctagcatcagcactgtttctgaaacaggagaatttatcatgatttgctttgtttagccaaccttcactgccaccacatttagaacccctgagatctgtcacttttgactgaacacacggagggcactcatttttgtcaatcaacaagttctcggtatcatcactgaagttccaactgctatctgtgtaatggccatccaaagaggaatcagtaagagtggaagtggaggcactgtccaaacatctggagttattgctgttagattgctcacagcattcaaaataagaagcatgcctagacaattctatctcatcactacaagatgtacttgatatcagagttatgaaagaaccatcgttaccagtttcactatcaggt

SEQ ID NO: 35335 - DNA, 649 bp, Oryza sativa
cataggctggcggtggatgcataggaggatgactactggactgttgtttggttggcaagcaagcatttggtctgtcatgtgttatgttcctcaacgatgtcaatttcaaagttttaatgcacaaattcaaacttaagtgactgaactgtcgtgttcctttcggaggttttaaacttgtcatcacttttaaaccccaatgtcaagttgatcgtttccgtgtgcagaccactgaccatttcagcgatgtgtgatcgcgagacacttgactttgctgctgctgccaatgattttgtgaagagtggtgaacgaatagtgcctttttcgaactttagctttcaaaacagaggatgttatacgtacatgaaaattcgtagtctactccgcttgacctatttggcctgatcgtagatgtctacttaaagaatttcggaataacttaagtcattaccgtttggaataaaatgtatttcgggcccccaatttgtttggaataaaatgcaattcttgccaagttgcattaaaaatacgtatacacaacttgcaaaatttacatgtagtacatattaatactagaataatttaaggtttacttgcagagacccgttaattgagcttagcacacttcgggccttattttttcgcttattgc

SEQ ID NO: 35336 - DNA, 571 bp, Oryza sativa
tatcatcccgttcgaaaacgagattccgttatatagcagcccccgcttgaaaactaacccctcttaggacaaaaacacattgtttgaacatattttaagtcacaatatttttaacatatgaattgcatgtatgaaaaatcatatattttgatttgttggatatttagttatcttttatgaaaaaaaagcttcaattgaagactatatcgatgttgaaacgatattttttccaccaaaagtgagtactatttaggtgtccttggaagtaaatttagaggttttatttttttaagataaaggaaactttcttgatggatgtaaacaattataataaagtgatacaattaatctaagatcactcttggcaccagcatagtaggttgtccacaacctataattattttttagaaagaagaacgacatgataacaaatatcatgccatagtgagctacaaccacaagctttatactctatacacgcatcacttagaaaaccttaaaacaacacctccaaaataaaaattgcattggtcttgccatgatccgatcaacaaaacccaaatcataggtt

SEQ ID NO: 35337 - DNA, 692 bp, Oryza sativa
taaacttccaactttttcatcacatcgttccaatttcaacaaaaattccaatctcggtgtgaactaaatacagccctacccgtgttcaaactatgtaaagacctgtttagttcgtaaataaaaaaaatttcaccctgtcacatctaatgtttgacatatgtatagagtattaagtatagaaaaaaaactaattacacagattgtgtgtaaattacgagacaaatattttaagcctaattgctccatgatttgataatgtggtgctacagtaaagatttgctaatgacggattaattaggcttaataaattcatctcgcagtttacagacggaatctgtaaattgttctgttattagtctacgtttaatactttgaatgtgtgtttgtatatccgatctgactctttgaaacttttcgtctcgtgaactaaacggggcctaaaagtttttagggaagaaaagtccgctctttgtaccaagaactgttacttttgaaaaagtctgttttttttttcttttgaataagagggtagaaggacagtctcctttcattaacaaagaagaaggtttagttttgtgcaagtgttaaggggtgttacataggggactattctcacaacaacattagctctttaagcttttttttttttttttgccctcactaggcaccaagctctggcctcctcttttgtt

SEQ ID NO: 35338 - DNA, 699 bp, Oryza sativa
cacgagcaagcagcgcgatccagcttcctagaatcctgttctaccgcaccaaccatcacctacgcaataattccagcgcaagaaaaaacttcaaaaaatttaccaccgcgtgagcgtcaacgagctcacgaatcccagtttgctcccggagacgcgcaaaactcggctcgacaaacgggctcagccacgcaaaaggatcacatcacaattgcaatcgcaatcgcgcggaaatcaccttgaggagcgccgggtcgaagacgacgtgggcgcggttctggagcagggacacggcgacgcgccgcacgccgcggcgggccgagacggcgccctcgacggcgctcgtgcacgccgagcacgtcattccggtgacccgcacgtgcgcctcctcctcctcccccgccgccgccgcggcggcgccgccccccatctcctcgtcgtacgagtccagcagccggacgtcctccatctcgtcccctcccccacccgccgccgccggccggccgccgccggcgaccgccgagagctgcaggtgggccatgcctgtcagagagagagagagtagccgcgcgaggtgggaatatttggtggaagagagagaggagacgaaacgatggagaatggggcgaggcggattatataaacggagagggaaaaaaaagttaaagcgcagggggcaaagtggaattattttgcattttt

SEQ ID NO: 35339 - DNA, 688 bp, Oryza sativa
tttgtcatgctgctctgtccgaggaaagctgcaccatgcgatgctcctcctcctcctgtaggcggaaatgtattatggttttctagttgtcgttttggattttgttatggtctctactaaggttacctttttgtcttctttttggaatagtatgcaatattactatgccataatactaatcttagtagcaaactttttcttcaaactttcaacttctcaatcacaccaaaatttttctacacgtaaacttccaaattttatgtcacatcgttccaatttcaaccaaaccaattttcatatgaactaaacacagccaacataaagcaataaaaatctaggcccagtgagcttacattatataacttttggctgagtttatttctaaactttttctttaaacttctaactttttcatcacatcaaaactttcctacacacataaactttcaactttttcatcacatcttttcaatttcaactaaacttctaattttggtgtcaacacacactgtttgattcaattttggcagcagtggagcggattccttgtacggatatcaaataccagtatgaagataacggcgaccagagtgacggattgacgagacaacacattgcatggtgtttgaactggatcatcttcgcttcacacttagggccagtttagttctcaaaaattttccccttc

SEQ ID NO: 35340 - DNA, 700 bp, Oryza sativa
tgggataagttgagctaaaccaacatgccctttacaaagtccaaaacattaggttagcgacatttttgtttcgctctgacagtgaagctttgttcttacgctgctgtcgctgtgtttgcggatgcaggcactccactccactgctaaaaccaacgcccattctgccaaaatgtaacccccatcataaatttcataaacccatcgcaaaatgcacccaaatcatatcgaaattcaaaatgcaatcgaagcaaaaaaaaaaaatcaaacaaattcagagcgaccgcgcgaggagagaaggagacgagcggtttcgccgcgggaatccgcgtgccggtggccaggttccggagcacgtgttccgcgcggctaatcacggagtagtatgttacgactttaatcgggtgattagcgccttactaatcctatcttactataaagttatcccccaccaactccttaaacttaacatgcatgcaaagatgccacatcatcatccactaatccattaattaacaagatgccacatcatcatctactaacaatcatcacatttaaacatcatacaaacatgctatatctttatagtttttataatttaagagcttttcaaatataaacatgttaaattatcatccaatataattcacataatgtttcaatgtatatttttattatgttttatgatatatcctatatattt

SEQ ID NO: 35341 - DNA, 690 bp, Oryza sativa
tcctcttgtgcatatgaatgcgtatgtattgctgcagcatatatacagcctcgtacgctacgagtagttcgtactagtatagagatgcagatcgatcgatgcatgcttgtacgtataaacttaataaaggtgaagtgacttggaagatttaattttggacgcgatttgaaagagagagagcgaaaaaaaattgaagtttggccagtagatcgatcgagctagctatactccgtaattataagtacgacgtactccgtacagacgacgcgcacggtagatatcgctagatcgagaagcaagatggtgcgcactatactactactctgtgtaccgctaccacagctttgtgccaaccctgctcttgttaaacgattggggacttccagataatacacaaatggtactgttatatcatgtttataattatataattagttgagtttgacaaaagctttcattgtattaaaaaaggagtaattacatatgttgatggtatataaacttggtgtaataacttagtttccgaacttataataggctagcttgttatgatacacaaacttatctagtgtgtgtaatccaggttcaaaacaacatattataactgattatgttgagttattaggacacccacgatgtgagaacatgggtggggtattctgatatcaaaatataccttcgagcaagttt

SEQ ID NO: 35342 - DNA, 503 bp, Oryza sativa
acatgaggtgggccccccaccaccaaaaaaaaaaaaaaaaaaaaaaaaactgaagaaagaagagaggagaggaaagagagggaaaaggaaagaagaagagaacctcgcggggtggcatcagcccacgcaggccctcagcattcagtgtcattgagcatgtaggctgtgcaccacctgtgctacccatgagacgatcccaggtgcctgtggaacgcagagcaagaacaccactccctccctctccacctgcatttccatcttgatcatatggaggagaaagtcttagtttaaagctagcctgtctttgacactttcctactccctgtcaatctccattttaaacaatgaaaggcccggtctcaggccataactttggcaggtaacagtgtaaggttagaatttaatgatgccatgtaagtttcatatatatgtatgtttagggttgccatctatgtaagacaactgaagattgttttttacttacactggtcataacaactttt

SEQ ID NO: 35343 - DNA, 502 bp, Oryza sativa
atttgccacgtataccaacaatacaaaagaggtagtgacagctggtcttctgtaaccctctacgtagacaagcctgaaatccaggagggtcaaaaggccaagatcaaagaggagatagcgaccaaaaatgaccagcctcatttttcaagcagactaacgtcacctcgtttagacatcgctcgattagtcgattgcgatgtgcagagagacgtttcattaaaaagacgccttcaaatctcacactttgctaggaatatctctccctataatttacaaatacgacaggtagtccaatactaccccctaccggtttcattgacaaccacgataaaccgataaaaacacgatggaacttagacaaattttatcaaaaaattgaacatttgtttggataattttgaaatatggatcaacttcacaacacatcaacaccaataaacccgagaaccgagcggttatcgtcgcattttggaactcttgtccctctctcagcatgtacatg

SEQ ID NO: 35344 - DNA, 634 bp, Oryza sativa
tgtcctaatgcagccttgaacgacgccgaacgtagatgagacaattgcgtgggccaacggaacattggactaacccattcgccggagatcgaacaccgatgcagcctcgcgtcaggtgccaagtcccgccggacgataaaataaagtagaaaaggtaaaaggtggcgatgcgccgaattgtattgatcgtgaggatatattacatagaccccgggtgtacatatttatacccatgggttgatacaagtccttgtcagacaagaaagaaactaacctaaagataaaaggaaaatataaagtccttatcggacactaaacacactttcttaaagataaaaggaagctaacaaactattcctaattaatagataaactgtcatgccgcatcctctttaaactcggtcacttaggaataagcttcctttagtagattgatttccttaaccgaatatagcaggaatccgactattggcgacttgataactcccatcgactgattccgagatgctacagccgataatgattctaagccgatgacgtctttgccaattaccaaatttcactattaacaggaatataacaaaggtgattttcaccatataagaggttgttatattcttttcccaaatagtgt

SEQ ID NO: 35345 - DNA, 663 bp, Oryza sativa
attcaggggcctgaacctgtataaaaatccctgtctccatctcttttacctcagtctcgtgtatatcctagcaccaacgatccccatactgtccaaataccgtagtcgtgacatcaaacgtcgacaagattagctatagatgatttggagccatcaatgggctatactattaaacttgctctcaaaaggcgagcagcctaggaggtagtgccgagccaaggagagggagcggagcggccaggcaaggaatcgtcgggggaggaggttgaggaatcgctgggcaggggagacggcgcggctgaaacgggccttgcggcgcacgcgcacgcgtcgggaggtctgtgaagagggtgggcgaaaggtggcgggatggcagcgagaagtggtgcaagaggagggccaccccgtgcatgcgcgtgggcatgcggcgcggccgagacgtgcgcctgtgttcggcgtgcagtgtgacgcgttggctcagagaaaacgatcgatgctttggcttggagtagtgacagggagaaaaacaatctaatgggcttttggcacatggatatgggtctctccgggatggctctatcgtttcgctccgtgtcgcttcagcgttggtacgataggcaacatggatgaccatccagagctgctcatgatgaacgactgtac

SEQ ID NO: 35346 - DNA, 665 bp, Oryza sativa
atactttgccacaactaatgttagataagttgtgacaaccataaaatgtgatgaataaattgctagtcattaagtatggtgaaattggtaaggaagttaagctaaccaaacacatacatataggggtgaaaacagtaacggaaattaccggccgactagcgttcgttttcgactttctaccggccgagcgatatggaaatggtagtcgaccaaaacaaaaatggaaatggcaaaacatatggaaataaaaacggaaatggttttgctgttatatcgatcgtttccgtatctaccgtattcttgtggaaattaccatttcttataatatggtaattaccgtattctaaatatgtcgatatttatagagcatgtctatacttggcccacagcttacagattgactgactcttcaatcaaatctctaacttttatgcatggctaaaataaagttaatttataatttatatagtataagcttgaatttatgtatacatataacatacttatgtaaagttaaatatatgtttttatagtttaatgtttccatatttgttactggtttccgatctgcaccgacatgtttccgtccgtattattccgtttccggttttctgatatttccgatatcgttttcgtttccgagaatatgtgatgaacgacttgca

SEQ ID NO: 35347 - DNA, 765 bp, Oryza sativa
tttttttccaaacttccaactttccatcacatcaaacttttcatacacataatttttcagttacatcgtctccaattttaaccaaattctaaactttggaccaatctaaatacagccaattatacggtacataattatatttaagatttgttcactttgttgtcaaccaaatttttgtacgacaataaactgaacatgatttcaccattacaactttaccgaactccatctatttacaaaactacaccaaatttaaattttgatagggaatcaaaccagacaacaacacatttgcatcttttatattggcaacatttggcattatcaatctttggttttaccaataaataataataataagtttctttttttggaaatgatacaagaaggtataccgttcggacataatgataacattgatgtatcacctgatatctagtaagtattgtttgatacctcatttgaacggtatgatacctccgaggtgtcgcctaataccttagtatcagcctgatactgatactggtaagtatcggctgatactaaggtattaggcgatatctcagatatatcatcccgtctgaacgggatgccgtcccgtcacattcactttttttttttttgcaacgaaatggatatgtccttagagcctggcccattgaaataaatagtgatagggtttattttggcaatgaaatggatatgccatcggagcctggcccattggctgaaatgatcacatcattcacatcgattcttagaaaa

SEQ ID NO: 35348 - DNA, 602 bp, Oryza sativa
tgtggcttatgtggtagtgggcggtggtttttcttccatttgctttagctattacagatgtcatgtaagtgtcatagtatggtccgatccttgtaccagtaaaccggcttagatggaaacaccgatatgagaaggccaattatctagcatgtctttgtcctgaacctacagtttctgtatgggacaaatacacgttaacggatgaatcacgcacaatgatgcaaagtcaaaacaaccggagcaacatcgtcagaaatctgatcacagaaagaggctaaggccctctttatttagactttagactgattggcctagacttttaagtcagcttattggcttatatgatttataagccagtggatttaatgtcctaagtttaatggtagagttatacatctatctcatataagccaaaaaaaaagcttctccaacctagtttttggcttaatagtgttagagtggcttatggtttaaaaaagccaaatgaaaaagctgcttgtttgttttggcttagacttttcgacttataagttggcttataagcctaaacaaagagggcataagctggctaacttgctattaaaattttcatacgttcttaa

SEQ ID NO: 35349 - DNA, 615 bp, Oryza sativa
  unsure (1)..(615): unsure at all n locations
gccatgccatgccatccatagaacatcgatcgatcgatctacaaacgatggtagcagcagtaccaccgcgcaaagctataaagagataaaaactcgcatgcaaacgatgcatgcatgactgctgcactaccggccggccggcatgcagtaannnnnnnnnnnnnnnnnnnngagcagcagcatgaacagggagggagagagcaatattgcaagcaagcaagcaagcaagcagaatgcgatcgagcacgtcgccgtccccaggaggaccacctgcggtctctcatgttgtaaagaagccaacctcccataaagaacccccggctacagccaatcccagaggcagcagaggggagggagagagcgacggatagacggagtcacactacccatctccccccacttgatgcccactgatagctacagatgcatgaaagctggacagggcaaaaaaaaaaatcatcagagagaccgtgtttagttcgtgtgctaaacttttttaaagtatacggacatatatttgaagtattaaacgtagactaataataaaataaattacaaattccgtatgtaaactgcgagataaatttattaagcctaattaatccatcattagca

SEQ ID NO: 35350 - DNA, 563 bp, Oryza sativa
ccaaagaaactagagaaaagcttaggtcaccagttgctggagctggttccacgtacaggaacctaaccgaacacactacagttacacactggtactagtacgcagtactccattttgaataacgactcgcgacgatcacgtcgaaattccaaacacattaattcacggtagttcgcggccacatgcgagcacgagcaagcgcaaaaaccaattaattagcaagcgcgcccgcccagtactactgctcatatgttcttcccttaataagcaaagcatcccccaccctatccaacgtgctggacgcctggactgctggtgggtcgggtgaatttacggcgtctcacacgcaaatcccacgtactccacggctcgcaccggcatctcacgcgagagccacaagcccaacatctcgcgggacacgcgagagcgatcaggcgctcgcggtggtggcgcaatccgcgcatctgtagcgaaacgagccggccggtgaacctaacatttgcatggatggatggatggatttgctgcggcgcgcgggttgatgtgaggggtgtcccctacca

SEQ ID NO: 35351 - DNA, 509 bp, Oryza sativa
caagcgttatcaatggatcatgtcttcatcaaataaggttgaaactcacccaatttcatgaaagtaatacatttgaatggtgcttaacaagtaaaagagggagtgccagtattacatgcattattgggtctcagtttctaacagcttttgaaaatggaacagtcaacatgttctcatttctgtgaacaaaatatagtatggaagagacagacatatatgttaagactaaaagaagaatgaaacattaaaagatcttctaaattttataaactggcaaaatatatcatgatggagtggtaaaaaaaatgtgacatgccaaagatttatagtgcaggtaaggatactaccgatctatgcagcagacaaccttttttagatgcattagatgttagaaacttagaatcatggtattacattgtgcaaattgccaaaacaacatgcatcgggtagcacatcaggaataaataaatcaacatatactagaaaaaagaactttagacatccagaat

SEQ ID NO: 35352 - DNA, 529 bp, Oryza sativa
  unsure (1)..(529): unsure at all n locations
agacctataaacggacaaaactacatgatcatcaaatacagcaacccccattcttttgcagttgaggatttctagcatccgatgatatcagtaagcttgtatcacgaaataatagtaaagctaacaattgctattttccaaggtatttcacaagaaaaaaacagtttctaaagatgttaccaaggattcataatcatatataaaagattgcttagcatggaaattggaaacactgctacttgcttgtgttttgtcctagatctttcttgtatttgcacggggatctataggtgacacaatcttaatacagcatgcgcaccacataaaggcatctgaagtttgcttccagaggatgcttctactgactacaaatgtagtaagcagcctcaagaacacaagcaatttgagtttgttaggaattcttggaagagcattaaaatctactcatatggatgnatatgtatatatatatatatatatatatatatatatatatatatatatatatatatatatatatatacacaca

SEQ ID NO: 35353 - DNA, 581 bp, Oryza sativa
tgatgaggcggggggacacggaggtggagtaaagtaataatacgttttttaaagggtttctttgcaaatttccgcggacattttccgggtccacgagccaaaccggatattctgatctcaataccgacccatgtttttggtgggccttaggaaagcctgtctctagcgagcccaactttagtgggcctaaatacggttagggaggatgtgcggcccatgaaggctcggcccattatactgcaactaggccaatacgtagccattcagagtttcggacctgtggctatcgcggaagggagcggcggcgaacccagctcggtgagtcgtcgtcggcggcggcgatgacggcgccggctaggaccacgtgacgcggatcagctcggaggcagcgacgacccatctctgatctccctcacgttcagaggcgcgaccaagcgtcgagggggagcgctcgacggcgaggtacccgtgtgcagatccccttcaactctaggtcgcaacgaagcctcgacagtgttcccaaattttcttgatttttctgtcacctgctagtttgtggatctgcttgatttgtttgtcgc

SEQ ID NO: 35354 - DNA, 1080 bp, Oryza sativa
tgtttgcaactcatctaacctattcagaacgtacctctggtagaagtttgattttggcatgcgctcaataccataatatctcattattatatcttcatcacttggggatatgcagaagacaaagtcatcattcagtaattgctctgcaacaccaagaggttggcagatactttcttgaagtggataaatccgagaaaccataagaactgggagaccctccatcaaataccctaaaaatgggtaactttttgcatagatttatgctcatatcagaaaggtggggtcctaagtaccattttgcatcaagaacaaactgatatagttcatttttttcagcaggagtgatgcgctgaaacaaagcttgcaaatcaacaccctccaatgaggcaaccccaaagattgaatggagtactccagatgcatcaccatcatacacataattagacaaatgctggcacgtactcaaatactttgtgtctagtatcttgcaacctaatttggtcaggagttccttcatcaaattagacagtgagcctgtattaattaattttgagactgtagatgctctataaaggtgccctgaggtagaaggtaatataggccaatcactaaacaaatcaaggtcatatgaacaatccccaatgtattgccagaaaagtttaaaccaggctgctgtaggagatgatccacccgattctggatcccagggaacttggtttcggcatttccatccaggaggaaatagccagggaaagaactgaagaaatattcggccttcaataagtgaaatgttaacctgagaactactggctatctgatacaacttgtctagtattacagggggaatgcttcggtcaattattctatcgctaacagcagaaagaagctcatactctatgctatcacagacataatattgattctcctgtgaaataccagaaaaaatcccaaactgtttatttgctaatggaatcaatgggaggccattcatgcatttgccgatattaccactgtccagatcagcaaggcaatattccaataatattagcttctgagatttttctaatgtaccaagatttt

SEQ ID NO: 35355 - DNA, 646 bp, Oryza sativa
cactgaggaaggtggagggggtgggtgaaaagtgtccagacctgtgatgacatcagacagcctctgagctactgcagagaccccctatacctatggaccacttgatttggtgacattttcaaaatatatccaaaatctgactatttctcaccacccccagcactgccatgtgccccaggccaccaccttctctccccacagggctccccgctgctgctgtggcccctcccaggctattctccacatggtagccaaagtgaacttctatgaacttctacaaacagatcatgcaactcctcccccagaaacccccaagccttctcttcccactctgtgaaatggccaaagcctttaccacatggatgaagtcctctaagacctgggcctcgccgacttcactgacctcaccttgcaccactcccattgcctggaagcccctcaaagacacagagcacactcccttccgtgggatttgcacttgaagttccctctgcctggaacttgcctgtcttcctcctttgcttccttcaggtctctgctcacatgtcatgctattatcaaggacgtccctgacaccctgtatgacagcactgtcctgcagaaccatctatgatatggaaatgcgtcataacctgagcttccaata

SEQ ID NO: 35356 - DNA, 741 bp, Oryza sativa
gattatctgaatgtacttcagtgtttacaaagcgatgccaaaggagagccattgtctacagagcaactaagttttgttcatcgtgttttggaagcatttgttgattgttatcctgataaccaagcacctgatatgatggtgaattcattgttgattcccgattcatttggtgttttgacacctgccagaaatcttgtctacaatgatgcaccctggatgaatgctgatcctacttcaaagagctttgtgcatcttagtattggtaatgatctagctaataggcttggggttcgatctcttcgtggatcatcattactggatgacgagctaatgacggatttgccatgcatggaatatgctaaaataagtgagttgctggctttatatggtgagagtgactttcttttgtttgaccttatagagctagctgatcattgcaatgcgaagaaagtgcaccttatctatgataaacgagatcatccaaagcagtctttgctgcagcagagtttaggtatgatagaaattttctccctagtcagctattttactgatatttttcttttccaatcataattgtgcaagtattttgtttgtcttgttctattttctgtttatgtttatataagtaacatatttttattttccaaaaaaaaaatctaggtgacttccagggttcttcattgacagtcgtctttgaaggaacgataatgagcagagaagaagtttgcagcgggctgcagg

SEQ ID NO: 35357 - DNA, 590 bp, Oryza sativa
tttgtgtttaatgtggggtgtttttgttgttttatattgttgattaattcttacggaacatggtatgaatttggttctagatagtactaaaatgcttgataggcagtggaaaacgcccgacaggtccactaatgtagcatcattttgaggatctggtacttatttttgtttcagtgtgttggtgttgtttggcattagattgacaacatggataaggcattattatgtcattagaatataaatgatcgcttctgttctccttgtatcatatcatgctaaaataagtgatttgagcttgttcaccttgcttgccctttatatgatagtaatagtgtttacctttttttttttaatcattttggatgctagcctgctcaatcatatttctacaacagctagttcaggggaaaataagtttatgcctcgcctttttgttcagcttttaattgatggtgttgttttactgcttttgtgacataccatatgttttgatctgtccttaaaccactcggtacttgtaaccctgagcaacttagacccatgtagatgtaattttttctttctgacatcatagaacatgccatgagttc

SEQ ID NO: 35358 - DNA, 693 bp, Oryza sativa
gctgaaaataatgtgctgtcatctatcatcacagagctcaaaggagtcccgtttccgacatcgacaaaatgtctaacaaggctgggatctaccgaactttggatagcaagtgaggagcagcagctattgatgcgcccattcttgcatcactttatccatcatcaatgtttacaaaagcccttcttggagctattgctcaccactcaagttattcatagacctctaaagctaagaagtttttctcctcacttgttgtcaggccatttgaagcacatatttgatgaacgttgggtgcaccttgcagtagagaagaagtctccatggattccttgggataataatgctaattcatcaactgctggaccaagtcctgaatggattaggctcttctggaaaatatttagttcaatgagtggtgacctttcacttttatctgactggcccttaattccagcatatctagacagacctgttctctgccgtgtgaaagaatgccatctaatatttgtaccaccagcagatgattcaaatcctgatagtggagatagtgcagctagagtagttgacacgtctgcccacccacgagatgagactggagaagctgaactgaacagcatacttgatactgcatttcagtcaatgaactcagcatttccatggttacctgctctgatttacaagttgaatatacca

SEQ ID NO: 35359 - DNA, 630 bp, Oryza sativa
tagctgtaactaatattctcggtagccatccagcttgttctcaatttctatttgatggtgaaaggaattattaggatattgtgtatagttgctatgctgtcgaaatacctaatgtttgttttctgttcgtgactattgcaccaatataataaataataaatcatggtgctgtagtttttacaatacaacaacaaacataacatcactatgaaaattgcaaatgaatattgtgatcgcccgaaaagttttcaactgatcaaacaagcttcaaaacacaatacaatgacgtgattttttatcttatagtcccgtgtatgttttattcagtacaaaatagatgcttggctctttcaagttttttttgttcttatactcatcgtattcaataattaattgcacgtggttatttttggaggtcagataacaatataagttatgtacgttatccctcattatatgttctggaacaatataaaagaaaataaaggttgagataaatattatgaagatcttacatatattgatcgtttctaatataagaattttacaagatttttatgagattcattcttatttttattataaaaagaaggcatgatctgtaaaggtttttgtcatgctttgttaatg

SEQ ID NO: 35360 - DNA, 588 bp, Oryza sativa
cacccctgagtcattacattcagagtctcagagacttgataatgcagtagtgtcctggtatgcgggaaggagacatgcagtgtagtactgaaatcagtgatacacaagctcacccacgtacgtccgcacgcacggccccaggaaaaacggggcacaagctagcagctgcataacgtggccagtatacaacgtccagtacagcagtagcatggactagtacagtagtagtactgtactgcaacaatctgactatttttttttggaactgaaatcatctgactgcgtcctccttttcatttcctttttctttaagccagaaagatctctgactgcctcttcgacaagaatgcaatgacgctattttctttgtgtgtttatttagctggtcaagtcgccgtcacacaaatgtaaaatactccctccgtccaaaaaaaaaaacaaaccctgattttcgtgtgtaatgtttgaccgtccgtcttatttaaaaaattataaaaaaattaaaaagataagtcacgtataaagtattaatcatgttttatcatctaacaataataaaaataccaaatataaaaaaatttcatataa

SEQ ID NO: 35361 - DNA, 588 bp, Oryza sativa
gtaatcttagcaaacgcatccatactgatgtccttcaatgtatctttcggtatatcctcaataattctctgttcgtcctggcttgcagatagtctatggtaagaaagcctggcatacacccatactgtttgacaacatagctctaaagcctttggtgcctaaaatagagaaaatggttttgaatttgtggttaaaactcaaaagcatgttcaagtaaatggatcaacatctcagaatggtacctcatccaaatgtccaatattgtaaagcgtcacaccgatgttaccaagtgaggacatgagaaatttgatctcatcaagttttatccatgtacttgaaatggcacatttgatgaaggacacgctcttctggactatgaaagcaagatacattaataggtgataaggatgcaattctaattagtaaacagcaggctatgtaaaggcaatactccactaatgtcctttggataggagaacaacaaacagatttacttgtaagtcaactgtttctatatgtaataaaatgatatcaatattaaaaaccaacaggctgaaacaaggcatactgtagttgcaaaagacatag

SEQ ID NO: 35362 - DNA, 569 bp, Oryza sativa
gactatatccccaattagctaatcatggatataaagaacttgattatagaaggaggtagtactgcctgctgactactggaagggggagagtagagggactgagggagaggagagccggactgccagagaagcagtggcgcagtgctcaccggagggggagggccgccggatgtgggatgccggccgggcggcgggtgccggcggccgaggtagggcgcgcgcgccgatgcgcgtcgaggaggcaggaggcggtgcgaccgcgatggcgcgagttgggactcgggaaggcgggcaggccggccgccggcgcgaggggcagagctccgctgcactgtcacggcgctgtcgggactcgggaaggcgagcaggccggccgccggcgcgaggggcagtgcaccgtcgcggcgccgtcaggactcgggaagggggccggctggccgccgcgcgaggggcagagcgccgttgcgccgtcgcggcctcacgggacacgggagcggtggcggcggcatcaggcgtcggagcgacggcgcatgcgcgtgtgactgggagtccgggaggaggctagtagg

SEQ ID NO: 35363 - DNA, 610 bp, Oryza sativa
tttgcaagcatccaaaagacctttttgttttctacaagttgagcaagaaaacacctcatcttgtttaacaatttcttccatgtgtttaacacgctctaaagcatctttcaacttcaactcattcaaaacacactttgaacaatcttgagaaatcaaaacaccattgttttgttttgccttatttgcacatgaagcattgaccaaagaacttgcacaaaaagcaactttgtatttttttcaaaacgttctttgtcaaaatcaactcatcaacaacacgagcatgtaaagcaaatccaagagcaaaagaagactccaactttttagatttttcaatctcaaattccatttttttgcaattaacagaattgacatatcgcaaagcattaatttcagaaaataaaacttcacaagattgacaattatcatctttaggaatcaaagattttaatctagcaatttcagcattaagaatctcaatcgtacgatccttctcatcaagcacaatagaacatgtttgaagtttcttagcaaatttgtaagcatcatattctaattgatcataactaagcttttcttcattatcatcatcagattcatcaacatcagaact

SEQ ID NO: 35364 - DNA, 1116 bp, Oryza sativa
ggccgccaccgtactcgtatattcctctccacccgtgtgtcgcgtcgatcgccgtcggcggcgggcggcggcaacttctggtttatggagaggaacaactagggtgggccggtgattggtccagtttcgactaaacggcccaattggttcatggcccaggcgcatcttaggggttcggagatttcttctccgtaccccgtcgaaacatacgcattcgccgttgtggtgccctcgtatcgtattaccggacacctacgaggaatcatcttcgctgtgtgatgcttggcaactcgccggtgttctttccctcgagggtcggcgcgactacgatgttgtctaccgttcatatcgacgtcgatcatagctccacaatagattagggcactatgtgaaaaaagaaaagcaaaattatgccaaaattaagattaggccaaggattttgagtaagaggtgtgtacaattctcgagtcatgaattcgtgatcatgggcacttcacctcgtagaagttgagattacacactaggctgcgtttggatcctcggcaataaacatactagcctcgcttagtaaggtgagctgtttggcactgcagctaaaatgttgctaccgtgggcaagattacctcattttagctaaaatgtttattgggctttagctgcaatgggctagcccatgcttatcaggctaggaaagccgatcaagggatctgcgcgcgcatggcacgagtagacaccgacctgctcccatcaattccattgacccacggcccaggcaagcccactggcttagctagttagcttctccccaatcctgcagatcttctcgtcttcttcgacggctcaatccaacgcctggtggtctctcttcgtaggggttcgggacttgggaggtctgcgtcgtcgccgttgctggtcgacgaatcgcgtcacccatggcgcataaaggggtaagcctactgtttccatgtatctaaaaattaattgagaagttgtgtcagtattgggacgacctcaaggtgttcgatagaatgcccagaagactcaacatgccgctgcttcgtcctatgcgccaacacaagcttaccacgaacaccaaacacacgaattcaccactct

SEQ ID NO: 35365 - DNA, 599 bp, Oryza sativa
ttaaatagagaggggggcaccacgatgtaaccatgacgactacaatgtagcgtagacacgcagggagaggatggcggcgtggccatggactcgtagcggctaggtgctatgttggttggggaggagcgcccataatcagagccccggggatgtaggcttcggctgaacctcgttaacaaatatcgtgtgttcctgtgtcgtcatctggcatgtcttgggcgatcaacgactgaaacgatcgggaaggttagtcgtcgttccactatatcgactaacttttacaacaagctcggcacacaccgctggctcggtctcctccagaccgatagctctatgaactatgaaagccgccccagggctctctttctccctcctagcttccactccttcaccatccctagagctcgccgatcgcttccaccactccgctctcgtccaccgcgtggctcgcccgaggtgccggtgcgttcctggcgactggggcgaggtcgtcttcccttaccccgaccttaattggttcgcgccgaggtcggaagattacttccgctctgctggcatttcttcactacgcgcccttcgtctcggtagtctccccatcc

SEQ ID NO: 35366 - DNA, 537 bp, Oryza sativa
ccaaaaagttattaaaaatatgatccatctcaacaacagaaaattcaaacatttttttaggaatacatcttgtggaatcaattttcaagttttgccataacataagaaatcttacttcagcatcttatcaaggtggttgttgagcttcattctatgtgaccaccactttacatggtttgcttgtccatcattcagagtgagggttgcactagagagggaaataaagttctcctcaagtatctttctaaaagtaggagccacgtagtctattatagtgtagccccaagggcactgccaattcttatctgggctctcattagattgtccagttctttggtacaggaatcttcatgttgggtttctgccaagcaacagccatgtgagaaaaaaaaaacacaaaagaaatactaagagtaagctatgcaattttaatatggaatcaacaaacctttagaaatagcatccactggcaaaagcaatgtaataggtttgtttgttgaatcaaacctcgaaagcatcatcccagcaggaaaataa

SEQ ID NO: 35367 - DNA, 651 bp, Oryza sativa
catacaataattataagatatctttattcatacaaaaatcataaatattacaccaaataattcttaaaaactatttgtaaagttttaaactaattttaatgtgttttacttcttttaatttttattttagtttgttttctattatttaatattaactttcactagagttttccttctcaactattttataaaaccttgtttagcaaatgaactaaatttctatatattctttcttccccacacacattttctctctcatcaacttacaactaaattttggagacaaaaaaagtgtgcaaaacataggtgcaaatgtagtatgacaaaaaaacattggaggatgaagttgcaaaccttttaggcacctccgatttgtatgtaatcaccaaaataaattcaatagaaattttggcatgacctcccctcttttttgaagaaattttgaagcttgctcgggcagctggaggaggaagaagacatatatataagggtgggactttagtcccggttggtagcaccaaccggggctaaagatcaccgggatcattagtcccggttggtaataccaaccgggactaaagttaagatctttagtctcggttagtagcaccaaccggggctaaaatcaccgggatctttagtcccggttgg

SEQ ID NO: 35368 - DNA, 712 bp, Oryza sativa
accgggactaaagatcccggggggcctgacaggtcctgacagcattcgaaccgggactaaagatgatctttagtcccggttggtaacacaaaccgggactaaagatcaaatatgcccgttacccttttgaaccgggactaaagatcatctttagccccggtttttattgcatccgggactattgtggaaatcggccgaccgacgaaagatggtttctccaccagtgtaaagtttagttttagactatccttttacaactcttttcattttgaaaatgtgttgtagtttgaacatttctaactctcttatctatattaatatatgtctagcctcacctctgacaaaaaaaaatgtaatctaattagtacgtgtgcatgttttctttctaaggagggacccgttacgagccatccgatgttgtccgcatatatcagtggtggatgtatcggggccaggcgtgattccattcccaataattgagagtgtattctaatttcttaaggggaagtcccccgtatataatttttcccaattctatataaattgttgtgaaaaaattatgaaaaattcacaatattgaatattgtgatatttatctatccaccaaaaatcaagttcaaatctgacttacacatcaagaaaaaaaagataaattcagataacaatacgttactattcatatgcctaatttgtctttttttatatctcgacg

SEQ ID NO: 35369 - DNA, 2005 bp, Oryza sativa
ccatacttgtggggcaccaagcggctgccgtgcgagacgccggacgcctgctggcgcacgcgcgggtcgccgccgatgctgctgccggagaggatcgacgccctctggccgtacgtgacggcggcgcggcggccaacaacggcgacgatccccggatcgacccttccgccgaggcgatagcgtcgctgccgtgccgccgcgcgctggtgtccgtggccacggaggacgtcctgcgcggccgcggccgccgatacgccgccgcgtggggtgacagtggcagccacagggcggcgacgctcgtggagtccaagggcgtggaccactgcttccacctcttgccggagttcagctccacgccgagaccggcgtgctcatggatcgcgtcgccatgttcatcgccaagggcaagacaccaccaccgaacactcggggctgtttggatggaggctaactttgccataactccatttgccataactgtggcaagccacacagccacaactatggcaaactttggctagtaaatgagagtatgacgcgtgggccaatgtgctaatgaagtgtggcttgactcaactgcggcacgcaaccaaacactagcctagaaaattgtggcacgcctaagatttggtgtggcaaactgaggccaccaaccaaacagccccacgtcaagtgcggtggtgccaagttggagagttccacgcgggccgaggagtacggcccaaactgtggttggggttcgacgtgccgggtttgggatgggcaacatgatcaggcttcctagtaacgcccagaagtatccaggaaactattctaatccctcgaggggatgttttctcgtttgctcaaaaaccatctaaacagttatgaaaaattctggaaaaaattgacaacattcatacaacacatatatacaacttcacaaaatcttaagtccaaactcgactcacacgtcgagatataaaaaagacagattcagtgtatgaatagtagtgtactgtttatatctaaatttgtcttttttatttctcgatgtgtagatcgaatttgaacatgaattttggtggactagtaggtatcattatactctatattgtcaatttttttcagaatttttcacaactatttgcatcgaatttggaagaaaaaggtatacgaggggtatccactcgagggattagaatccactcgttaaggggacatcccatcgttatttgcatgtcatctaaatagttataaaaaaatttgaaaaaaaattgagaacatagattaatatgaaatatatcactacacaaacatgcatgactaaattcaacttctataagttgcaacaaaaacaacaaattaagctgaacataattatcgtacattcgcagcgatatttgttatttttgttacaatttgtagaagttgaatttaaacttacatatttgtggagtgatatatttcatatcaatctatattgctaatttttttaaatttttttatgtctatttaggtggcatgcacgaaacgagagacatcccctcgaggaatgaaattactttcccgtttgttggaagataatagaactatttgtaacgcaagtgtatatacagatactgagaggacaacctattccatttgttgttggcaaaaatatgcatgatctgcatatagtacgtccttcttctccttaaacctttgtcgtaggtttctaaaattgaaaccgatatacttcttccgttttccgttttaggttataagacgttttaaatttagtcaaagtcaaactgttttaagtttgactaagtttgtagaaaaatatagtaacatttttaacccaagaaaaatttattatgaaaatatattcaattattaatttgatgaaactaattagtagtattataaatgggtgatgacagttggagcatcgactataaaccgtcggttcacggcacacgttgtccttggcaatggccgaacctatgttggcacttccctctattctggcaataacacggct

SEQ ID NO: 35370 - DNA, 1651 bp, Oryza sativa
ttccgtccattccgtgccgttaagtcctataggatgaacaatgtatttaacggcacgaaccctaacagcgatggcatttttgagacaaaatcatttatacgatggcatttcttgaaactcacacttgtcaatggcatttttagaacttagatgcttgtcaatggcatttcatggattatctctaacaatattggtgcatgagaatgtgaaaggtatcaagcctacatgttttttaagcatggaaacgtggatcagtattggtttttgaatacgtatggcatctctcctctttgtttttcctatgcaaaaacttcataacatttaatgcttatatataaatcaccttcagttcctttcccagataagttcatcaacaacaattttatattaattcatgagaaatttgttcctggcttcctgcgaatctatatattcccttctaggaatgtttatatgtcttttcaaatggaacgcgtatccttgcaagatcgagagaaatgggaacgcgcatcgatcgatcagttagttgtgttatgagaattaatcaattaattaaggtctctaaaaaattaattatgaggtcattcccaacccaatgactaggatggtgtccatgcattaaactaggtgaaaccccgcgcattgctgcgggaatttagtatgataacaataaaaaaataacgtgtaagatagctagataacatcagattaagtaaattaatgtggtttatgataattttaatttaaatagtatgtagaatggtggttcaaacgtaaaatataaggtggtatgactttatggaaaaagaaaagtagggagatagtttggaccgtagattaatcatctaaagggtaaaaacaattgatgtgatatgacttaattagagggaaaaagaaaaaagataatttagaccatagattaatcatttaagcactaactaagtgaggatgaactatataaatatataggatatcataaaacatacattacattgaaatattatgtgaattatattggatgataacttaacatgtttgtatttgaaaagctcttaaattataaaaactataaagatatagcatgtttgcatgatgtttaaatgtgatgattgttagtggatgatgatgtgacatcttgttaattagtggatgatgttgtggcatctttgcaagttaagcttaagaagttagtgggggataactttagagtaagataggataagttgttatatagaataaaaaatgatgtgtcaaatgaatataaataagaaaagataagcaaactatgtcttgcatgagacatggtttctacacaacattcaagacatcatgtgagataagtattattaaatttaagtatgaaatagttgtgtttgtattgaaatagtagtatcttagtactagttttttttataatttagagtttatggaaactatgtttagtgtcttaggtttggaatggcacgaggggtttagagaacttcaccaacacggcacctctctctctataagaaccccgcttaatttgcattccatgcaagccatcgtcgtgcaagagcgagccagcagtgcagcatgagaacaagcaagagctcgccgtcgccggcgccggcgcgcggcaacatcgccgtcgatctccggccgttccttg

SEQ ID NO: 35371 - DNA, 888 bp, Oryza sativa
atactgcaaggtatacaaattatatgatttatatgctcagcccttataaattttcacacctacttcctccgtttcacaatgtaagtcattctaacatttctcatattcatatttatattgatggtaatgaatctagacatatatagcatttcccatattcatattgatattaatgaatctagatagatatatatatctagattcattaccatcaatatgaatatgagaaatgttagaatgacttatgtttatctatctagatttattaacatcgatatgaatgtgggaaatgctagaatgacttacattgtgaaacggagggagtattacacaattagatacataaaatataattaaataatattttaagtaatagtcaactaaaattaaatatttaaatgctacttagacaaagtgcctcctaatcttcgcgggctatattattcctagttatacgagaatattttcacatgatgataatcaacggcaaggttatctaactaactcatcaactctatttagttcaaattcagttcaaacttgctttgaactagttagtaaagtagctaatgttaatatctaagtaattgaaaaagtttcatactcatttgaattaggtatatactcaatttcaacaatggtgcccgggcaccatggagcaccaaacaaatttactatatatatatatatatatatatatatatatatgtgtgtgtgtgtgtgtgtgtgtgtgtgtgtgtggaggatgattaaaggcgacgttacctagctaactaaattatctgtacatgatttgcgacaagattacagtagatcgatcctacgcatttggcaacctgctgcttatacgtaagcagtagctagctattgttaaaaaaaaattgggga

SEQ ID NO: 35372 - DNA, 2193 bp, Oryza sativa
tattgatcttcatattatcatcccgcaccttttggcctgtccattccaactgcaacccacatatttctcttgcacacgtagtaaataaattactctctgttaatatctttttattagtaaataaattactcggaatccaattcattacttctttctgtaaatggattactctcgagttgttttcagccgttctcaattggttccttctctcagtaaatgaattactgtcgggttgttctcattcattctcttagtaaataaattactattacaccaatctcaacataacatattgatattgccaaaaaaatctcttagaaaccaagttactattacaccgatgattctcaatgtctcttagtaactaaattactattacatgcacgaatccaacaaacaagacggcgctagtgccacatatcgatgttgagccgacaaagcactatagatccttaggtctcccatcgacagatatccatcacccacgaacatctagagaggcatcccacagccacctggatatagacaaaaacgattacatcatctaagagaagtctttaatttacactcataaatgactctaaatgaaatatgattcgccgaagaagaaataaaatgcttcataaaaaattgagctaccagtttaggttccttcatgcctacttttagccaacagatcattttttattcagactagcatggaggtcacattatgttttcttaacggtagttcctgggcttgcctagtcccgatctgtaatcgatgacattgtgcaaaaaacaaaattaagaatgcagttggctgaaaaatgtagaataggtaattgggatgcttcaggctaaaatatccagatatctctgattaataacatacaagttaaaagctacacaaaacctgccatcttttcagatgaaaaacgatttcaagaataaaaatggaccgaatgttcttaatgaaaagaataatcataaattcagaatgatctagcattcactacaaattgatctacaatggatcgatggaacatgcatgtatgttatacagcgcatcaacgaacacaagcaatcaccacatatctggagcccgcaaataagctgcaattaactgatcaaacatggcagctatgcttcctcaaagaaaaacaagtagctattgcctatagagattgattgagtagatagaacatggagagaaaataaaacaaattaagcatcctgactttcattggaacacatacgaattgaacatccatccatccatcgatcctgaccgccatccccatgcctgctttgcgtggccagggtctccagcgcctgctgccgaccggcacgagtgcagactgcagaatgtgaaggaatcagaatacaggagcaaattagcagaactgcagcagcaaatcggtaaaacaacaaagatgcaaagtaaaaagttcaaaattgcatggactcagctgcttaccctcattatcatcgtgcatcacagatcatgacgccaccgctgtgggagggaggcagcgatgggaggcctgatccgtgccagatccttcgagggaggaatcagggtgtggtcaacgcagccggaagctcctccccgcatcccgccgtcaaccgccccctcctcctcaagagatcctgtcgatgtcgacgccgattcatgggcggggtggggaagggagcaccagatcgagcgaggacctcaactcacctgtcgatgtcgacgccgattcatgggcggggtggggaagggagcacctcacctctccatggctcggcgcaaaggacgtcggcgacccgcgaccatcgccgcctccgaccgatttcacccgtcgttaaccgatttcgcccatcgtccgccgcccgtcgctggaggacacttccaccgcccacgctttcgtccatgagctttgtccacgctaccacgcaggatcatgcgtggaagatagtcgtgcgcagcaggaccagctgcatgcacacgctaggagctggatggttttgttcaaattactgtgtttcagatagggttaatgattctggactgatattcttgatagtgttttgggtatatacgtacctagtatatgtgcgtttaaataggtatatagacaattagaaatgatacttacccaaaatacgagttttaattcaataaaaaaatagttttactgggtatatacctagtatgtgtaaataggg

SEQ ID NO: 35373 - DNA, 2655 bp, Oryza sativa
tttcaccggatatgtgttttttcttcttgccaagaaacggatttggcttttgtctttatcaaatgccatgcacattctcgaacgatgattatgaaggttaacttgtcattcttgcatgtaatcgattgagtgcgatgacaagttaatatatatacttagattccaaattttcatgtacttaattatattccgaaatttcgatgtatattactcgtataacccaatcgtatcattatataccttattaatgtgtaccaatcacattccatgcatagctaaacaccagtgcaaaatgctaaaatgtattggtcaaattttttaaatatataaattctgtaatttgaaagtgcaacgcgctaatttagatacgtgtacataagcctaccgtactactacacattactcctacttggtactgaaaatttcaaataatcggtttccacgtaatatactttgcatgtgtgtatccacgtaaaactacaattttcacaacccgaactgattatatacctactttacacataacccagcggatttgctataattatgtcgatagatttttttcgttgattacagttgattctctggccgttggatctgtgtttaagatccgtgcttccatattgactttttcctcgcaaagagacctgaaagcatatgctattgctagctaatctctaaagtcatgcaaatccaagtgaaacgtcacctaatttcgttctatatgtatgcatccttttctttaacacaaatttacaccccgcttacatcctacttacacatgtaattactatgtaattttgagacttacatctgtaattttaaaacttacattataaatacactaaatttacatatgtaatttagagacttacaatgtaaatacaagctgaccatttttgggtgaaaaatatggcgccataaatctagctacaccctaacccagaattgattatttatacctagaaaacattaataaatactcaccttttttttgcatcttggccggatgtgaaaattgacatacccgaaacccaaaattaatgaccttaaatttgctatttacctttgtcaaaaataatataaaatatcccactttccaattatacggaattgattttccataaattatggatgtaaacaaggacattaattacagcttaattacggtatagttgatacaggatcatgcatgcggcaattttttgaccagccgttgcactttctaaatcaggaatttaatacgggcagacccgttaatcttcagtccgcatcaatctcttgatcaagttctcatccaacggtttatacccatggagcccatacaccatggtgccccaaatggccatcctatatgtatatgtatatgtatatgtgtatatgtatgtgtatatatatatatatatgtgtgtgtgtgtatgtatgtatatgtatgtatatgtgtatatatatgtatatatatatatatatgtatatgtatatgtatatatatatatatatatattcatgtttgtaatatttaatacttaattagtcctgcgttgataacctacgtcgtctttcatgccctgcctaaattcaaccaattagattgaatgtagcctaagtaggagatagattagattatttactataaaatttaaaattaaagaatcaagttaactacattattaaaagattctgcttaagctcaaccaattagatcaaatttagcctaagtaggagataaattagattatttactataaaatttaaaattaaagaatcaagttaacttcattattaaaagattcattactttggatcatatatattctatggactagcttttgttaactaattcatacatttttaagaaaaaagcaaataagttttgttgtctttctcgctatttcttagctattaaactaaagtagaaacaatcaataatattggatttttttagaaacacgacacacgaacaccctactcctttgagtacctctaaaagactgatccaacacgttttgagattgaggatgtcaccacgggcgtctcgctgtcgacgggtatgccacctaccactgaaagaatatttagccgtaaatgcgagcacccgtatcaagtctaggacttgaaccaggtagacaagttacaccacaggaaacctaaccaattgaattgtgctcacttcgcaataacattggataataaaacaaccataatttttaagctacataactggaatacttttatgccttttaaaccggtgaacaatttgttataactgttagatctatcttatataaaagttaagcatgtatttatggtacatgacatttccaaaatattactacgcaattatatttcgtcattatcgtattcatattaggttgcatggagcctttcacccaccctacatgaaatgttcatagatggatcacctctcaaactatatcaatcatattagcttatataaacccatacatttagtggagcttcatgtcccacccaattcatctctaattgaactattataatagatatgtaattaaaaaacaccttactttactttcgttgacatgttttccaaaaaatatatgtttaccttattttcaaatgataaagaagattataaataattgcttatagatattccttaaatatgatataata

SEQ ID NO: 35374 - DNA, 4023 bp, Oryza sativa
caatgggaatacaaaattaagtgatgtcagctagcataacttgagtgatagaacaatttaatggaacgctaaggctgtgttcgatggtgggtgttgggaacccatcacccacgcacggaaaacggaacggtccattagcgcgtgattaattaagtattagctatttttttaaaaaatagattaatatgattttttaagcaattttcgtatagaaacattttgtaaaaaaaacaccgtttagcagtttgaaaagcttgcgcgtggaatacgagggagaggggttagaaacccagggcaacgaacagagcctaagatagtttaatggtataattcaacgctatgacttgatttgatcagtaaaggttttttttttacttttgtacgtttgtaaaaagaatttgaactattgtaagtttgtaaatataatttgaataagataaatgattgaacatatataaaaaatttaataatgttatatattaaaaaggaaatgtaggaattaccacccctaaactatcgcgatagttcggaagggtaattcgtacattttcctattaaaaaaaaggtagtttgagttttcaaggaatatatacatggagattacactattactggccactagacatctcaattcactatcgtatgctcggcttagtcaaatcactcgcacaatcacacctactccctatcccatccaaaaaaaagtcaatctaggaggggatgcgacccctcctacatacaacgaatctctggacaaagggctatctagattcattgtactaggaggggatgtcccatcccctcctaggttggcttgtttttggaacgaagggagtaaggttcaaatggtagttagtgcagcagaaagatagcatatatgacagggacggatctaggatttggccaatgggaatacaaaattaagtgatgtcagctagcataacttgagtgatagaacaattcaatggaacactaaggcagcgttcgtttagaggacattgagggggaaagcacctcgttttccacacgcatgcttcccaaactactaaacggtgcgttttttgcaaaaatttctataggaaagttgctttaaaaaatcatattaatccatttttaaaatttaaaataattaatactcaattaatcatgagctaatggctcacctcgttttgcgtatcttctcaatctcctcaatcccctttttctcaaacacaccctaagatagtttaatggtataattcaacgttatgacttgatttgatcagtaaaggttttttttttacttttgtacgtttgtaaaaagaatttgaacttttgtatgtttgtaaatagaatttgaataagataaatgattgaacatatataaataatttaacaatgttatatattaaaaaggaaaaagtaggaattaccactctccaaactatcgcgatagttcggagagtaattcgtacttttttctattaaaaaaaagtagtttgagttttcaaggaatatatacatggagattacactagtactagccactagaacgtctcaattcactatcgtatgcttggcttagtcatggctcagtcaaatcactcgtgcagtcacacctaaggggttcaaacggtagttagtgcggcggaaaatcaacagatagcatatatgccaggaacggatccaggatttggtcaatgggaatacaaattaagtgatgtcagctagcataacgagtgatagaacaattcaatggaacactaagatagtttaatggtataattcaacgctaaaataaatgtagaaatttctattgcaagcttacacaaggtcgatcactgccaatctatctatctatctatctattatatatactaaaagtacattaaacttcctacaaacactcccaatacgtcacgtgacattcctataaacgcttctaaactgctatgtggcactatttaatctaccgttgattttcattcaaatctattatatactaaaagtttattaaacttcctacaaacactcccaaggtgccgcgtgatgttcttataaacgcttctaaaccgccatgtggcactatttaatctcactgtcgattttcattcaaattggtggacccattatttaagaccattagattaaatctatatgtgtaccgttgattttcacttgaattgatggacccattattttgatcattagattacgtgtagtggatattttaatgtattaatgatgtattaagcttattttattggtatattatgtagttcatttatgaatagatacttggcttttaaaccgttataataggttgaaatgacaacaagtaaatttatatgtaaccggaggcaaagtgattttatttattctaggagaaaaccttattacttaaatatattaaagtctacaatctatttcacggtttataaatggtgagatatgacttttttttagcattgttttcataaaactgtcgggcttccttcctagttatacactaaaagtacattaaacttccataaaacactcttgagctaccacatgacgctctaataaattagatgaaatcttaaaaattctgagaaaaaaaatcaagatatctatctattaatttttacttaaattgatgggtacaatattctgaaccgttagattattacacctcttctccgcccctacagtcccgtaggtaagcagccaatgcccaagttcaacaccggttccgattcccagataatcttttatgcatgcatgtcaagttagttacgtgtatatatatatatatatacacctcggtacgtgacaccggaccagacgatttcggcatatctcagtggcacctcgacgctcgacaccacacgtttctcgtagcgattctggcgtcggcacctcatcggcacatcttcagcactccacacagtcagatattggtacctaacatcacaatcaggtactctctctgtttcacaatgtaattcattctagcatttttcatatttatattgatgtctatctagattcattaacatcaatatgaatatgaaaaatgctagaataacttatattataaaacggaggaagtaactgtcattaagactgctgcatggctgctcgggggagaatatatagccccctgcgaagggaggaaccgaggaagtgggcgttccctgctagggaagggcattcactgataacagtgaattactcagctctacaaatgctattgcagtactgaatgcactgcaaataatttgttaatggacgggtagtcgatgttgtcatcaaaactaaaacagttgtagatatcggcggctcagaaaatggaatgagtcattagcacataattaatcgtatattaattactataaacttaaaaaaataggtttatttattttgaaatatacttctatataaaatgttttgtcaaaaaacatgccgttgagcagtttgagaaacgttaaatagctaatggtaaacgacgaatttgttactaccaaatgcccaaacaaacgggccctaaatgaatagtgccaaattaggagatgtaggtttcgctgaacttacaaagacaagttatattcaacaatacagatgcataaaaaaagacaaacaatcaaatatagcatctacaacatgagcaatcagatcagtgtttaccctgtttgaatgctataatgtttaacatacgggacctctatatatagaatatagatgatattcctttttttgggtgattataggtgatatttaatccttcaatttcacacattattccccacaaaacaacaatttaacacccattataatataccgttagatatgtaaaatataattaaatattatttcataagaaaacctaaaattaaagataaaaaattttgcggcaacaaaatttatgaaaattaaaacaatatttttagaacttttaaaaagatgctcttaatttcttatagaacaaatgataacttcaatctttattgtatatggtatatataaaaagaagttttgcactacacatatttcaccaaaaaa

SEQ ID NO: 35375 - DNA, 1164 bp, Oryza sativa
agttccccgatttgactacaggaagtatgggaggatgtagtgtacacacaagggctgtcagaaaagtcaacttctccaattaaacaacacctattcttggatcaccgtaccggtcgatccagatcaacctaacgatccaatgctaatatgagggtcgttggtcaatggccaaagttaattattccaggacacaagtgaacaggcagagcagttagaaacagaaaatgatgaaacgcaatacacctggcctgtctttaacctaaccgttaggactatatcacattaataagtgaataaattacgatttacctgctcaaccatcacatgaactgatgaacaaatttccttggatttactagtacagtatcaaattagcaatgacttatccagacatgagatgcatgatgagatattagtaggatatgtgggtggtggacagagtagagtttcctccgcttttgccttttcgggaaaagcgaagcagcagctagcgatttgttggtttgcagcaagctaatctctgtaggttagagcaaggctaataatacagccgacctgctggctataaggttctttatagtcttctctcagcctacctatataatagttagctcttcacaattaatacagggcccacttgtctctctcatagagtttcttggttcttgtgtccaagccggctataagtttatagcccgcttctcctctctctcctctcttctttcctccaacttagcatttagccggcttataacctactattatacttgatcttattagagcacccgcaatggtaaagtaaggtcctatctataaaacatgtacatctcagcaatagactagaataatagtaaaccatctcaatagtatgtctacatgggtatctatagctctctaatacattgtctcgtttttctctatagactatctccaggttagtagatagctttgctctctctcttcatttaatctcttctaagtaggaaaatatgctgacatggatctcttatagagagcctatagataaccattgtgggtgcccttagcggagcagcaggtgttctagatgcttcctgcctcgtcggccatgatgcccatgcagcatgcaccgatctactaccaatcaccatggcgaaatggcgagtgacctcacatcacccaggg

SEQ ID NO: 35376 - DNA, 730 bp, Oryza sativa
ttagagctacacatttctagttttgtggttaagagacttcaaacaatctcgctgttaagttgagggacctccggcgaacttattccaaacagaaaacacgcatggcctgcttggcaaatgataacgaacaaatggcccagaaactttcacagttgcttggttgctgcttccgcttgtagcttccatcatatagatagtgagatgttatgatctcaacttaatgaaatgaatggattggccaattatattgtattgtatactgcatggttaccgtcacaaaagatgcgtgatccgctgatccgcatcatccagagttatataatgggagaccaaatggaccctgaacaggtaaaaggaagcatgtcgggagctgcacaatatttcttctctttcgttctcaagcgcaatacacatccgatttgtgctctaccacttacatcaatcatgcacacattcatacgcgaaaaggaaggaattgcttcgacgagcttgaacatgcctatattattctcgtcacacaaacacaaaagtcaatcatagcgccaccggaacaacgaggagccggataagatgacttcttcatcatttcataatagcaaacaggacgccagccaggcaacgtcaaagaaataaaaaacaggagcagacaatatcgtgcatgcatgtcactttcagttttggcaagcaggcaggcaagtattccagcctttcttatttctcttcgaccaca

SEQ ID NO: 35377 - DNA, 1101 bp, Oryza sativa
ttataacccacatgcaatatcttaatttgctattggctaggaaatattggggatggtgcatgtattgagtttgttgatatagtaaatatagtatggagagttattacttttcttggtcttggtgtacctataaaatatgtagatcaatttgaaatggagggagtagtatacaacattgtttccggaaaagttttaaccagatttattggaatacattacatctgacagatctagatataagtttgtaattagatttgtagtactattagagcaggtataatagcaggctataagccaactataaacatattttaaaaagataaaggaaaaaagagaagagcagcgggctatagatctgtagccagctgcagcacgaactccaagatgtaatgtgtgtatgacagatgggaccagatattaatagtatagtaagcaactattgtatgtatgggctattatattagctatagatagtttggagttagtggtgggttatactattaaacttgctcttaaacattatattcggtactaattaatgttttatggggcgtatattttttctttttttttcttgtacgacggaggagccagggatgagaggagggggcggggcccaccacggcacggcgtgttccaagctgtttttacgcaggtagtagagtacgtactattagtacgtaacgagtacagctagaacgctttgtttttcttgctgttgtagttgtacgcaacttttggcttgataatatttgttattttggataaaaatacggtctctaaaaataactttaaatattattttctattataatatatataacagtgttaacaaacataagatttaatatgttttgttaaagtactttttaaaactaatctatatatatagtcactatatttgaaagattaatatttttaaaataatttataataaagattttaaagtttaaacttattcttatctaaaacgataaatattatcgatacgagggagtagtatattatggttatatcagtagtacataccagcagtagtataattgtagcagtagttgtagtagtagtagcatacgatattttttttctctctcccggccc

SEQ ID NO: 35378 - DNA, 1225 bp, Oryza sativa
agcaggcggaggccgtggcggtggaggcgggacttgaagcaggcgatgaggaggtggttgcataggaagatgtgggaggaagcgaggaggaagccccgcttgaggagcgccgcgtggagggagacggcgaggcgggggtcggaggtggcggcgctgcgccggagtagggaggcgtaggagtagatgccggggatgatgggatcttgatgccgctggtgcgcggcggcgtggaacgcgcgcaacgtggtggaggcgagaaggcgaggacgcggcacgagagatggcgcgcgcatcgtggccgcgccgcagagtgctagctagttgcgtaattcttcaagggaagtcacaaggcggcggccgaattgcctgcgacagcagcgagggcgcgagtatacgccgatatgcgcgcgccgcgtctcggcgcgggcgggcacatcatgaagggattgggatcctctactttcaaagtgactatgtctttgtcacagatatgtgtgtccgatggttagtgtacatccgactcctatactaccatgactagctgtgaaaaaactggatctacatagaagtaagctgagcaatgtgattagtcttgagacgtgcgcatgggccgtacgtatagcacttctcttgataaaagcgcgtactttgaaggtagaggagtacgatctatggtgaagtggtttatggcaaaaatgcattgttagattgttaatgttaccggtacgtattttatggcaattggtgaaatgatcgatcaaaccaactctcatcggtgcacatatgccttcaattcaaatttcggtttgtgatggaatacatctttggcttgaacattttatcaaacatgcagtattttgcgtaggaatgtgcagtggagcgaaaccaatatctcgagtgcctatatacactgtgaaaattagtctaacacattaaaatatctgattagctagttgtttgttttcctttgtctttaagacagtagtttagagttgttctggagctatttttgtttgtttttttgtttttttgagggaacaccggggggaaggccccacctgaattggattgcccctttaaatcataagattgagaaaacgtaggaatagaaaaaacgtaggattttgatagaaatgtaagtgtaaaacagaggattgcaaaacgcatgataaacacaggaatgaccatctgattgaaccacgggaaaaacacaggaattgagaga

SEQ ID NO: 35379 - DNA, 3022 bp, Oryza sativa
tcctgcagcccacttttccttagcctcaattcgtttgtcgttgtatgactgatgctggttgttaatttgaagttggtgcggagcagcgtcaacatgggatattattcgagtctcttcacaattttgtaatggtgatcgttcaagctgctaacgcaatgtaactactcagtgccgtgatctatccagttaatataacctaattgcgtagtattttacctgggattataatagtaaattaagtatgacatctcttgtgtgtcctctcgtttctgtgaaggaactttccattgcctgattaaaacctggaccattctgctttttgtctaattaatcgccacttgttgcgatgctcgtcaccgccggtgactcttgcaaaaggcattcgttgtagtactcgtaccagtgatactagagtacttaacaaagaaagcaacataataattaattaaagaaagaagttgattttcagaaggcgtggaaagcagcaggcagcacaggattcttcgagacagcatcgtccaaagccgatctgatgggagtctcacgtatgcctttcttttttttttcttccttctctttccttcttttttttttttgggtcatagcgagggcgattgcagcagaaaccaacctgttaaaagtgttaagcaaggcgcaagccagtagtaataagcagttgaaacgtttttttgctgcttcaaatggtgccaatgcgcaagcgaccatggtggatgaacctgaggcttgatcgatttgatgtgttttccctaatggcgacactggctaggcgacgccggtttgtgcatgacagctgcgtgcgacggataaggtcgtcgtacgcacctggtcgccgccggggacagccgacagcgacggcgcaacacgcgcgcgcgcggccggcgcacgagccgtgcctcgccgcacggcacggcgcggccaccgcgggagacgcacacagacacaggcatatccacttacttacacagatggatcgagcagtcgcgactcgcgagtgcttggtcgttaagcatttcgatcgacggtgacacgttcgtcacagcgacgacgcccgtgtcgcgggccggccggccacaatgataacgataacgatagccgcttcccggctggccgctggtcgccgtcgacgcgcgctagctgtttcggcacgcagccgtttttggtgcgcgcgagcggaatccgctgcttctacggtacgtcgcggcgtgcgcggcctcctctcctctcccatcaattgacgtcgccgttgcagacttgcagtcgagttgcacaatccatcgcgttttttttttattttttgaactttttaaatttttattttaaaaataaacactttgaaaatatattttcaaaatctgaacattttagctacaccagcaaaacaacatggtcacgctggtttggctgacgtggcaatattatttggtcatgccaacctcgctggcgtgacataattatttgtcgtagcaggataaaactgtcacgtccactgtgtatggcgtatcagtattattttatcacgtcatgttggctggtgtgaccaaaaggttaatattctataaataagttttggtatggtctatttttaaaaataaaaataaaaaagttcaaaaaaaaatcatccttcgccggccggcggggcccccgggtccatgcgtctgttgcattgcacctgccagtcactggcatgttggaatttatgtagcctcgacctcactctgtagctgctgctgctgcgactgctagtgtgacgagtgacgacacatcttacaagcaattgttgctgcatgccaatgcttccaatttgaaagtactggccgcgcatgttctctctccagtgataaactgttgatcatatcttcagattagataattacagataatctgagacgacgaacacgagctacagtaacaacatagctttcctactgttgttgtggctatctctgcctccctggcatgctacacgccagtacacctcctactgcagattagcagactactagtatcactggaggatggagccaacttgggggaagtgacattcacatggtggattgggttagaaatatgatggccatatttcaataaagtgagttaaattacaaggtcattagtttcttgtaaactctgccacactatgatttgcttcacgcaaactctagtaatgctgttcaattatctagtagtagatgctagctagtaataaagttggggatagatcggtgaaagaatgattagcttgggcaaaggcaaaccccacatgaaaatgccaatgcaaatgtgcggtttggggcaaggaatcacatcgatcgatcacacatgatgattgcaaagcagagcggggcacaccacacctcattgtgctgtgccgtttccatccacccaaagagtccaatccccatgtcactaaaccacactaaccttgaaatttcttcacgtctaattcaagccgaccacacacactttgatccttgtaattatatcatcatatatgcagaatcagattcgatcgtggaattaagaacaggctgagagacacgagtttgtcaaacgtctgaattttctatgaaatatcaaatcctgaagggcccgactgaatactcccagttgcaagactttgactgtactgttactaaaggcatataaaatagtaccagaattcaggtaaagttcacataaactttcgttgcattccctcgatttttttggcatgatcaatgactttgactgtactgttactaaaggcatataaaatagtaccagtattcaggtaaagttcacagaaactttcattgcattccctcgattttttttggcatgatcaatcgtctgtcagcacaaaccactcagccgtgcttatcaccagactttgaaaccaagcaaccactttgtatgccgatcactgtcactgaagattttcttcactagaacagtacttttctgaataaattaggtcgtttcaatcgacagctagctccaagcgaaaaacctacacatcaca

SEQ ID NO: 35380 - DNA, 706 bp, Oryza sativa
acttttttttttgcgggtactatagtatacagttgtttatgagttgtatgcaagtttaggtacctacatcttatttaatttgctcttgatcgtcaactgtgtactcctacattctagaagtaaggcatgcatgattattttcctcactcagctaaataaagtgtacccctccgtatttgtaaaggaagtcgtttaggacaatgtttaagtcaaacattgggaatataaatcatgaataactctcaagttgttgagtttgaaaatgtaaaaattatatgaatagatttgtcttgaaaaatactttcataaaagtatacatatatcacttttcaataaatatttttatagaaacaagaagtcaaagttatgttttggagaccgtgtcgctgttctaaacgacttcctttacgagtacagatggagtactcgacagttaaacttgcttgaaaagctgttacagcttcaccttgtctatgccatgtctgcttgcttaaacttgactatggttctgttcactttgatgctatttttaaccttaccaaattttagtaaagttgttaaaaattagctatatttagggcatgttcactttgatgccaaaaaaaaaccttaccattttggcaatgccaaaattttggcaactataccaaaattttgataactcgccacaattttgacaggatttcttatataattatcaaaattt

SEQ ID NO: 35381 - DNA, 639 bp, Oryza sativa
cacttgcaggtcaatgtcataacatgcttatatgttgctatcttatgaaaatgttctcttattttcttttctgaaacaaagcagagtgttgggagaggcaatggtgaggacacactggcacactggccaacttcatcaggaataatgacggtggaagatgcctttctacggatcttgcaatacttggataaaatatggggaacaatatcttcttcaggtagtgcaaatgcaccaaaattatgttacctccctgtatatgccctacatttgttgccactgggtaacaatagcttatggtattatcattttctctttccttgggtttaagtactagcagcgattttttttttcactggaaaacacttgatttacttacgcttcattgcatggccatatttgagtacaatcatgcaaagcatccctgtaagatttaggataagggttgaactgactagattcatatgaagggtcaaatatgtactccctccgtcccaaaaacatcattttttgcctttatttggcccacaaaggcttcatcattgagacaatcaatgcattggagtttgagaaagtgggggacaaatgcattgaaatttgaaaagtggaggacattctagtcatttgattttgtattgggac

SEQ ID NO: 35382 - DNA, 615 bp, Oryza sativa
actaactttgctgcttgacatctattctttcctctcaggaaccaccaaggagatgtcaatatagagaatggatagacactagaagggttctaactccacctagccatgttgtgcagcttgaactaccagagcaatacagggttactaaagcgcggtttgagagaggagagggatcctcacgtaggggttagctattatcggacaacttggcatattgaaatttctactgtcatgcttccttgtcccattactgcatcgtcgttgtgttcaactattgcactacctccctcctagttcgaatctaatatcatctatgtaaccgcaatggaaatagttgtatcatgttcaaattgtactactatttcttcatgttacataattctccttgtttaagtccatataatgtttctacgaccgagactgcgataggcctatattaattatccgagtactgatacgtcgaataaggtacaaaataatacctcacttaacatatgaaattgcgaaacaaccaacttcaatacatttttataacaatattaacaagttttaccaataaatacttctttatttattattaacataacatagaaaaatcttttggccggacttttt

SEQ ID NO: 35383 - DNA, 621 bp, Oryza sativa
gcccaagcccgccgccgccactcccgagggcggagacgggtagatctgctgccgccgagccgccgccgcctcccctcccgctggatctggcggaggggagggcgccaccgttgccaccgtcgggccgccaccgcctcctctccctcagtcgggcctccagatctggtggacggaaggcgctcccaccatccgccgcttcctcctaccctcccgccatctacagccgttgcacctccacgccgtccgccgccaccatgcctcccttcccgcgcctcccctctcgcccttgccggatctggcgggatggcgccgccgcccctgccaggccggcgctggcgccgccgctacacgcagagatatggagaaagggagagagaagtcaagagaaatggagaaagagaaagaagacagccttatctcttccgagtgtgggccccgccgggagaagaaatatctcctccggctcggcttgggaaggtaggtgacggcttcgagtatatatagtggggacaactaacctcaaacggtttagggtttgaacccgtttgaggttagtaaacctcacctctgacgggccatccgattgcaactcgtcacaggtaactagtcacctgtgacgcg

SEQ ID NO: 35384 - DNA, 509 bp, Oryza sativa
tggggaagtggaaaatcgttgctacatttacagaccaactatcgtttgcatgaatgagcaaattatagtctcacctgacagctggcagaaaagtatagattgcaacactgacaatgaaagtggcctctactcactactttaaatgcttgtgccagttattcgctgccagtagagaacactttcattgccaagttgtaggtaataagattataatttgatcattcgtgcaaacaatagttggctgtccataaatgtagcaatgatcttccacttcccaaattggcacatgtgcgtgcgtgcatgcgtgtatgagcatgtgtacagaatcattaaaagtaataaatcttaccaatcctccatgctcttcctttggagtacctttagcacaatcttcagcaggggaagaacactcacgctcagcgcctgcttcagccatcttttttattccattctgcaaaagggttgttactccagttgcacagacagctgtgttatccctcataatcttg

SEQ ID NO: 35385 - DNA, 1206 bp, Oryza sativa
attcctgcagcccagggtaccaaaccaaataagccctttatttcttcctatatgttctaagataaatttatttttaagtaaacattatatctcaaagtttatgaaagtagtgtggataatacattaggagtagataaaaagaaaaataattgtattgggatttgataaaatgggaatattttagtctatttggttttgtattggtttgtgtgaaatgggtgaaaaaaacttattttgagacggagagattaattgttactattcgttgggtgataaaatatggtataacaatttctagagttaattatgggttattaagaaagcatgtgaaattaaataagagaaaacaataattaaatgaaaaaaaatcattgcaattaggataagttgagagaggaagtggtggataaatttgattgattattattggttgtgataaaaaaagtagatgtaagctgatatattctataataaatttttaaatcttataggtttatttgtctctgaataagtccatttctatgcactcatctacttctattcgagtttcatttcattaataccctttactaatcattatacctatatgaaccacccaaaaatactattatttctattaattgaagacattttgatatgattggcagtacaagtttcccagtccaaattttcccctattgccaaaaaaaagaaaagaaaaaagaaacgcaaacacacacatgcacacccttactcctatacacatctctctggtcccttctactactactactagctaggtccgattcgatcatatcgacgcgatgcaagccgttcactgaacctgcagctaagtatacgtaatacgttggcttggtgggtgcagtgcatgcactgatgactgatcgatccatcgatcgagctatatctctcgacgagacgagatccagtacgtactctttcgtcggatgggtacagtttaattatcgattggtctaggtgcaggcgcattcacgtactacgcgagcaggtgcatcgctgtcgacgatgccggcgacgtacgggacagcgaggtttcagggaagcgatggacacacgatgccgatgcctggcagtgcatgatcacgacttctcagtcaagaccatcaattatcgtccgactagctagaggccgggtccttgtggtgtttttgctggagccgtaaatagtagtgcactccctccgta

SEQ ID NO: 35386 - DNA, 629 bp, Oryza sativa
tatattttggaaactcatgctagcaggggtgtgtttagttcctgaaaaaaaataaaagttcaaagaaagttgagagtttagaaaaaaagtttgaagtttatatgtgtagaaaagtttttttttgatgtgatatgatgtgatggaaaattgggaataggaaggaaactaaacatggcagttttattccacaccatgaaacagagtaccaatgcaattagttgcgctgaactatcgttcaaagcacaagcataacatgcactggatgatctctcgcgctttgctgcagaatatatacgttagatattgacgaaacgatgaaatgatttgaactgaaatattatgaaaatgattgaaggatgatggtttaccatgtatatatttagttctataatgaaataattgtacatataattactatatgtttatatgttataagtcttgcgtgtttaatgagtagaatctatatatatatatatatagatttattatatgaatgtggggaatgctagaaagtcttataaattgccacagaggtagtatatttcgatgttaagttttaggcgattaataggtattagttttatagaaagaaggattattgggatgagccaaatacgacaatggttctc

SEQ ID NO: 35387 - DNA, 691 bp, Oryza sativa
aattcctgcagccctgtgacttctagtttattttctttttaataattttttagtttattttttaagtccgtagttactccatccatccctaaatataatggattaatgataatctgaaatgttcgtgtgagctaaaacttctgagagaagcggcagcatcataagcctcccaaataaaaccttagattagattaatgttctttagagcttacttttcttgccgtttatattaggttgttaaccaaccagtaggactagctaacttatatgggcatttaactattttttttgtcacttttagattgaacgtttaatcatttgtcacctatatggcaacgacatgtaagttcaagtgttaaataattatttgtcacgtctaaaattagcaaatagttaaatatcttgacttatcttgttactctagaatcttagatgcacttaattatcttactactatcagcctagtatctctctctatgtaaaactcggtaatttcaagttggaataattttgtggttcttaattttcttgatgcaccttaattttttttaataaataaataaattatgaatagcaacaaacataagagaacattattaagcccttctcaccaacttaggagttgggagacaaaatgagccaaaaatgaagcagttgtttcatagagtaaaaaaaatgcattcgttatttt

SEQ ID NO: 35388 - DNA, 952 bp, Oryza sativa
attcctgcagccccatagctccaatatgatggcaatgctatggatttaaactaatagttttatgataacttcaatataaatagtagtttcgtgatattcggttttgtgataattttaacgttaaatatgtagttttatgacacataaattaaataagtatttttatgatagtttgatcaaaatattaatagttttgtgaaatttactcttaacaatattatatatgctattcaatagcaattgctgaccatacaaaaacataacacttaatttgcagtaaagaaattctctgattaattatacacagctgctaaattctctcctcacttcaatccaccgtgcaatacagctgtttttcaattcgcaacgacccccatcgctgaagatgaaagacaggtacgcatgtactattcttctactacaaatggagcttattgcagctttgtgggacagccaaacggtcagccccggcccggtggttgatctgaagatccattgcatttgcacctgacgcgctcacaacaatttgacaatttgaacctgatagtgcatgtctcaccaaactatatagtactatcaattttacatgcatgttcatcactgaattggagaaacatgcaatgaagagagatcgacatgacatatactagtacatactattccatatgcaactctagatctgaactcaacttgtgaaattgtggcctaaatagtctgtacttcagcagcacacaacactgttgaaactctctgagcttcgatctaggacaggcaaaattaattgaattagcagactggacacaccaatcaatcatcctatccaagtacatgcatcgtcgtcgtcgtcgtcgtcatcgtcatcaaccattgcagttgcagctagagagctgaatatatacacaagttgcagctctttccatgctctatcattctcaagttgggtttaactttt

SEQ ID NO: 35389 - DNA, 649 bp, Oryza sativa
tagcttaggggtttgtttgtgaaagcttcggctctagctgcatcacttttggaactgaagctagtctaatcaaacaattttagctctataaaaaagaaatagccgagttgactagagtaacctaaaaaaataaattagatgtgtgagtggagttcgggccgctatatagaactcatctccttagtgatcgctccctgtttttttagccacttcaccatatcattactgtgaattatttgccccatgcctctaaaacaaatttttcttcatatggcattgcttaaaccactttctttaagttatttaatttatgtttattttcaaaaagtatttaatttatcactacgattaattaattagatgatctgataaataatctatttcaaacacataaaactgctgatatgaggtaaccattatttgaagtagagttcatccatcaaatttaattttaaatcttgatgtctataattacacgcatatgtgagattgtgctctcatcagcagagcatgtcttaagagagtgcgcttgcgagtgtgtacgtgagacggatggggtatgtaatcggggaaagaaaattcttaacctgatcaattgttgtatttcgatacgataaaccatcaccatcccaagcatgcaatgcctgca

SEQ ID NO: 35390 - DNA, 600 bp, Oryza sativa
aaaacttgcgcaagttgccgatcttttactccgagaaagagctagaatattctgcgctttttcacaattcagaatagaaaatatatgatgaataaggaattaaggatacgatcacatccaaaacgaatcgcgagatggaactgtagtgcagcgaaagcgccgtatcgaattcagtcggctctttggaagagctaatggctacactctaatgcaacccacaaagagaacataaaaagtgataaaagtgcagctttaataatggggattcaaacaacatgatatattttggggacctttttcgtgacatcacctggcttgtttagatctttcttcagtggatctttcatgtgttgatatatccttgtgtcaaagtaagaaaatgagatgcacgaataaggtcagagcacaagtgcaattctgggtagttaaatttgggaattgtaaaccagccaacccatggctggaaatggaacacgaccggccaaatcgagtagatgacaatctactcttgtccagagatattcttgtgctgccccccttgttcggcggattcaccgctgattcctgtggcagggcgccgtgaaagccacagcgcagcac

SEQ ID NO: 35391 - DNA, 990 bp, Oryza sativa
atatccaataccaccaagctaggaattaattatgagtcatgtaactaatgatgccgagattagtggtagtggccggcaatatgcatccatgaaaccgcttttgtttgtgtggtgtgcaactgtgcatgtatagaagctactagagagacgtgcagttgcgtgctataatgctgcctactacactacgaattagtgtgtgctcacgatcgatctccctagctatatgacgaccagggaccatgcgactgcgagcacacgaacatttgctacgcgtgttgtgtggttgccgatgaacaggcaggcaggccaaagctacaggctactgaaaaacacagagactaatcagatatccctcacctaattcttgaccggccagggcacacgaccagttcaacaaaactgccgtgtaattaggccaaagcgcagtgtgcacaccagcagatatataatactactatcggcagcacatagtactacaagtcgatttgccgtatgccgtcgccggagccgcattacgtgtggcggcgtgtgtcgacgtgcggccgtaccagctgcgggacgtggtcgtgtacacgtgcacgctgcaccctgcaggcctgcaccctgctgtgcgtgcccttcacatgcatgctcgtctctcggtctcgttcccgtacacgtcgcgatgtgaaagagagggggaaaaatgcgtatcgatacgtgaccgtgttgccgtttcttctttcttttttttttccgtgtgtgtcgtttcgttcttgtttgttcgggtcgcggcgcgggagacgagctaacccaacggtgatgatgtcagctgacgtggcgccccggagcggtccagctcagcaccagacaaaagccggagcggcggcgtcccgaggccggcctacgtggcaggaggacgtgggggcccaccgtcgccgcgcggttcgcatccaacggttctttttttgaccgtttgagctttgcgacgccgcatgatgccccccccct

SEQ ID NO: 35392 - DNA, 673 bp, Oryza sativa
tatggcaatcaacatcaagatgatgctctgcaattgaaataaattgttggtccattgggagatgacaacacgcatgatggaggcgcccattggtaaatagcatggaaaataacttttcagggggtaagttttcttgcttccatataattatcataagcttgcacagatcaaattgaagctcaaagcagccctgatatgtcacagtaaaagaacataactatgttgctaaaaggatagcaattgcatctcatccaaactaggtcgaaaaatctataatgaccttgcttaccttcattgccaacaaatcaaccaaagaacaaagaagtggtacaagattttctgatggctgctgagatatcataccaggagaatagtaaccaaaagttttgatctttgaccacaggccaaatacattctgagcgctatcaaagattacctattcagatgacaacgatgtaacaagcatgatcagaaaaagcaaaaggcagaagtatttattttgtttatatacttgctaaaacatctaggatctgttgtaattacctccgcaccaagattggcttcctgcgcacaatgtgcatgcaggcagtatgcaatagctaattgatggattgcaggtgcattgccttgagatgaatccagtgggatgtctcgctggtttgagaaagaaaaa

SEQ ID NO: 35393 - DNA, 568 bp, Oryza sativa
aaaggtgattcacaaagaggaaaaaacacaaggtcaaaggtagtttctccaaacagggcttaaagtagcttcctcatatagttcaattttaagaaacaaagcaaaaagtataagtaggggccacacataccttcaccttttctctcttaattatcctctcgcacaagagtcgcaatttttccaactcaacctgcaaaattgtaatgtaaatatttcatcagggattgagggatcatttaatcaatgttcaatgagaatggacatccttcagacatttcctcaaggattgtttgaagtacaaaaaagaaatacaaaaacaaatattacttatagaaatacaaaaaaaaattaacagggcctctagaagaaagaggaagtgagggaacacaggatttgatgcactggaagttagaaaccttagatagtaactgaacaaaaatattgtatcacagatcaaaataggaaaagtgaaatgcatcatatatacgaaccctcattcttttcatgttgttgaactcctcaagtccatactgttgcatatcagcctgcatcaatttcgaataacaaa

SEQ ID NO: 35394 - DNA, 688 bp, Oryza sativa
tttgtcttgggaacaaacaggccgaatacgcctcgctgctacctctaacctcctacccccttcagttcctaatttgttgacgttttagacaggattacacataccaatgagtgattaattagtgttcctacttcctgttttacccctaacaaatacggtttcgaggtacaccaaaccacaacctgctcttggtttgagtggccatcgcatgcaaaactaaagctactagtcctaagttcgattcttggtgtccacttatttttgcactcatgcacaacgccggcagcgtcaaccacaacggcggcgccgtccacctgttgtgcgagcttcaccaccatggcgccagcgtcgacctactccacggcagcggtggcgtcctgcacgacctgctccatggcgaaaagtagtgcaaggaggcgaatagaaggcagcgccccgcgcagcatgcatgacgttggaaataatgggagtaatggccggctgcatgcatgcagggcaagcaggtccaagatgcaaaaaaaaaaaaaaaaagctaaaacgtcaagaaatatcacacaatacaatggttcaagagctaaaacgccaacaaatttcaaaccggagagagtagtccaaaagtacccaagtgacctatgggcccgcactatgtaacgccaaatcaaccaatttgaccgagcgcgtaccactt

SEQ ID NO: 35395 - DNA, 1540 bp, Oryza sativa
aagaagattcagaaaggcttgtctcgtggcatgcagcgccggtaacttttccaactctacagctttgaagtgtttattcatgctctttttttttttttgctggtatattactctctacttaattctgaaaagaagaagaaaagaagagaagcgacgcatggctaaaaatttcttatatttacttaaaaaatctggaaaataagtcttcctttaagtcacttgtcactaattagaaaaaaaaaggaaaaaagaagagaagcatatcaatgttgtctatcatctattaaagaagtaatatatattatgctaacttcatgtctgaaggaatagtgatattttatattctgcatgacaaattgtcaatgttgcttacatgagatcatttcgggtacgaccggtattgtttactcctcttacgtaagttgatcttctacctaacaaagcagtcaaaaatctgcgtcagttgctgagaaagtcctcgccttccatatccgtttcccaaccagtggatcagtgttgcttgccactgccattaaaataaccccaaaattcagaaaatttgctcaaagctaagctaccgcatgataaccctcagagacttcacacatctgttattctgtttctccttttcaggtaagaaaaaaaaaacggcaccaaaggaaaagacctcctcgagatattataactaagaagaagcacctaaaacgggcagagatattttgtttctctttttcaggttctgacttcactttgcactgtcagtttaccaaattagcgaatctgctgtgtgttgggattcttgatcattctgagtgccacacactataaccgtacaagacctggcaaagtcctgaaatagttttgttgagatggacactgaatttctgaacaaaagtttcagtcacctaagcaagcagtagcagtaaccatgttcagagattcagaggtggctgcaacagttggcctaataaataaaaaagctaaattagtcatcaaggggcgcaatatttcgagggtgagtcaactaacatcgatgacaatgcaagaaaacgagcctccaagatttctccagattgccttgaagctgatcaagattggttgggtaatttgcacgaactcagtactttttttagataactgcacgaacttagtactggatacatgacagattaacaggtgttttttccctaatgaaagagagattcagattgctgtctgaatctgaaatctgaacagcaaggatacggaaactctgaaagagactactcatccaacttgatgtaagtacttgatactaatcttggtaagggctggaagaattgcctgaagattggcacatgtacgttttcctctttgaaattgtcgccgggttatcgtcgtagaacgctgtattctatccattttgacgaagacgtgaagaaaaacggtgtctgtaattttgtcccaattgaaagaatacagtggcgttgatgttgtacttgaacaataataatggctgcatattttgtgtagcttgtgtagtcaggttcaggtaactatt

SEQ ID NO: 35396 - DNA, 1626 bp, Oryza sativa
tattttctatgcactagaaaaaatacacgtacgttgcaacgggtgaagattattttaatcttgtaattgttatacggtttagctaatcttgtaattgttatacggtttagctagggtgaaattcaccatggaagttcgcttggatattttattttagaaaatcatgagatgtagttaggagtccgacttttatctcaagttagcatgcgagttttttttaagagattgcttatacaactcattttgtatttccaaaagcaaacgaacttaaaatttaactcaaatacggatttgtatttctataaacgaataaacttaaaaaccgactcaaacatggatgatataccaaaatactggtaaaaacatctttaatttttataatagtagacatatgcagattaacaacactgcaaagacacacgtgtgtgatgatagagttacgggtgcataatttcatccaccaatttcaatttatattattttcgggttacaagtattttttaagttggtacagagtctaagtaaagagtagaagttatatactatctttgtaaaagaacacatcgattgagaggggataagggaaataaggtgtaccatcactattccttgctggtggtgcatggcaagatatggaagtggcagacataagcacaagaactgccaagcacagaaccatcatgctattgttcttcatgagcgccatgactgcaatggtatatgtatgtatgtagtcactgtgattgtgaaatggtatttgttatatatagtgtgtgtatatatagagagaggtttggataggctagctagcacattaattaattcatatttttattattttattggtactaagtgataatgcatttaggcatggatatcaatgttctgttatagtggtgccatttatagtgtatcctccatatctgctaggaaataaaagaaaaatcctccagatatgctagaaaataaaagataaatccttcaggtcttctagaaagtaaaaaagataaatcctccagatctgctagaaaataaaagataaatccttcagatctgctagaaaataaaagaaaaatcatcaactatgggcctggttcttcccacgcatgggctatagatgggtccaaattagactagatctaaattcattaggcttatgtgtttctccaaggggagtacctatacatctttcgaaagatttttataatcgtatcacacagatttttaatctttagattaaaatccgatagatataataaaaagcaaaaagcaattaagaaacaccataatggacactaaattaccatatcctcaataaaaagaccaaatccaatacaaaatttaaaatttacatgcgaagattcaaaaattacagtgtaacttacaaaagttacagtgtaagtttcataaattacactgtaacttaccagaaaatgcactgtaaatttgagtaagaaaatcgagtgagagataagaaaaaatctttcgagtgagatatagcaaaatcgttctccaagtgcatctttctttttgtttggtgcttattgcttagtaaaattcataaagttttgctccaaaagaaaacggtaaaaattcatagagtattttgcactttacaccaggtaa

SEQ ID NO: 35397 - DNA, 1302 bp, Oryza sativa
gtatattatagaagttaagcaaagtgcgatggcatattagaacttgacaaacctagtgacatattgttgaataaggacaaaatcaataacacacgatggattctctatatattttatggttgtttagttcattacctatctactatcgtgcgacatttttataaaaatttaaatcttatactataagctcatatcttacacattaaattacatacacttataatataattttcaaattataaaatggccctcttcacattttataggagaaatatgaaaaatgatttattatctatttaattatgagaaaaaatattagtccaaattaacgtatatttagaaaaaataacatgtaagaattacggaaatacctacaatcgtatatcatgcagtgagagaaggagaccacaatcgaatgctttattgttgagcaaaattgatggcattaattttatctttttttagctgaatctatctaaccataattaatcagtccgtgttagtagaagtctgcatcttcatgcatcaacatatcatgagactattagtaaaagccaagtacactgaccccacaatacttaatatatcacaagactatcaggtaatggacaacttatctttaattatgctaaagacttagtatatcacaggagtatcgggtaataatagacaactcatctttaattgtgctaaagaaaaaaaagtaaattacagttcgtactatgtattcttaaaagttttcatattatgttatcctttaaccattcttttcatttatagaacaactaactttacatttcaatttagaccaccctatttcatccatctccaggtctagtgactcagcaaacacacactaactctctctctccatttttctttttccctccgtgtcgatgatatgggcccaagggcatttttgacatttcacgcgatttctctctcctccctaactggaaattattattttaatcggcgcggtgtccactggtaaattatcacgtttatggagtgttttccccaaaaagtgagtttgggcagtgtcctagggctaaaaccacacataagaagtgtcctgtagcaaaatttgccttatttctgttgggtgcttattgcttagtaaaattcataaagtttagctccaaaagaaaacagtaaaaattcactgtatattgcactttacaccgggtagtagtatgtttctttttctttcaccaaatttagcatatattttcactttacaccaagttatcttaaaataagttccagttaacatcagggtacatcaagaaccctataaaa

SEQ ID NO: 35398 - DNA, 1631 bp, Oryza sativa
gatccgcccctgttcacatgctaatttgtcagccagattttctgccagcctgaaaattagagtttatgtcaattatcctggagttctatatatgcttggtcaccaggacagatgcaactccgtaataagaaacattgaagttatataaaccgaaaacagtatcaacgcttcaatcattgtatcaacagtacatttaaaagccaacttctatgatgcaaatttcatagaatggcaaggttaatcaactgtgtctattagccagcatccgaaattctggggtgccatccaaactgccagtaggtgttaaggctgtgtttagttcacaccaaaattgaaagtttggttgaaattggaacgatgtgatggaaaaattggaagtttgtgtgtgtaggaaagttttgatgtgatggaaaagtttaaagtttgaaggattattttggaactaaacacggcgtaaagcattaaatttgttgctaacatgcacaagataagctttcggttcaagaaaaagcgaaaaatcatgcaataaaattttggatggagggtcttctgatattttgaaaagattcccatggtgatttgttagcaagattttccgccagcctgaaaagtagatagtttatgttaattatcatagagttctatatacatggtcattaggacagatacaattccgtagtaaggtacattgaagttattatcatataaaccgaaaacagtcttaactgcatgcttcattgtatcaacgctacatttaaaagccaaccttgtatgatgcaaatttcacagaatggcaagatcaatcaactgtgtgccatccaaactgagagtaggtgttaaaaccattaaatttgttgctaacatgcacaggataaacctcggtggcaacatctagctgcatatcaaactatttgctgagatcatgtatgtacgtatacaagagaaaaacaagcgaacatgaggtcatatcagaaaaagtaaggaaagtaatttaaccagcactacagaaaagaatatcaaaatcaaccatagggaaaatgaaaaataaactattaataatgcctagataaagttagaaagaagcaacagatgaatgataaagagacattccaagatcagagcatttatataattggctatgattgcatgcatgttattgcagtacggagtgcaatgccatcaagaacaagtactcgagatagcagacatcacgagaataccttttaaacaattgttttattagcatcaacttcacctttagccttcaaatactcttggatgcctgcaaaggtctgctatgcaaatttagtacttcctaagttcctatctatctatatctatatactggtatactggagtataaaggcactagtggtggtagtggctactttgcaccactactttttgcattttttagcacacgatattttctggtattatgcaatagtctaatatttgtttgaatcaagtgggtaccatatatctatactactataaaaagaattaggggtggctacttttgcacttttacacattagcccctgacatttgttgatattatgcaatagtctaatgtttgttggaacaaggttctagccccatgccaaatgtgtccaaaaaagaagagcaaa

SEQ ID NO: 35399 - DNA, 676 bp, Oryza sativa
cagatggatgactactaagttcattatgaacaacacatcgtttgctcagaacagcgcagtgaggaacaaatctgactgctctttcaactgcaaagcatgcaacatcttcgcaatagatcagaaagtgtaatattgttaagagatcaatcttctaaacagttatggaaaaagtctaaaacaattaataacatagattaatatgtgatgtatcattccacgaatattcgatcatgatcaaatttaacttttataagttctagaagaaaaacaaatatgaccgtaaaagtacgttttactatttagtttgttttttacaactcgtagaaatcgaattctaacttgcattttgtagggtggtatataacatattttttttcattttattaaaatattactatttaagtgatataaaaatacgacgagacattctctcaaaaatgaaaatacatactatgtctagctacttgtacatgcataccatatagtttccatggcccttgataaggaagtgagaagtagcgattgaacctgctcttaaaaactaggaaaattaggggccctatttattcatatgactatgagtagataaaagttttactttgaccaaaggtgaatagatatcacaattgaactcttcatccatcatcccctgaaaaaattgaatggtctatcaacc

SEQ ID NO: 35400 - DNA, 525 bp, Oryza sativa
ggtgttgctcatctccaaccaaacaagaggttttaatttacagcccacaggtataatacataggtaaccaagttgggtttcattgtttcacacgtcttctacctggtcaatgcaaagaactgttctttctcctggtttcaaaactctccaagtacgccacctaggcttattaagtatgtgacattatactttaaccattaatattatttataatatatatataaacgactacaaaattagtatcatataaaaatattttaaatacgaacataatggtgctgacattaaacacatgtattttttttactttaattattaaccaaaattcctgatatcttatattttagaatgtacagacactcataacgcacgcacactcacttctatgaacataacacacgcacgcacataaaccctatctctataagcatcttctcaacgtcgttactaccgaggctcttctaaactaggctacatgtactttcgctctaaactttaattttattctcgtttaatttcgtggcc

SEQ ID NO: 35401 - DNA, 2231 bp, Oryza sativa
gtcgcggtcgtgctgaccgcatttctaccccctctcccgccgcccccactccgccgtcagccacctctctccccctctcccgctgtccccactccgccgtcggacacctctctctcctctgccagtgcgcctgctcgagagaatcaggagagaagaggagaaaaagaaaagaaaggataaatgtggggatcactccattttctctcacttacatgtaggcccacatatttatttatttatttatttatttatttatttatttatttatttattactgactaggatgccacgtcagtgaaaccagacggttatactgcctcgggacttttatttgaacggttttacatagtttagaggtacacatttttatattgcggttaggggatctcaaacaaactcagtgtaaagttgagggacggccggtgaacttattcctttcacacttaaacacatcatggtgatggtggcattctactgctagcatccttatttttttactccattcgtctattagtatattacccgttgattttttatacacgtttgaccactcattttatttaaaagttttataaaaatgaataagatataaatcatgcttaaagtatgtttagtgataaaaaaactcctaataaaataaatgataattacgtaatttttaatgagaaattttggcaaagatgattgatgggataagtagtaaacaaattaccttacgtgtatggacaaatagagggctaaaatcgcggctccatagtttgctctttagttatcaccctcaaccaaaatttaaattttaaagtttattttgatgctttttcacaatcgtttatttttccagtattagcttttaaatcgctaaaaacatatatatataattttttatctataactcttttcactaataaacgttcatttataataaactgtagacatagaaatgatgaaactgctttgtacttatggacagcgggagagaaacggcagcaagctagcagcgtgccgcaaagatacacacaggttagtagacctaaaaactacagtatcaatcaagaaattaatggaaactcaatttcaaattttaagttcgaattcaatttattctgatcggtctgcttcggttgctagtcgattattctggtcgttttctcaacaacaacgaatggtgttggtgggagtaggcagacgtgacggcgaggctgagtgagagtggagagcgacaagagtggcacatgaaaaatgttccttgatgcaaagaaggcaaggagcaggtggctgactacttgtcaaaaaaaaaaaaaaagaaactagaaatgttagcatctctgcttctgcacacaagcagcttgtcaaaattttctcacttatattatcaaaatgtttgtcctactaagaaagctataccatcagctaatctagctaaagatgtatatccatgtactatatatgcatgcaaaggcaacgggtaagaaagagagagtgacttaaggccttgtttgtttcagcttatgagaattataatctagattattaagccagattgctataagctagattataataagctgatataaaataagctgtgagttgtttgtttgtctggattattggaggcatggattattgggtttgaaaggctaaagtctataatgccctcagctatctgttcggttgatggcataggtgggtaatttttctcaggtatgtaggggtagtgggtttttagccactcaataatctgaaaaaagctcttttagagcagtttattagattataataatatgctataataatctacttgtttgtttcagcttactcctaataaggtagattataataatgctaagctgaatcaaatagggccaatctcaaggtgatcctagcagatgaaaaatttatatatttatactacctgttttctattctacgatacagttaaattctttaattcgtttatttatttatgttgtttttaaaatatttatgcatgacaaatatactgtaggatcgtaaagggcctttcccatcccaaaagctagccattgaggtgaggggctcccccacttatatcttaggttatttgcccttccacaactaatgtgagactattcaacatatactagatgtactacttacttgaagtactttttaatgatagatcttgtcgtatttttttttaatttgactttactaagtaaataaatattagtgatcaaaccttttaggaaaaa

SEQ ID NO: 35402 - DNA, 571 bp, Oryza sativa
tatctatctgtatcggatgagctagcgtgcttcagtcatgcatgtacgatcgcctgtatacgctttttagataaatgtttgactatttatcttgtttaaaaattttatataaatataaaaggtactcaatatatatttaatgctgaaacatatcacaacaaaataaataataatcattacatattatcttaaataaaatgattagtcgaaaatatgtcaaaagtcatgcatgcaagttaattgggaggatcctccaattgatttattgtgcatgtatgcatgctgcatgaagaaatatctgacaacaatgcttaattattcatcaagataaggatatatatactatacattatacatactccagttaattaccgtaacatcaacaatgcttaattaatcggaataattaactatttgctaattagtcactgcaagtttcccaatatgtatgaaccactctatatatatattcagatgaaaatccaaaaacctggtcaaggttcgatggctatactaagatctatttctgtcgttgctcagttgtttgaagaatctggcagtgtcgttgtga

SEQ ID NO: 35403 - DNA, 744 bp, Oryza sativa
tatatattacaagtaagtttaataatttataccctgggttgcctcctctaaagtaagaatttgcaggttgcacgcagtatttgtaagaacaccggattccttcatacttgagtttgtaggttgtctttagaatgtagctgagcgtgtaaatcactgcatcttctatcgtatcttgaatactaaagtttactaattgtttgccctgaattgttatattttcatgacgaaggagaagaattgatagtttattgccgctctgaataacaacactactagtgctatagctcagttctccctgatctccaaaagtgataataacattcattgaagcattatatagcttactatttgcaattgttaaaatataacggaacttatcaccacatgcaagaatgattccacattgagataaatcaccaatctgaatcaacacgcaacagtttcgacaattctcatgcttttaacgcatagcatctccgtaaacatcctacataaaagaaaaaatacctttgctggtcaaaagtttttacagaaaattataacaaatacaactttggagcttgtaaaaaacaccagatacaactccaatatgaatcaacacgcaacagtttcgacaattctcacgcatagtatctccgtaaacatcctacataaaagaaaatacctttgctagccaaaagtttgtagagaaaattataacaaatacaactctggagctcgtaaaatacaccagcacaacttaat

SEQ ID NO: 35404 - DNA, 930 bp, Oryza sativa
taatggtattagtactgataattatgatatcagtactgagatagaaatagctggacaatgtaaagaactcatctttttgatgaaggtccaagttcatgtttattctgtagctgtggtttcagaggggttcagaataagcaaaaggcatcggtacttggtttggtttcttttttcaatgtgcatctaggacaaactttgtcctcaactcctagtcattggtcctctccctcatcacaggcttgttgtaggaaatggaaaggccagagattttttttgcaggaaaaaagtacagctagtgctagtagtaatactgccaacatgtagtactcgttgctagagatttttctttaaagatactctcttccccagcatgctaaaccattcaactgacagtacaactcaccgccccaatttaatcttttgattgctccatttgggggtttcagaggcgacatgcaacagtgaaaaccctgtagaggatctgaccagggaaaagagtgtgcattgcaatgcaaaggctgcagctgttgttggatgggggcaagagattagattgattcatctcaaccaggcacatgattctactgttgagcacactgatgaaaaactgtagctgcttttgtcctctccctacccacactttccaatccaacccttatacaaacacaaccacacacacaccccaatggcaccaatgatcaaatcaagcaaagcaccactgctgctgcaaagaacaccagatagatcaaactctctctctctctggtgttgctgttagttggtagtttggtactacttggtactctgggaagaagaaagagattattatagcagaaaagcagcaccatggcatagctccaggcagcaaaaccaggtctgaaattatccctatcttttctttgcaagaaccagaatctttttatggcatgg

SEQ ID NO: 35405 - DNA, 663 bp, Oryza sativa
ttatagatataagatatattttaaagatagaatcttaaaagataagataaagttttagagataaatctactctaatagtctctatctcctgtatacgcttatatatagaggatcgatctaatagatcggagaaaataacataatacaacaattagattttctacaccaccatgatgtagtagaggtagttggacagctcccgcgcgatctccatgtgcttcctggtctctcgctgatcgacggtcgccgcactcgccgcggaggcggcggcgccggccgcctgtgcctcctcgcggaaccgcaggtccgtcgcgatgtgccatatcagtaggctctcgtcgaactccttcttctccaggctccagctcaggttgctgatccgctcctttttcatcacttggtcccccctgcaatccgtcaaaatgctgtacatgctactcgtcgtcgtcgtcgtcgacgttccggtttgggttggagtcgtagcagatgcagatggagatggagatggagatggagatggagatggagatggagctctcactcgcttccgctcacgctcacgctccctctccatcctcttgtcgtactcgctgagacggcgaaccttctcctctagctgggcgtagatgaaatccttgagcttctcgctcaccgggacatact

SEQ ID NO: 35406 - DNA, 685 bp, Oryza sativa
ctggaaatctgatggctttgttgatctttccaaactttccagactgtatagatacagaagaaaagtattagtcaaacactaaatacaatttcaatgcttgttggacttattcaaaactaggataaatgaaacaatgaactcttgaataagtaaacaagttccttcagtgttgctattataagaaaagcaaaaaaaaaggtcttattgtagatgatacctgatatcttttcagcgcaatagtcaggacatttggtgcttccgatattgtcagcttctttttagcgcgctcatgcgatttgcatctgacattacatagtagagttaggagtatcagcattagggactaggcacaaaagcagtcaagttacacagaagtgattaaatatgtagttattacagctctaacacgatacatttattatagaactagattaacaggacacgtcttatgacatccaccttcctattatttcacagaagcaaagcaattttaacaagcaacagagcgttccaccaattctttttcaaaagtccctcgagaagatatctcgttttcaagactaaaatatatgcaacttttgcatggatatacatgacaatttctgggaaatcaattttccatctcaacaatttgccagatctgaaggcactactcatgtcgttgtagaaagcttggatacggtag

SEQ ID NO: 35407 - DNA, 1904 bp, Oryza sativa
ttattaaatggtgtatagataagagtgagagtgtagggtaaaatagaaaaaaacttgaatgggaagtgattaatgggaccatttgtattttattgtgataagtatgttgggacaaattcaaattctagaaatataattattacgggacataggtagtgagaaggtaagtcaaaactgatcccttagtaaaagttgagatctagcctgtcggcataaaatggaaatgggaattaatttcctcctaactaacccttactcctacataggtactagaaagcattaattttctctctcgatttctcatccacatctcaccaaaactcgcatgtcctcaaaacaaacaaacccgtaaatagccttatcgtctcttcaaactttcaatcccatttaacatacgagtactgctatacatctaaccctattgttcgacccctgtccaaccctgccgtatctaccaatcaatttactccatacgagccaactgctctccatctgggctagagcaaagagtaggtaagtactggtcggatgcaaattgtacacgccaatcatatgtgtagtgatttccttaacacacctccctccccacctatcccaccccaaaccaaatgtgtatggtaattgctaaggtatgtatatagtggcgatgtcatcatgttataaccttgtatacatgatctacttttccatatgcataatatagttgatatctatacttatacactaattgtacttcgataaagctcccacattaagtagagagattttgctgttgattaggcgcattatgtcatcataggcgtagattgtatagagatcatattagataaagcatactctctccatcctagaatataatgattttcaggggtgaacacaggtattgagaaagtaggtagatttaaataggagaatgttatgattagatgaaaatgggaggtacgtggggaaattgaatagtgacgggttgtgattggttggaaaaagaatgctggtgaagaagtagttatattttttgataaatttgaaggctaaaattgttatattttgagacgaacggagtataatataaggcccacatgcattttaagattcaacttctaaactatttcactaacaattagtataatatgaattagattttatttactaaaaataatattatttgattgcatatttgaatttactttcatatggttataattttattgctataaatcttatggtatatgagaaattataaccaatgattattttttagtttgtttaattttagttttgggggtatttgtaatttaaaaaatgaatttgcacccgtcttggtctcttaatttatcaattaattaatttaatttcaaaatttgaagttgatgattaaagaattgtaactgacgcactgtccggttctggctgaataaaatagggatatattccttgaaaaaacaattacgggacagatagatgggagagttgcttctctgatctcatcaagaccttctcgctaaagaaaacgtgcgggaggaagaggagttgaccaatttgaatagttccacgtgatagatcgagaggatgcagttgatgactgctcctgttttattttagtacagtaagtatctccgtctaaaaaaggactctaagttaggactaggactctgcatggataaaatacttctacctcgtgattcatgcatactcccttcatactcataaaaaaggaagtcgttttggacagcgacacggtctacaaaacataactttaacttcttatttctataaaaatatttattaaaaaatgatatatgtatactttgaaagtaactttcaagacaaatctattcgtataatttttacattttcaaactcaacaacttgagagttatttatgatttatattcccaaggttt

SEQ ID NO: 35408 - DNA, 1522 bp, Oryza sativa
ggatcatgagaatatcttttattttacaaagatatataaatgagagattctttcataagccgcaaattttggtcaatgtcgcccaattatcttcttcttttttttttgtgtgtgcggagagaggaggtgcacttgctggagtacgtagaaaagcgagtgtgacatgaaaagaatcgttgcgagagatatcaccctgcagagtgcagtagataataatctagctgctgcctgcacttggtggtggggtggccagtagatacaagcgatgcacactcattgccattttgcgtccaagtaccgtacctcaatatatagcttgtcccagcaaattagtacacggccacaactagcgtactctttgtacgagtacatatactggcagcggcagaagcgtacaggtagatgaactggctgtctggccaatggcaacttcagacttgggagcaaatcatcttcacttcatacatgcgtgtgtacctgtgatcgattgccaactttttctccgtcaacgagtacataattctgtctctgctgtttcttctagtagtataggagtacaagtatggccgtgtttacttcgttggccaaaatttattttaaagtatacggatatatattcaaagtattaaatatagtctaatcataaaataaattaaagatttcgcatgtaaattgcgagataaatttattaagcctaatcaatccgttattagcaaatatttactgtagcatcacattgtcaaatcatggcgtaattaagatcaaaagattcgtcacataatttacatgtaaaccgtgtaattggttttttttcgtccacatttaatgctcctgctttatgtatgtgtccaaatatttgatgtgatgtttttttgccaaaatttttttaatctaaacacggcctatatatgagtcgttttgaccttttgagtaattgttccagttgtttacagtacattgtcatctccttttcttttttttttcttttggcctttgtaagcagaaatttgtggtaatgaccgggaccatgtactgtaaggagtagtacaatatctcatgagagcaagtttaatagtatagctaactactagctttaaatcatctatagccaatttaatagccaatttatataatagttgattactatactattaatatctgatcccacatatcatacacatattacgtcttagagtccgtactgcagctggctacggatccgtagcccgctacactgctctctcttattttatctaaaatatatttatagctgctactgtacctgctctcaagatacgagggcaggcatagtgagtgctatagtggtatagatggtgcagtgagaggggagtgtggtgccgtagagcaaggggacactggaaatccatggtgtttcctcgcgatgcagccgccgtgcaccgcagggccccagcctcatctctccctctctctctctcatatgcctagtgctactgcttcccattgcacttgctgctgctactatacggaggggctgcaggaa

SEQ ID NO: 35409 - DNA, 656 bp, Oryza sativa
tgctgcgccggtgtaagtagacaatcaccggagtgttgttgtagatgttatcagcttacatccgggagcgcaaatggctcggcggatcagtagtgttttttttgtctatatgtgtagtttctcacacatcaaagggagtagggatggtaaatgaaacttacctagagtttcttaaggttaggcgaaagatgattgtactgttggaaaggcagttctgtagtaaaatgattcttctcagaggccattcttaagatctccatgatgaaatcaaaagttgaagatgtcaggtctgtgttttttgagtcgtatgcatttgctttttgcaaatgttatgtcgggttattcttcaggtattggaatactgcgtaatttccataggacaaacggtttttgccaacatgagtgctaatttttaacaaaaaaaaaaataaaagttactactgcaaaaaaatacagaacacaaagcccttccctaacctatgctaattggttttttttcgtccacatttaatgctcctgctttatgtatgtgtccaaatatttgatgtgatgtttttttgccaaaatttttttaatctaaacacggcctatatatgagtcgttttgaccttttgagtaattgttccagttgtttacagtacattgtcatctccttt

SEQ ID NO: 35410 - DNA, 1894 bp, Oryza sativa
cccccttgtatcatgactaggacgctccatttagattagattagtagcactactcctactgacactgataggtttactgattaatcatgttatggtagttggctagttgcctggggtcttcttctcctcccctgatgggctcatggtgtcaccattcaattaaccacaagtactgggcaaatgatcatggaaacaatcatgaacacaacacaacaacacaacagaacagaaggtactcgtttcttccattgaatattctttccaccagccagcggctgagatagcacgccggctgctgccgagattaacaaattcaggcaggaggaaccaacgaatctgaatgatccatcagtccacatactttggaggtgacgttttttgtcacaatcgcgtagccaccatggcgctcaatatttttcagataccatcaatcctgagaatattttttctgccataattaggcctttggtcttctgcaacccatgtcctaatgacttccttgccaaatcatcataacagtataccacagggttagcagcacatagaaagcagttagtcccaaatatcacccccacagcaacctcctaaaccttataaacaagtcaagcggtcaagccttttgtgaaaacatgatgtacagattcacagttagtacagtttctagtggaagtcaaattgcacaactttttttctgaataccaccaaattgtacagcattcataattgttattccaatggtactccattgacccaggtatctgtacatttgacacccattaaaccttttccagaagtatgaatatcattgatttcagcttaggtcagtttgtattagcaggtagtatttccttttcttgataggtcagcttaggtcagtttaagatgcacttgatattgcagtgacaaggggtatgcggttttaattcgaggtttcgtgtttaatctctaacacgctcataatttttttaaaaaaaatatttggagggacgtttctcactcaaatctcgtttatttttcatgatttgctggcagattccttaccccgatgacagatgccaaatccattatttactatataatctccagggaagcagatttgaggccgattgactaagtggtattatttcttaattaacttcaatcatgttcttaccacacgctaaatctagccttaaaatagccaggtctcttcaaggccctctaggaatcctaaacaagaaaatttatactataaaggagcatttattaggctagactgtatcagcactaacctgccaccaatggctaacagctagcttatcatccactaataaagtttattgattattttctcttcataggcttattacaaggcaattcgtaatgtcctatgatgaaaaggaattccatgataactagaaagcaatgacccaattcagggaagttttcccttgatgattgtaacggtggcaaaactttttttattttagaattggcacagtgaacatcagagaatgagagtggagctaggtgaagtgctctcacaaaaataaattagagatgtggagttgggtatgagttagagatgtgaactgccatggtgttcgactaattgcgtgaccgaagcagaggggatgtgcggaccgctcacgccgaagcgagtgggggcattgcagatttccaaaagtaaatttcataaagctacagttaatttaaccagactattgtaaaactataaatttaaattggtatatcacaagctacatatttaatacataatttatcacgaaactatagatttaagataaagtggtataaaactacatatttagtaacaaaattatcataaaactatagcatttatatattaaaaataacattatgctaggagttaaaacctaatataaagtagttt

SEQ ID NO: 35411 - DNA, 1331 bp, Oryza sativa
aggagaacacgcggcacttagatgtcaccgcgcgagaggagggagcgaccaccgcacggactcccccacttgccactctcgccgtcgccgcggcctatgtactctcctactactagcaatagtggagtaggagtaggattatatatatccacatccacatcatcgcttgatttaattgtccactttcccgtgcgccgaattcggaaaagtcgtctagatcgtctccgcctccagctagcgactccgtcttcttctgccgcagccgccgcccgcgcctcttggcttcttcctccggcgagctaccggcctcctgttccgttcccgttaattttttcctaagccgcgaggattagagcaaattaaatttaatagtatagcccactactaactccaattcatttatagccaatctaacagccaattcttacgataattgtttactatacttttagtatatggccccacatgtcatacatacattgtgtcttaaagtctgtatttttctctcatcttttatcttattataaaatatgtttgtacctggctaatagtctgttattgtacctgctcttatatatatgcgtgaaaaacacggtttctccaacaactttatagaacaaattagtataaacctaatttgttgttaggtttataatgtatgtatactaagggagtgtttgaggagaaggggattgaggagattgggaagatacgcaaaacgaggtgagccattagctcatgattaattaagtattaactattttaaattccaaaaatgaattaatatgattttttaaagcaactttcctattgaaattttttgtaaaaaacgcaccgtttagtagtttgaaaagcgtgcgcgcggaaaacgagagccaatctcccctatcacccctaaacgaacgatgcctaattcctaattcgtaccgtaaatgttaatcgtttcgttcacggctcacctgattcaatttgcgttgcgtcattgttagggagctagtcagatatcgaaacgtacgacgatcgagcgaagagtatatatgtggtgatggcggcggcgtcgaccggcgatgatgacggcgagacgagagagtatgcatgccatgcatgtatgcaatgcatccaagggacgttttgctcgatttggcaggcggttacgccgctttttcgatgatctagttaatgtccaacaagtatattaaggaaacacaccacttagtgctgcatggtgcatgcattgcatcagccgtaccgtaccgtatgggtgatgtgacgaagctaagtacggagtactgttaatggcaaattggcactggatcacatcggagtgaacg

SEQ ID NO: 35412 - DNA, 546 bp, Oryza sativa
tatgggaccataagccagttctcaactaaagtgagtagagataatactctgtctcgagactactgaacagctgatgtaatgaaggcaaagcaaaatgcgaaaatcacggaccctattacagactacgtcacctcattgacctgtcttggactgctctaaatggtaaccaactacatgatggcatgcctttcacactgatgtgtgttacggaggattaacgagagaaaaagatctcacgactgccgactatatttacgcattcattagtggtctgaaaaggactctactacgccgatagtgctagctggctaatcctagagagagacacacttctttaaaaaaaaaagctgctggtgcactcaagacctatgtgtagatacacgggaacagagaactggcttttaagatacttatccgatttataagccgatcacaccgtggcgcacattgcaagtaagtatttacgacaagatctcacataattatattctagatgaaaaatgagcccatactttgatgatgagacaaaatatacttgtggatttc

SEQ ID NO: 35413 - DNA, 1877 bp, Oryza sativa
tctcattagccgtggcgtgcgttgaagctgtgaaattgacaggacgagtttgtgcgatttgctcgcgctttgctttgctagtttgctttccaggtcatctcgatgggaggcaaggacaatgggcatcactgttcggcatgatcttcctccgatctgcggctttgcatacaacccagagtccccccacgatgacactgtgcgacttcggttggattgtcagggaaagctggagaactcattgtcacctgtgtttgtcctgaaaagaaacaggaatcgcccctaaactgatagtagatgagtagatcgagtcatcccatgctccctttccatcctatttttccagtttagcttcttaccttacttgcctagctagcaatagcatagctctcattatcgatctcacattgtatctttaaaaaattatctgatattccctatgttatatattataagatattttaagtttaactaaatttatagaaaaatataatagtattttcaactcaaaacaaatctataaaaaacatattcgccggtggattaaatggaactaatttgataacataaattcctatatttttttaagcttaatcagactcgaaaagtttaactttgaaacaaacgtaccaaataatcttactaccttttgttgcactctggatcaccccaactctcttctcaaacatacgaacgatcttgagtgcgttggtttctacttgtcaataaactcccatggtcatatgatatgtttgtagatggacaaacaagttgaggatggtccagactgtcacaaaggtaaaattatccaattcaaagtgaaaatatcaattaaataaatggtccaaaacgaaacgccagtaataaaaggtggcccaaagtgaatttcacttgaagttttgattcccttttattctcggctgtatcaccatgaaagatagaacgagaatgaatttcggccaaaaatgaaaatgaactactctaaaaaataatttatcttgcctctctcaactcttgctcctagttgaatcgcatcccttaatagcaaaaccgggtataacgtctcctccatctatcaaaaccggtgcaaatagcctcctttggtggttcaggaggcggttttgtctcacgtggcatatttgatcccattaactgactcagtcaatttgtgggtcccacctgtcaaccggctagtggtgatgtggtcgggagctagaggtctagctggagaaggttttggtgccattgtcagggatagaggtagaggcagaggtagggaggagagatggaagggatgcggaggagaggtgagggaatggcttcggcgggaggaccacagtcgtcgtcgaggaggcggcggtggagagtgaggaggaactgcgctacctggtccacgaggaaccctgcccacaacggcgccgggactgctcccccacacgtggccgatcgacgagctcctcctcccccccccacgtgcaaccggccgatgattccaatcccagcgcatggcccaccgggagttcctcccaagagcacggccacccagtgagctcctcccccgtgcgcggccggctgacggctcctctccctgtgcgcagctggccgcatgagctccttccccacgcccgccgccgccgcccgggatctattgcttattggaggtgagagaggaggaagatatgagatgaggtgaggaagaagatgggatgaggtgctggctgctgacaagttggtcacaccaaatgattaagctagtcaatagccacgtcggatgaaatcagctcccaaaccactaaaggaggcgatttgcaccgattttaatagatgggggagacgttacactcggttttgcagttgatggatgcggttcaaccatgagt

SEQ ID NO: 35414 - DNA, 759 bp, Oryza sativa
ccgtacgcccgtacgttcttcgcgtctacgcgagggcgttcgaatcaaacacgcgcgaagggggagacggcgactcgtgactcgtgaggccaccagtctatctgctcggctctcggatcctacgcaatttgcacacggcaatccatgagctttttcttggcaaaggcagcagcgctgcgtgccatgattcctgctgctttttttcacagagaacttcccggttcggctcctgcgcaaggcaccacggttgattgattcacctgcccttgtatttacgacgttttagtaattgctactactgctagcttgggtttgtttgatcaaggggttcatcattccgtccaggaaacgctctgcaccaaccttcaataattcagatttgagagggatcatctagtgtacaagcagcagcagcagcaacggtccaagttagcctcatgtatccaatctgccaggctgcaagatttgaaaggtttcgcctgcgttgcttgacttgtgcacgcattgctcattttcttaggttgttttcagctttattttcttcatcttatgatcactcttggaaaaaagaaccattttctgactacatgtcttacagtgaattagaagcatgtgtaaatgcctacttcggcttaatttcttgggaccaaaaggtgaaaaggagcatatcagcataatcatatacgaaatgaatgcatatttttttttaacgaaccggtgcagtgaatgaataatgcataatgtttgctgcattcagca

SEQ ID NO: 35415 - DNA, 2194 bp, Oryza sativa
agaaggggcgccacccgccgtcctggaagaagcggcagcccgccgccgtggaggcggaggagcagcgcaggccgagcgacgcggcgaggctctgcgccacgtagccggagtaggacaccgtgattcggatcgccatggcgagcaagcagaggagccgtagcgggatcgagaggagacgaatcgagtagcccccggaagcaggcggagaccaaaggcgccggccgatcagatgacgggagaacgccgccgcgaagacaaggtgggaggcgggggggtttccggcgagggagacctcgccggcggggaggtcaacggtggcggtcaacggaggaggcggggaagaggagctgcgaaagcgagtacagaagagagaaggtgggaggcggaggagacaagtgttttttatagacgcgtggttgttcacctcaccgtttcggcgtttggtgaggtggaggccagaggcccttgaactttggagaaatgattttggagttcttttacatattcgagaaaattggaaatggatttaccggataatttttgaaaataaaaaaaacagaataaagataaattagttgagtggtgatggcactgtggttggcttgtaaaaaaacgaagtgaatacgataaggtgcttctgttagtttcatgtgtcatgaagtaatttggatgatagattggagtaccatcaatgccctacgaaaacggggttacggttaagaggggcgtatgagaagggagacgttgagtatgcacaataaatttaggtgaaatgtagaatattgacgcaagccgaagagtgtggtgcatagctacatcctttttaccaaaattttatttaaaaatgagttgcgcttaaaggtaaagagtgggacaataaatatttaccaacgacaataagatatctttacataataattctattgaatactatcaaatttttacccatacgttttcggtcaacaggtcagaataaccgcaataaacacgtggctatcattagtactgtaaactgatatttaccacacatattaagatattttaccatttttaatactatcaattttttgtttatacgttcataactcgaaataaccgcaacaactaagcagttatcatcaatattgtaaaccctgcggtggactggagcctagagactgaattcagaatgcaattaggttaaaaacaccgccgctggcctgatagggattttatttgatctatcgattgagaaaacaagaccgtactccaaagcaatcaaaaaagtcaaaatggacgagctgtgtccctgcctgctgttgccatcgaacgacgccgtggaaccgtctccgttcatcccctgtggtttgcgacagcacaagcagcttaacgccactgaaataatcgcctcctgcacctaaaagaatatggctaatgctgacctatttctacatgtggttagcttggatgcttctctgaaacttccactgtcacggtcgaaggagttgggggtttcagtgattgggcaggacacctcatagctcggtatggaaagcaaatccagtagtttattaattttcagatggaacagcgagtgagtttcttccttgcagtaacatgatttggaataaagggatctgtattcatatgactgaaagaatccatcctctccgtccaaaaaaaaataattcaaacccgggtttgaatctgaacacttgggtttggttctttatgaaacagagtagtatatatgagatttggaataaagagcagtgtgttcatatggctgaaagaatctatatattatatatagtaagaactaatagctcaacatcattgatctacatcactcaaacaaggatcattgttagagagccataagaaggccccaattgatgtgaaactgatgctaaaatcctttaattcttttctatatacatgttatttatctttgtaattatgatgcatttatgcagttttaacttttagtagaaagaatctcccaagtgattgaagagttcatgttcttcaattttcttttgttcgtactctttttttctttaacttgcatgtatttttaaagccatttatccatatataatcatcctgtagcgacgcggggagtgctcttttaacttggataagagttccattcaaagatctggatcagcgcgttcacataactattgccgggagatcttgacttttttaaaaa

SEQ ID NO: 35416 - DNA, 763 bp, Oryza sativa
tgttgttttcaaatccaaaagatgtgtctattcaatttataatcggggaagtaacatatttcctttgtcccaaatgataaagtgtattagtttttacaagacattcaatattgtacttcgaccattattttttccttttttttgagcgaaccattattttttcttcataatgtatcatcaacaactatgagattaacatcccattaaggtattttcaaatacaaatctaatggtattatatatgtcattaaacaaatatattgctaacttaattattaatcgaagttaaaaatattgatttatctaatgtatgcattgtcttatattttggacataggagtagttaactgataaccttgacttagactttttcatacactttaaatacataatgatatttgagctagaagtatcgctggagtatcaacgaagtatccttaaagcatcagaaattaatttatttttaaaaaagcatggaaatcatcattcaatacaaatccgagtatccaatacatatctgttatggatacgccaaattttaaagaggtatccgtgtttcctacttctttgcatcagccatgacataggaaattaattgatcaatactattgtggtttaggagtagaatggaaaagaaagcgccgtagtgtgtgagagctccgacaagtagtaaaaaccaaggcagccggccatggaaaggatcgcctggcattgtagtttttcgcttgtcgcagccgttcaaagcgcatgcaagtgtgcaacc

SEQ ID NO: 35417 - DNA, 2739 bp, Oryza sativa
tggcgcacatccagcggccgcgcccaggcacgtggcggcgaccgggcgacggccggtgaccgtgtgccgatctgcggccgtttttttgtaccggtttcgattaattaatcttgacctcgaccggtcagttcgatccgtcgcggcgagcggttgctgtcgatcagctgaagccatgagcgatcgagcgcgaggttaatgggagttgttgattttgccgatctgccgctgttgccgacaggttgatgcgctgactacgacgatctcagcgagcatatctattccccccgccgctgcgtacacaggattcacgacggccggccggtgagatatcttgcgtgggtcatggagcaaattcgatcccaatcggctcgtggccgtgaaccatggacgtacgcattactcgatcaatcgatcggaaagatgcggatatgtctagatctgcagcgagcgttttcgttaatcagtgagctttgctagtgccacttttgttcatcgtacgtgaatgaaatccgaatcagcgagccggcagctttattcttggaccgaaccgatcaatgctgtgctatataaaacgacaggttaactttacttatctactttttcaggttcaactattagcttttcacgttaattaaccactgtaaacctttctgcttcgcgtgtgatcctgtacgtgtcctgtacgcgtgaagtgtgtaccgagttcagtctaatttatcagaggagatttcaacgtcgtcagttcaaaggcgagatatataggatatggtcggcctgtcctctgttggtgctttcgcgaggaaaaaactacagtatgtgtcgtgaaaacgacatggaagagaaagcggctagctatagataggggaattcatggatgagattacagtttctggatgagatttcgtatctggtggtcctggagcatgcatggtttgctgctgactgaatctacagatctgcatatccttaatttatgtgttcggtaatgttaacggaaacgataatgctctggaaaaccgtctctgttttgtaaaccaaacctctgccttctaactagtagtagttgctaatttctttgcctcaatagcttctcttctagtagaattttgttctggtgcacccaaaaatagttagtcgatcagttttggttgacttaatgaatgcaaagttgaaactttgttaggtcataaacaaatcagtacaaagtacgtactactacaaacaaacaagatcatcaattattgatcattcacaaatcccactagctgtacgatcagcggcgacagatatatcataatatataccatgtgatgcttctaggaatgcccggtccatggaaggaccataataacatacatatgtgttaacgaccaaatttaataagatataaaccggatttggtattgaaatcaaaatggattcgacaaagagctagattcgaagatatgaaacaggtttcttgtcttttattcttgttgattgcaggattaaatcaactggcacgctcacgaaactaaaagcaaaattttggacttgcacaaaagttaagcaaatcttccagaccagtatatgtttttcgcatcaataataatatgctacgatccaacggcgcagagaacgccgatctacgatggaccactggaccaacgacaccaacccactgcatgcggcctccagatcgatcataattctgcaacggtttcggaacaacaacaacaaatacctagactagatcgatcttactcctttgccgatcgagctagctaggcgagagggacgcacacactggccactgtttccgcgtattcttggccggtggcgcactgctgcatggaagacactgccacatgcaggaaaccgatgcgccccgacacaaacggttgcgcacatagccgcgagaaaactatgattcggccgctcggccggtctgaagtgctgcggctacgagctcttcttgcaagctatttaccgttgcaggtgtacgtacatataccacagaaaagcctatcactaccgagccattgctataccacagaaaagcctattactaccgactcattactgctggctcagtgtgattgtgtgaaccggcacgtgttctgtgacaggcagtgttacgtacggagcaacagatcgagtacgcatggtacgacgaggaagccagccaagccgatggccatgcatggacgtgacgaggaggatcaaagagtactgggatgcaggaaacgcagattgttgagaggcaaaggcacggcaagtacgatctgtgcgtgcagtcgtccacactgccattggtgagcggtcaacttaattggccgttttaattgcaaggtcggttgtgccgtacgccggcaaggacgtactgtgtgtacgtgtgtgtcctgctttgttctcgtgagaatttgatgcatgagaacgaaacgtaactgaagatagatgacactgtgatgaggtacgggaaacgtactgcattgaacaggggggtagaatagaaggaaatgtgtacagtacagtacaagcctacggtcgaatgaaacgcgcatgcacgtacgggctgcgagtccaacaaaagctcggagcagccacgtacgtacgagctagcatgcggtaacgtacaacagcaataataaatggtactagtaatcaggtagtctcctacatcttgtactactaatttacacatgcatgtgatcatgcatgctgcagcagcagcagtggtgattgatcgatcgacgacga

SEQ ID NO: 35418 - DNA, 2576 bp, Oryza sativa
agctaggcaatcttaatcctcttaatttacttgactaattcagccagcagcatcagtacaaaatttagcagaggacacaccagtatcttttccggctgcactttaactctgcggatttgcggtgggccgtaagcttgatctgattctttccggcaagagcacggaagcctgtctgtactcccgtagatcgccgccacgtggtgctgttgctcgcggtcggatcgtgggcgagcaggccagggtcatttatagaggtaccgaacgccaaccgaccaactgaggccgttgaccgtgttgagagctgatggcgacttgcctgtctcagaaacccgtgtgtgcatgctttgcttgttgtcggtccattgtgtttctactacccacctttgactgaatcaaaggtgtatatataactagtgcagtaaaacagatggcaagaaattagttgttttaatttagaggcttggattttctttcgttaaacaagatcgattgtattaaaaaaaggagaatgaaaatctttgtctaagaagaaagacaaagatgaggtggatttgctagatatcattcgacggaaaattgaggatgagaacttagtgattttgaaatgttgaggctgacttgatgacttgtgcactaggcttctactcccactctggtgacccctgtaactttaatgatctctccaatagtaaggatgtggtaacgagtagcgaccaccttgttagtttctaggctcaggcttgggctgtgaaagaggggagggcatcaagaaggtagtagttaagtggatgtgtattattgcaaacaatgacgaaactagaacaaaaattattagggtcctatagtcgataattatgtaattatcgacaagtatactaattaacatgatataaattagctagaattgaataatatacctagtgtgctgagacctcgagagagtgtatgtaggaacgggttgcaaataaagaaggacgatataggcccggattaaagaaaatgatagggctggtagtaatggagatagaggactaaagggatgaggttagcagtattagagctagccggttgggcttgatgccagtgaggtgaagtgggatagcgcaacgagaatggtaggaagtggcataggattaagttggcgagttgcactagtcgggatgaaggctagctagtggagattagtacactactagataactgatttttcgacgtggtacccaaaatcacaaatatcttggttagattaaaaaccggtactaaagatactttagtaccggttctaaaagtccaagtccctagaaacatactaaagatggaggatcaactggtattaaagatagtggttctttagtccgagttggtgttatcaaccggtactaaaaatgcattttttgtaccttttggtaataccaaccgtgactaaggatatttttagtactggttggtgcctctagggttagttcaaaaggaaagcatctctatttaagtcagatgtgtgtagttggtggaatggtttcgcgcgtgagggttgagtgagagatcttaagtttgaatcctacattccacatatttttttcacttgctatgcatctttagtaccagttctctcaaccgatactagtaaagggggttgtaaaccgggactaaaaatcttttcccctataatgtattgagaggagggtagctctcatgtgttggactctaatttgatggtataaaagtcgtaagattttgagggaattattacaaatgcagtagtttcattgagaggggaatatttgcagtatgctaacctggtttcaatcgagctcgctaccactctctctttctcttgttgtgccttcaccctttgtttttcaggcaagcttcacctcctcgctctactttgctttctctttcttacttaccacaactctgacatctcctttttcccatgcaacgatcaacatttggaggtgaggatgaacaacgtcaccaggtaaggaggagggagtgtatgtagtggaggcttgatcatactacattaccatggttgattgctaattaggcttaaaatatttgattattagcatgggtcctccaaagaatggaggggtttagatgtactacctttaggttcaatgtgttggttgatctcgggagtcttgtgatgatgttgtccaccctgctcacctatgcatgtacattgccaaccacccgtgccacaataggaggcgtaccgatttctatttggaacatgtccctgagtccacatcgctatataaaaccaggaagtccggtcttgtgcaaaaggtatagccctcccccgataaaccataatggtcccgacgctaagaagtgttggaaggacctaaaggagcattcctggcctgagtaggtgactcctggagggacgctgacatcaacaaaatgatcactggcaacaatgactgtgccatcaaactgacctcgtacatatgactactgctatcactgcattgacataacaaaaggagaaattttgattgggcatcaaggacattcatggcttcttcctgatcctatcaatttatcacctcattccacattataat

SEQ ID NO: 35419 - DNA, 2509 bp, Oryza sativa
tctggtgcaggcgctgccgctagctcccccccatctcttcgatctcctagctgagctgatcagatcagctgatactgctagcttcctcgccatgattgtgcagtgctgcttacacgtgaggcctccacagggcaccggcgctgattggaggcccgaaagcaagcatgagagatgagagacgtactgtatatgattacggtaccgagtctccgggcagccggtatataaagactcatttttgagtttgggttactttacgtttttaagcagtgagttatagttcaaaatatcttgaccgtttttagacgtgttaggattttaacgctttacaaagcacttgtattttcatgtacgtatgtatgggcttgttagggtatagtaccaaagtcttggtaaattatggtactacttcctccgtttcacaatgtaaatcattctagtatttcccacattcatattgatgttaatgaatctagacatatatatctatttagattcattaacatcaatatgaatgtgagaaatactaaaatgacttacattatgaaacggaggaagtaccaatttttgggtaaggtagagttcataccatatacgatttgctaccaatataggagtatttgctatattgaagaacgtcctagagtggcattaccaatgctttagctctatgtcccctatccaaatcaatcactgaatcacactactatttaagttaccaaatagttagtagggtatattttggcaccaatccaaaatgatcctatatgaactagaataaggatgagcccgaaattcatctgcgttagcagggcccctatattgggcacattgctattgtgatagcctaaatccttaacatcttctgaattctagggcttatttgatttggagtcatttttgccctaccaaaatcttggtagtgtcaaaaccattgccaaattttggcactaccaaattgggtaagtattcaatttaaactattgtgggtaaaatttagtagcaaaccaaatatgcacttgctactattgaagttaccaaaattttggtagggtaataaattggtaccaaactaaacaagcccctagctatctttttgtgggccttttttttttctcgacgagtgatcgaaactgcacaggctatgttttatatgggccttatcaaacaattgacccagaaggactcagagagaggaggcccacctagggtaagaagagaactacagccccaggcctcacacatggatggccctcaataacagcccatccaattcatacaggtggatggcccgggattgaggtccaaacaaggccctctatagatttcgttgtaaagactgtcaagcacacgcacaaagcatacacgcatcacatcgaaatgggactatctatatctatacatttaacgacaaaattatgtaactacaatacaatacaactcatatgtaacttctaaaaatcacacggtaacatactatttccgcgatcagcaagcatctcgagatggaaacccctcatctgtacacatgttgtgattttttttccttacccgcttgctcgaatcttaaaacaattctagcagttcaaaattatgtgaaagttacatacaatataacctcaattatatataagttactatgtaattacactataattatgttgtattatttgataagttttttgaagaaaaaaatattaacaatgtatagcaaaaccatattgaaactttgcataggctaaggaaaagattggctagttgctaacaaatagttactacttaggactagtttggtttgagatctaaattaggcttatcaatatttggcaatttcaatagtgtttagtgtctatttggtttgaagccaaattttggcatgcctaagaaaatagatcatttcaatagtgaacttaggctattttggtttcaatccaaacacaactttgccttaccaaaattagtcatgccaaaacttgccaaaatttggcactgacaaaatttagtaaggcctatttatgccacaaaccaaaccaacccttactcaaaccttatcggttgatctaatatttgactgtaagccatacagtttattaaaaaaataatttcagagtaaaagtttatatatgtgttcttaacaatttaaaaaataataaaaaaagtaaactttcatgaaaaagaaatcaaaatcaagcacttcaaaattaaaattttggtagcaagctgtagtgcaaaagatgggagcctcaataggagaactccggcttgacacatggccagggtaaaaagtcattattaggtcatataatacattcattttttatatgacccaaacgaatatatgtccatatttattttaggttcgttttttatgtgtttgagggagttgtttctaacatactagctataacatataatgcagtctatgatcattaattgtttagcaagatagtgctagcatctcgatctggacaccgtccatttgtacactatagaccagtcccgcattaaa

SEQ ID NO: 35420 - DNA, 3692 bp, Oryza sativa
cgatcgccgcgaccgagtcgacaaagcatggtttaaaatgcatggaaagcttcgctaagaccgagaagaaacaaaaagaatacaagaaacttctgcaaagcggcaagttttctatggcaaagctactccggcagccgagtgagatccagtggcgacgtagtggcgacgtggtgggggctggccgtgtgcgcgcgaaaggctgcccccggctcgcaatattctacgcctcgcctcgtcgcggcggagggtagggatcgggaggcgaccggggaaaacgacgggagccgggcgccggggcacgggacgggacgggcgcgtgaggcagcgtacatgtggatgcatgcagattgcagatgcgtcgcgtgggcatgcacggggcatgggtggtggtggctgggctgctgctttggctactagctgcagggcatgcatgccccctctcttcttcaaaggttccttcccttgtccatttcctccactggccagtcccccccacccttcccctttcccgagaatagatccagaagctaaagcacgtactgtttatatactgtactccctatactacctaaaaaactaaaaatgccacgatactactaccatgcatgcagcgagacccgtatgtatgaccttatccgtactgtacgcgcacgtatatacgcggtgcgtacgtacatgtagctggtcagaggcgtcacgtggcgagtatggcttggctcgccgggcccggcgggagagggtggctggaccacgccgtccggccggcaagcggcaagctcgccctgcatccgcatgccccctgctgtcctgcggcgacgacgacgtagcccccgtcgctgctgcgcctgtgcgccgtggaccggggtctggtcggatctggccggcccggccggttttggggggtttcgaacggtgtcacgcgtggaccaccgtttgtgtgtgcggatagatcgatcgatcggtccatgcatcgcggcaggcactatgatgatcgctacgagtcagattaggcctgacaggaatatgttggtcgctagctagagctaccctctatcgccaagtttttatcacggtcacacgtacgtttttaccatgttaggaccgcgggtatgtgtgttcgctggccgccggcccgtccggccgatccatcgaatgcgtgggggtgagcacgtacggtttctgggcaaagtacggatcggatccggttgcgatgatgaactgaactgataatatgcttccggccgggcacaccgagttcagttggaatgttggattattttgcgtactctttagataatttgacaatgattataggaatcgcccacggaaaggcgaagatgattggagttcgcaggaatataatgctgcttcggcatataccgtgcgccccgctctaactaattgctgcggtttgcttcattgatttgatcatcactcgattttgtgcctctctgaaatggcatgctctctccgtacgggtcgctgattatgggacacgctgttcatatggatcttgcaaggcagatcaaggtgtgaaaagtcatgcatgtagtttagtggttgtaatgacctaaataacacctcaatgttatgagtttaaattttcacaatagtgatatttagtttttttagagtgaatttttgcacctactaatactagaggtattttttacctcttaataccagaggtaccggagatattgaattttgtcctagaaaatatggtaacttttggtatctcctcaagaactcaaaataaggctgagtttagttccaaactttttcttcaaactttcaacttttccatcacatcaaaactttcctacacacacaaacttccaacttttccgtcacatcgttctaatttcaaccaaacttttaattttgacgtgaactaaacacacccttaactctaagagcaaatatatacctgcatgctcccatcgtttgcatatgaatgaaaatttgaagtggatttactgagaggaaagatactactactacaagaatacagcagctttgaaactgttttcatacaaagtacaaacgcattttcaattttctctgactctctcgagtcaccaggagtactggactacgatgtacgagtagtacgcaccaaaatgctcagatagtcaggtcccatttttaccaagttaccctagtctgactggtctgcctcatacgacatatatgcacgttgaattgaatgattgaaattatgagggccaactgctcgataggggaacaaatctacccttagctagaagctgagaattacttcagctcagaatcatcaagatatgttgcagggaccaatcactacgaagaacagtcgacttccacagctccggactcacacagcatctgacacaagattccctgtggcttttcaatgcaagttttcagtgagcaattatcagccaaaactgtgactacttgtcattaaaattactggaaaaaggagctgttctttgtttagcatagatctcgagggaaatggtataccctggaatgcacaagcagggaaaaagcctggataaagtgtagccctacgcacacatgaaaagtagcaggaaggagtcttttcttctaatctgtccctgatgcagctcctgaatgcttttcctagagaaacaaaatgaaggaaataatgacaggagaattgacttgcacttattctataaaagcagtgactttttaccttgtggcatcggtactttggtcttcaagacaaaaaaaagtatatagataacgtatctccaaaatgtttaaaagatcttggggcgccaagtaaacaggaacttccccactttttttcccctttaacctgactttcaactatcagtacaaacctttattcctgcgccccaccttccacattgtattttcagcgtaaatcttgcatggaattatcaactagctttccatcatttccaaatggttgccactgagctgaacagaagttgttattgatagaggtggtgatactttccatatgataatgatataggagtattcatctgcaaccaatatggaagaagacagacaagaatacctattttgtcagaacgaatttggagtgttgagacactagtccaaagattcttgtcgcagaacagcaccaaatcagggatcctagaagcaatagctgcggacaagactttcagctctctcgttattttaggtagaaagtgcacgtctagtctacaagagaagtgatactagtagcatggttccatttactctcaaccagaaaatgaattttcttttatcagctatcttcagagtatatgctggtaacagctagcagtcaggaattcaagatatctgactgtctgatctatgtccaatgagctactccaccaatacaccatccatctatctatcttccttgccaccatccaaattagcaggtacatccaaatcatagtagttcatactcctacatgattgtccaataatacctgccactgccactgcttcattttgcgcttaatttgagcaaagctacccaggaaaatgagctgaaagtgaaactgaacggtagaagaactgaaacttgggctgtgtttatttgctgaaaaaagttgaaagtttggagaaagttcgcagtttggaaaaaaagttgagagtttatgtgtgtagaaaaattttggatgtgatgtgatggaaagtttgggaatttgagg

SEQ ID NO: 35421 - DNA, 4893 bp, Oryza sativa
tctagtgaactgttgtttcgtattcatgtattagttgtagatctccatgtattgattccacaatgcagacggacgttttaaaaccttactgcattgtgtcatcccgagtagggactagggacctcgtcaatctcctacccaaaaggactaatttgcaactttgctttactttccactacactttgattgacttttaggttttatagcaaccttctggagtaacttttcgcctttaaacccttttgtgttttctccatgtcctctctagctcatccccacagtgtcacagagacaagctcaaaaagactcaaaagcttgggcccgggctagcagctgtgtgcgtagtgtgggaaaggcacgcaggcagcaatgcacgaggagggggactgacactcccactcctcttgccactgccagtcaaaccctaatcaatattcccctgctttgctttttaacccccccatgaatccaagtgtgcaatcaggtaaagagttttttggccactggtgatgggatttggcaaaagatactgtcccttgcatgtcaaagtaaacctccattttgtattgtgccatttgccaaggacattccattatgctacacaagaaagtatttacagatgaatttcgtcagaggttgaacataaactccaaaaatgtaagctttgttcttcacttatgaatgcacatttatttgtacatagaagcatgagaggcaaattaaccaaacaggatttggaatcacatgtactcatgggattaactgtcagcatgggagtagtcactagtcagacagtaaaatgtttggaattttcccgggggactgctctgtgttgagtctgcggcaagaaaggaaatttgcagcagcccgggtccagtcgtgaactgacaatgatcggtccaaggacatggatttaaaattctgtcaaggaaatctcgtcgttttgcttattcgtgaaataagtcaaacggtatatttgcaaatgataagtaatttatgaataaaacttttataatgtattcttagcgatctaaaagcaaagattgaaaaataaacttcgatgataaaacccaaaatcagctataaatttaaggttgaaaattcaaatttaggctgataaatataagcataagcgaaaagatgagacccgatccgttcgtcctataaatactgaatatgacgtaacatccagatttattgtactatgttacatcacatccaattttagattaggttttttgagatggaaggagtagacatctacgttaatagcgcatgtttggaattgttatgtgatgtagagtagtacgagtactcgctttgtcctaaaatataaagaattttaaatggttgagatatattctagaattatgaatatggataaactcgttgttcaattttattttatattttgagatagagggattagtataggagtacatgccgtacgcatcagtattcttcatgacagtgatcatatattcagaccactactagcttacagcatggctgcattacctcacactctcaaagcgtaccaacacaacaaatcaactccattccaacttccataaatgttaatcagatccatggtacaacaaattactactacgggcttaatgaccttcgtcagaaaaggaagtctatactctatagatatcagcatatatacccggtccatacatcaaacgactacgggctgcgtcggcagctttacaatggcctgatctgatcatacttgtccagaaagcctgccccgatcatccatcccatggactgcaccaggggagctacagtacactgcactgtgcatatgcattcagctgcaagcagagcacatcatcatgtacactcagattgggcggtcaaacatcgtttagccctgtgaggctgtgacctagcccatcgaccgtactccgtaggagtaagcaaagccagaactcagaagacagtgcagtgcagcaacgaacaagaaacaaatgaaatgaatcgagaagctacggctgtgtttcctttaaacttcccagctttttcattgcattaaatatttaaacacatgcataaaacattaaatataaataaaaaaaccaattacacagtttacatgtaaattgcgagacgaatcttttaagcctaattacaccatgatttaacaatgtggtgttacagtaaacatttgctaatgatggattaattaggcttaataaattcatctcacagtttacatgtggaatctttaatttgttttgttattagtctatgccgaatacttcgaatgtatgttcgtatacttaaaaaaaattgccacacgaactagaacacggccaagactgacgctgctggctacatccatggattgaaaaattttgttgtgtcacatcgaatatacgaatacacatttgaagtattaaacgtagtagctaataacaaaacaaattacaaatttcatctttaaactgtgagacaaatttattaagcctaattaattcatcattagcaaatgttaatgttactgtagcaccatattgtcagatcataaagcaattaggtttacaagattcgtcttataatttacacgcaatctgtatattagttttttctctaattataatatttcatacatatataacattcgaacatatataacattcgatgcgatcgtgcgaaaaattttgccggcggatctaaacagcccctcgcaggaaaagaagggtcgacacaacctcggaagtcgtgcactcatatctttattattattcgctgctgcggcatggtcagattatgagatgtggttgctataccgcctattcggcggaagctttttcttcatctcctctcctctcctcgccggattcgagttgatggcaacggcattggaatcgcggccgttgattgttccgtcctcttgagcttctcagaaccagcccggtcccgccaccagctcactggaagatggcagggggcatcttctctgacgcaggctgactggtggggtcccggacaatgtagggccacaaggagatgatccagatttgtttaggtattaaatatttttgtcttggactgctgccaccggcagggcccgtggacgttgatgcacaaattggtacgtgcacttacgggtgaaacggtcgcggaaattcccgatcgacagagcgcagtttggtataagggtaccctttccgaccataccatttttaagttatctataattcttttttaataactttctacatcgaattaatattgacactgagtagtttgaatgaataatatggtctattaatgactgatcgagcgtcgttttcgaagatatgctaccaattccgatcgtttttcacgtctatgtacaccacaggcctagttacacacttagactatgttcggcacctgtgttgggaaaacatctattatgcacggagcagtctattagtacgtgattaattaagttttagcttttttaacaaatggatcaatatgaattttttaagcaactttcgtatagaaactttttgcaaaaaaaacgcacccgtagctgtttgaaaagtgtgcgtgcaaacacgagggagaggagttgggaactatggctgccgaacacaaccttacacttaccgtgaaatgaaaaagataaaagaataagggtttgttcactttgatgtcaaaaaatgagagagaatctactctataccaccgagtttgttcgagttcaatgatttactatcgatattgtatctttctataacatactggcgactttaaccattgttctacgagatgtcttgggctggaccttcttttcaaaaacacccaaaatatctttagagacatacaagataaacaatcgatttatctcattagaagttttaaaatagcatatgggtcaggatggcatatctgaaatttagcaaaattataatggcatggttacaattttccaaaaaaaatactatgaaaatttttatgtgccctccttacacaatatggaagtttgtatataggttttaattttttttccggtatatttagtttttctttacgtgtatataagtgagaattttcttatacaagagatgatagcataaaaatatcttatgtagtgtgtgaaagatgatttatattaaaaacaataataataaagtatttttatataccatatagtaaaaaagaatttgaaaacatgaggttaagactttatggtaaaaatcatctaaatatggaggaattttcattttcatatcatatgaattttcatttgcattcaatttctcccgattttttttccaaaaaatccttaaatccaaaggatccgttatcggggatcagcttccatacacgaattggttttcggtggtccatcgccttaatttgtatgcgtatatctatatatggtatgccatatttagtacattaaaaagctccttcctctaacttagaaaagatatcgcacggtagattcgtgacaagggaggatagcaatttatgaccaaatatcatagtagtatcatttattgttatctaaatattttggctaagaggtgcttttttttttattctcacacacaccatgatgttaatttgaatgcctcaatcgtttgtaaaacaactatatatttttttagaagcgcctccgatatatagcaaatcatgttcttttttcacataactttaaatttagaaaacagtaaagcatgtttaagcgtttatttctatgaaagaactagtcctcctcaacataaaaccacccataatagtttatcatgctttgatctactccatccgtctcaaaatatagctacttataatgttcaaaatttatttcaaatatatcaactttatgtacttacttactctctaaagtaattataattattttttaatctcaaacttagtttc

SEQ ID NO: 35422 - DNA, 1347 bp, Oryza sativa
ccggtcgccggcctagccgcaccggctggcctctctctacaaggaagtagacactagaagggcaagagcgacattttttgtgcccgggcccacatgtcagagctgccaaacggttgaatccacacagaatagcgacggaatggcgtggagggcgcaataaagttcgacgatggcataaagggaggctcgaactttttagtggcacagaggaagggatcatcttttttaatggcacacaggtaaaaacctctgggatgggaaggggattagaggaggtgagaagaagagatagggttagaaatgtgggcttttatttgttattgggccaatgggcctgaaatggtgggtgatgggaaggttcaatttgggcttctttttagttttgaatgggtataggtatttttttccctatatatgcctatggaatatatacttcatatatgtatttttttttccaaaaatcttgggtattcatttgaatacccatgaattgaagtgggcccgcccgtgccggtcactttactgctgagggataaaaattgacaggttattatgagttggagaatatgctatacctgttatttttgtttacgaattttactcggcattaaattgaggaactaaaggtgaacttatttccaaccccaaaaccatataagaattaaacgggccactaacacacgaagcccattacgtaccgaaaggcctctacagtggaggccggcgaccattaccagcccagtaacaccgagaaaacatcacaaaatgggcctcaaaacaaagcctagtccagtcggccgttgctcgtcagcgatgggcctccataacgaagccgagcgtttcggccgcgccattgaaggcgcaccagttgttcagacctcgcgtctcatacaggtacagtagatctgagctgctgctgctgcaatcatcgcccgtttgcagattgcaggggcggccagttcactacacgcacagtcaccgctcactgtggcgtgatgctccgactactgtgtgtttccatccatgcgcacacagcacactggtgcctgcgtcacggacgctcgctacagttggcttgggcttaggccggtggccatatctcgtgcatgtgcattctcgtcttattgcgggaattgaagttgtcatggtacttaccagcaggttataaaacgttttgactttaattcaagtcaaattaccttagatttgactaagtttaaagacaaatatagttatatttataataccaaattagtttcattaaatcaataattgaatatattttcataatgaatttatcttggttgaaaatgttattatttttttctacaaacttagtcaaactta

SEQ ID NO: 35423 - DNA, 2667 bp, Oryza sativa
  unsure (1)..(2667): unsure at all n locations
atacccaagttaaaaaccctggacccgcccctggtgaccggttttggttgacatgataagtgggatgcacgtgagccccacatgttagtggtcgacttttctctctcctctccctcttccctctcttccccatctctcacatcctcaagcgtttgagcatggtggtcgacgaggaggggcgcgacggtccgcatcggctagaggagacccgacaagacgggatccggcgatacctaggtccagcagtgaatggaggcggcgacgcgtcaacgatgatcgtgagaccatcgagcttgagcttgacagcactggcgcttgtggaagggaacgacagggcacagcgcgcgtgcctctatctgcattgctggagttgttttagtctcgatctgctcaactaggttcgtctcatgttggagtgtataaagtgaattgcccatctttccctatcagcttaggcttttaggtgcaactggctggtgcatgcaacttaatatggtatcaaagcnnnnnnnnnnnnnnnnnnnnnnnnnnnnnnnnnnnnnnaaataaaataattgtagcccactccaatattccacgcttgagacttgagggggtctcacgtgagggggagtgttggagtgtataaagtgaattgcccatctttccctatcagcttaggcttttaggtgcaactggctggtgcatgcaacttaatatctcaggccccaaaattcttgcttgcatcacctacgtctagttctatcgtgcccatcgctagtcctcgatcctctttgttggctatagcaatgatttatgtgatctgttgaagctaagtgtagcacgttgtgacacttttttccatattatcctttgatttttcaatctcaactatcgatgtgtttatctgagttttgatgagtgattagcaatttgtctgtggccgggatactgtcggcgagaatccactaccaagcacctccgctcgttgtccgccatcgacgccttactggccctacagctagcagcaagtttgcgacgtcccccttagcttccttcgcgcatagctccaccactaggccaccgccacataactcaactgagaggagagattgaagagatgttgctgatggaccgtcgcggccccctcctcgttggccaccccgctcgaacgctttagaatctgagagatggggacgagagggaagagggagagggagaagagttggcctttgaaatgtggacctcacatgggcctcactcaccacattagacaaaaccaaccactataccacaaagggaccaattttaacatgataatgtgagttgaggatatgctatacctgatatttcagtttagagatgaattttagattcgtgacaacaaactagggacttaaagtgcagttattccttttcggttttagcccactagccagccagtagtaatggaccaggccataatagaggtcaactcctgcaaagcctcaaagtgtgaattttccttttcttttagagttaccctggtcttacagtacatcacaggtaaagcctgtcactggatgcatgtggatgtgcatcgacaaaatatgcattttccttgttgtattctggcatgtggatgtacttttttttttttttgcttcaatctgtacacattttcatcacacaaatctgctggagcctggggacattggggaaaaccgcggtcagccaaacctggggtcaacaaccatcgtcatgcgggaactggccgactgacctgtagatgagctacttgtttatatgctactttactaccaaatgttaactcgtgtttttttgcccataattgaccacagaactcttgaatttctgaatgaacagcacctgttctgaagaatctgaaaatggatgccatttgactttctgcaaaaaaagtcccaaatctgcactgatccaattccgtttgcttagttgctctagtgctgaggatagtagtcaacgtactgcaactgcctacggcctaataaccagctctgtttgacggtttcctgccgcagttgccgactttgcagtgccccgtgccaaagcaccaaccgaagatttcgctttcaagctggctgcacggcgagcaagtgtgcaactcgatccactccaccgtttgtcttaaaaaacggcccgatctagaagaaaacccggcaaatccaatccgggaaaacgctatgccgcgagctatggattccgaggcctaaaccgcggcaaaaacgtgcccaagcccaactcccgcgcggcgccgaagcagaggtggcgattcccaactcttgctgcgaagtcagcgctcgcgatcgcctactcggctactcggctactcctcctcctcctctccccatctcgtgccgtgcgttggtacgcttcatgggcgcagatgcctccctcgagatcgctcgcgtgccttctgctgccgccgctgctgctgctgctcgagtccgtgcgggacgcggacgcggggcccctggccgtggagatcgtgcggcccagcttcacggcgactagctacgactacgtcgacaccggcggcgcgttcttggtgtccaggaacggctcgttcagggcggcggtgttcaaccccgggaagcagcaggccagcttctacctcgccgtgctgcacgcgccgtcggggacgcccgtctggtcggcgaaccgcga

SEQ ID NO: 35424 - DNA, 673 bp, Oryza sativa
tatagggcgaattcgagctcggtaccccttcaaaataaaccggagcgtcagaagtgccggagtctaaacgacaaacaaggtgcacaataaatacatgctaaaaagctactgaaacaacaaaagaaaccaattttaatggattcttgacatttaacgaattcactgcaatttgaatgggttaaaacggagctcagattattaagttatgaattttagaagatgctctgtgctattactattaacagaaaaaccttaatcaattgacagggatttaagcccgaaagaacataggatcaaaggatagattgattggcaagcgtgcctcacgtgataccgactcaacgagtcaattctacgtgacacaggatcacccaaatgatcaatcgaaaccggtgaaaggagccggcggctctgaacggctctaacctaaaggacgactcgggacggacgaacgaacgaaccacagggaacacctcgttcaaatgaacgagtgaacgacacaacaaccaaaccgaacctttgggacccaaaacccccctttttaaaaaaaaaaacccccccccggggggggggccccccggctaacacgattacggtaaagccccggtacggcaaacgattggccggtaggaaccttaggttgcacctacggctagacaactcgactacctat

SEQ ID NO: 35425 - DNA, 600 bp, Oryza sativa
tcttacatcctgaaacggagggagtagattataaaaatagctcaaaagaaggcatcatgtgcactctatatattatattaccacattaattgaagaaaaaagtaaatatttacaccattagattgttatgagtccagagtataacggtgtagattgattattggatattataggcatttgagtggttgacataatacaactctattctatgtaggcaaaatctggtcaagaaatgcaatagaatccaactccagttccaaagcaattaggagtagttgttaaaacagatcagtagtcagtattcatgtactgattttctctttcctttgaaaggattcactcagggatgctcagaagcatacaaattaaaaaaaaaaaggtctctgacccggttcaaacaaactggctggctagacaacatcacttccatgtacatacatggtggttctggacttccagcagccatgcacattgagagaacagagaaaggcaggctagatatttaacaaatgaaaaaaagtttctgttgacatttaatcaaattttgctaaatggcacaatcaaattccagcttcaaacatagtagtacaactaaatttt

SEQ ID NO: 35426 - DNA, 1481 bp, Oryza sativa
atcacatggtattgtgttgttttaaccaatcaatcactttaagaggtgtgttacacaattagacatataaagaggggatgaaaattaacaatacatctctctacagattgacatcaaacataatcaggatatgattcattcatgacgtcctcatacaactgtccatgcaacgtatgcataattaaaaagagtggactttcctcatagagtggacttgatatatgtgcaatataaaaatattataagaaatagtttgtttgaagaatggaaatacatttgaattatgttcacctctataatgtgatgtggactagggttcccgatcttccgaaaggttcagtcgatttgggcggagtcacgacacaacttaatccggcttctgaatgaacacgctcttgagccccacaatcgtagcaccacgtctcctctggttagcacccgtgtcgaaacacggatgacctgccgagaaggctaatccctgtttgtgaatcgaagaacacaaacaagaacaaggaagaatacagccaaaattgcagatgaatgattaaactcacaagttggggtcttacaaaccgatctagcggcgaaactgttcttgacagaataatctaagcaaaaccccaaaccctaaaggtgacgggggggtataatatatagagtttatggtcgtgcaaaaaacccttgacttaaccctaatgagttccaacacgatacacggcccaaaggcccaaatacggtgacgcggcaccggaacagattttgaatgtcaaattgttagatcgattcccattgactcagaaagaatttggacgtggaaccataaccattggaaaggttatcttcttagctttacatccatataaagaactccccaatccgagcacgtatgcgacctgggcactcgttttagtgcagactggtcctgaactccgaatcgtactcgaagtcgacttgttttgggcctccaccttaacttggacgtccttgatgatcatccatgcctctaagtccctctccaagtgtctccttgtcatcttcattgttcctaatcacaatataatcattaggtagcaatctattctcaaaatcatataaaggagaatataggaacgagctcagctctaaattcaattgtcacgcacgaactcttgttattggtccttgaatgactgatggaggattgttgttgttgtgtgtattcgaaggagtgatgtccttatcataatgtgtccaaacaattacatgataaaatggggctagaaggatgcatggtgctttcatcatttctcattttctatgaaatgcttgatgaaaggtttttttttttgggagtactattaataaggaccattcattggacatcattctatccgaaaatggtacctagcatagctcctgctctatgaccaatcggtacacccctatgtatttttcccacacatcagtcgtgtgaaccctcccaatcaccatgtgcccatggt

SEQ ID NO: 35427 - DNA, 706 bp, Oryza sativa
atatagcaaacaaagtacataaatagctaggtattcttaacacaaaattttattccatcttgatcattctttcttcatcttgccaatcatatgtagttcagaatacgaggcacatcagcaatcttgactggcttcagaatataatcctttgctcctccatcgaagcacctccaataaggaaaaaaaaagaagaaaaaaggagcacatattaggatccacaagctcagatgagaatttatcaactaaagaaatcaaggtatacgttttcatacttactttctgatcctttctgggatgttatcagaggaagcaattatcaccgggagatgtaccagtctaggtgatttctaaaagtaaaaacaagtcaaattttaacatgtaaaatatttgctagaaacattgtaatatatatatgatgaaaattaacactatactccgatccatgacactattgtacgcaccttcacttccatgagtaagtcatagccggtcatctctggcatacaatagtcactaacaatcatgttcacatcatgttcctgtgtccatcagagataaaaacatgtttgttgtatgatatgtaaataaaattacctaataaacaagtagaaaacttttaatttaccgagtccaaaaatactaatgcttgcatgacactttctactgcagtcactgcatatatcaaacatggaaacacttaattaac

SEQ ID NO: 35428 - DNA, 1762 bp, Oryza sativa
taccacccaccgacacacccactcgcctgctgtcgcgcgtcttttgtcgctgccactggatccgggcggaggacggccgtcgctgccgctcgtctgcctgtcgacgcgccaatccacccgccatcgtgctcctctcgcctttgccgccgctcgccatcgcgcctgctgtcacccgccccatcgcccccgcccaaggtcaagggcggtggatccgtcatcaccaaccctccgtagtgctgtcactgtcacccgcccaaccaccgcccgtccgtcgttagtagctgccgccaccggtcgtgcgggcgccaagcccaccgtcggctgccgagagagagagagagaggagaggaggaggttatagagagaggactgagaagtggtggagagggaagaggataagaagagaagtggtggagagagagagaggaccgagaagagaagataaggttgcctgtgaaaattttttgaagtggtggagagggaagaggagaagaggagaagtggtggagagagagaggaccgagaagagaagataaggctgcttgtgaaatttttttttgaagtagtggagagggaagatgagacaaatcagacttagcagacccttacgagacccgcattcaaaaatgattttcttatgcggacctcttaagggtccacatgcaaaatgagcatacggcccctaaagagacccgcatacaaaaatgaatttttgcgggcctattaaggagtcgtatgcggaaatgcctgctcgatttttacaggtgcgggttgttatggtctgtctgcaatctaacgaggatctcgttcagaaaaatcatttctgtagtggtgatattatgtgaagtattttgcccaaatgttagttttttttaatatgtgttgtcgtgcgtttcatggcaatttggtgaaaaaaatctataacttgctaaagctaactagaaaataagcttcataattgagatgtatggtgccacacgacaaaatttctcctgtcaccattgtaaaattgtcttgggaaatgaaaatgttcccatattctttgtatgcctactctgaaaaatgcttgaaaaatggaaccatagcgaatttacaattacttgatttggtgttaatccacgccaaaattaaattaagtctctgaatctacctacttttgacctccaaagatacattatgcagcagcaaggcaaactaacctggtactaaactactaactattatattgatcaattgattacataattcacgtgtcgagcaatgcttatcttccatccttgaaagctgaatatcattcgaaactagccttcgtgttcttgtttccaagatggaattaaatcttcttcaaaacgtcattacagccaaagaaaagcatgggaaatttcaatctaatgtcataggaaaacttcctctcctcctaacttctaccaacaagcatttgcgatccacaaaacaacactgattctcctcgaatccatcttgaaaatcacactaaaaaacactgattctccttgaccccattttccatgcatcttgaaattaaatcacgagacagtttagtaggatccgtggctatttaagccgcttgatatgatgactggtagctcactggatcatcagcaaagacaagaagacaagaacaaagcaagcatggagagatcagcactaacaatggcgctgcttctgcttccgctgctcgccgtgacggcgagcgcccaggtgttgtgccggtcgcagttcaacctcgccaacgaggcgtgca

SEQ ID NO: 35429 - DNA, 1676 bp, Oryza sativa
  unsure (1)..(1676): unsure at all n locations
agattagtcaaacttggaaccaggtaatttgaaaaaaaatcaaacgacttttaaacttgactggagagagcagaatataaacctttttacttatgaatctgaatatgtctatattccttgtaaaaatactactccctccatctctaaatgtttcacgccgttgactttttttanacatgtttgactgttcgtcttattcaaaaagtttaagtaattattaattcttttttctatcatttgattcattattaaatatatttttatgtatacatatggttttacatatttcacaaaagtttttgaataagacgaatggtcaaacatatttaacaaagttaacggtgttaaacatttagggaatgagggagtatatattttgggatagaggtagcatatccattccattataagtttttttatttatttagcaaacactaagattaaaaaaatcatttcagtcatctaaatggttaatttttttataaaaaagagtaaatttaagcatacctaggttttatggtcaaaattgcaaaaaagaaatcataggtattattacatgagccacttaaccccaaatattatggtttgaaagttttacaaaatgccaccttaagcattttgagcacaaaattaatatataaaatttttaatggtgaagttctttactaaggttgatagtttaattctttcctattttcaaaattttgtttaaaatatgctgacatttatcaagattttaattaaggtggggttttatacaacattgagacattatgtgtcatacatcatataagcattggttttctacaactttaaccataaaaacacgagattttccgaaattttttagttaaaagaaaatagaattgcttaaattcctccttgccagcacctgattggcgcaaattgtatgtattttgatgcatgcattgtaagaacctgtggcatataaatgtctatatcgtggtatgaattcccaattttatatgtctacaacgacaaaactttactttgggtatgtattttgtagacaacgaaactttcttcggctgagttcttatcccaatttttccaactcacatctctcgttttcagcacgcacgcttttcaagctgctaaatgatgtgtttttttgcaaaaatttctatacgaaagttattttaaaaaaccatattaatcatttttaaaaaataagttagttaatacataattaatcgtgcaataacgtgtgctctgttttgcatgccggggtgccgaacacagcctttgaaactttttattaccaaattaaatactccatatagcaatgacgactgggagcgggatgcatggtataagcactaatcagtcaagaaaggtgctggcagaaacgcgttactagctagtacgtgtgagtccggccaggagcatggatgcagcttcttgggcatgacggagcaaatacgtatacgtgtagcatggatgcgaccgagcgtgaagactcggtcggtcggtccgccgtgttcatgttacatgcggcgacggtttcatgactagaccacgaccaccacagacgacggcatggtcgtaggttaacttccagggcccttctgtcaaactaaccactctgggacgagatatacgtagtgcaaaacctaggcaacatactagtatagtagtagtggtgtagtaggagt

SEQ ID NO: 35430 - DNA, 542 bp, Oryza sativa
ttttgcgagtaattcgtgtaatatatctggaacatttcagggtcgcaatcccgcaggaatgacaagtgctggtttcatgcagataagtggagctgctggagatcgggtcgtcaccaccacagcctccacgtcgactgcggcaggtagcggcagggcttacatgcatcaccctggagctgccacagcccacttcgcctacgtcaattcccgtcccgattgccggttcttgcaaccctcggtgtccgctacgaccacgggctccatgggtctgccgacggccagcagtccaccgggaatctcacccgtggccgatgatcagacaagaactctcagatcaacaccgacctttcagttcaacggtatgagcatggagctgcaccctggccagcagcctcaacggttcgacctgagtggaacgggggcaggagcccacatacgctacccgtcgcccatgggtagcgctgcggcagccatgtacaatgctgccgccacggccccacctcctcatcctcaccagcaacatctttcttatttcaactatc

SEQ ID NO: 35431 - DNA, 718 bp, Oryza sativa
tataggcgaattcgagctcggtacccaattttaaatagtacatgcccgtcgaagtgccaagtaaattggatcccgcagaataagatgatctcacttgtgtggtgtatgccttttgtaaatacagttatacgttagaatttacatgagttctgatgccacttttttccaccctatactgcaatttcattaactgttttctgattgctgcaaacatgtagttttcattttttttcaatactttatacttttgatcaaacagcatctacgttctatatattctggagaaccccaactgaaaagttttattgctttgtcaagacagaaaatagcaactcggaacacatttatgattatgatctatcatgacatcctttgttgttccttattcatttccatgttcctaacaccactggattacatccatcaccttcatgttatttacaattttccttctctgactatgaactcatttctgtttattttcaattttaggggaataatgggctttgaataaccccccccccaaaaggtttttttttaaagggggggggggggtttttgggggccccccccatactatggatctcatggcataaagtggcaaaattccatttgtatgattggatgatacttatctttctagctgttgtttatgggctgttcaacataattgacccttcggaccgcttcgttgaagtgacatgctgacagacttgag

SEQ ID NO: 35432 - DNA, 685 bp, Oryza sativa
tgcatatctgataaaattaaccgttcgaagcgaccacgattgaaagaaggttaagcagaaattaaaaaaaaacactatttcctacctttcatttccaattacttatcgtccattctaggtttgtcgtaagttaaatattttaatatgtaaataccaatttctatatagatttaatatcataagatttatatttttatttatagattcaccactagaaatattttcttagtatataattgatatgctgttaaactacacgaattttcaaaaattaatgttcacatattttatttatgataaacctacaacaaatggtgagtaatttgaaatggagaaagtctttttcttatttattagctacctaattaaatttgtacacgaatagtttcaacttgcacggagatttttatggatataaaaaaaagtgaaattaatgagagatgattgtgattggttgaggtggaaaagtaaattgagaaattaaataagagactattgtgattagtggagataagggccgggagtatgtgaagaagtagtttttttaaatcaaaattcgaactttaatgtaacttttctattcaacttaatttgagtatatttacatttccataggataacacgcataccgatctagaattttgtcagctctcggcgaacttctgctattgcttttctcgaagga

SEQ ID NO: 35433 - DNA, 1512 bp, Oryza sativa
ccccgcgctgacaccgccgtcgtctctcgccgtcgcttggcggtcctcgccgcctccgccgcagactccgccgccgcatctcttgggtgagagccaccgctgcctctctctctctcgatctcgatctcgatatatctctctctccacggccaacgaccgacttcgacgcggccgccgccgccgacggcgccaccgccactgccactccgccgcccccgcctcgagctcgccacgccgccgcgatgccacgccgtcgccactgccactccgccaccaccgcctcgagctcgccacgccgcggccgccgcgcgccgctgccgcgcccccacgccgccgggccccgacgccgccgccacgcccgcacgccgccgggccggcccacggcgccccgacgccaccgccgcgccgccacgctactgccgcgcgcgcccaacattgccgaccgtttacgaacgtgattgaaacgtgaccgaacgcgaacgagcgttacgaatctttgacgaacgcgaacgaacgtgcacgaaacgttaacgaacgcgaacgaacgtgaacgaaacgttaacgaacgcgaacgagcgtaacgaaacgcgaacgaacgtaacgaaacgttaatgaacgcgaacgaacatgcacgaaacgttaatgaacgcgaacgaacgtgaacgaaacgattacggaacgcgaacgaacgtgcacgaaacgcttacgaacgtgtatgcacttgtactaaaagtgtgagaacgaacgcgtttatactaatacgatttactggtaatacatatatgattatatatgtaacttggcccgtttagactaatacattttcctgataatgttgcagagaagacatcgtcgtcgtccctcaagccgaagtggtagctagccatcgaaggaattcgcgcaggcaaatgatgtaaagaagtgattgttagatatttaatataagattgttagacttagcatatatgattattacaattttaatataagattgttatcgatttaatataagtttgtaacacttagcatatatgattgttagagatttaatatattattgttagacttattatatatatgtgactattacaattttaatataagattagtagcgatttaatatgagattagtagagatttaatataagattagtagcgatttaatataagattgttatacttagcatatatatatgattattacaattttaatatgagattagtagcgatttaatataagattgttagacttagcatatatgattattacaattttaatataagattattagagatttaatataagattgttagagatttaatataagattcttagacgtagcatatatatatgattattacaattttaatataatattagtagcgatttaatatgagattagtagagatttaatataagattagcagcgatttaatataagattgttatacttagcatatatatatgattattacaattttaatatgaaattagtagcgatttaatataga

SEQ ID NO: 35434 - DNA, 661 bp, Oryza sativa
taaaaggtgggccttttggaccaatgggccaaaccatgcccatgtacggtactattcacttgctttctttcatttagtaccataccatctatcaaaccagaaggtgaccaattaattaatttacacaagcctctttattgtattgaacatttcaatatgaacaaattaaatagtgcaactacatttatcattatagatatatcaaatattagctcattcattagactgtatttttcctcctagcttgatacaattgttgcaaggttactataattaatttgtgcaaaatgaacacctttataggtacgaaagaggacaaagacatttatcattatacattgtataatatatcacaattatcaaatatacggtcactggtgatattgtgagatatgacagctaacattcatgccagtgaattgatattatatctttgcaatatctccacgatttgagaattttgcactataaataagtgcattataggtccattttcctcaactaaaattcaaagtaactctacactgaaaccttgcaatgtcatccccccatgtgcttgttgtggatgatacccatgttgatcgacatgttatttccatggccttaatgcgccataacgtccgaggttctttgttgtgcaagtttccatgttttcttactg

SEQ ID NO: 35435 - DNA, 615 bp, Oryza sativa
aatattgctttatgaatttaatgatgttatggattgattgctaacatccatctcttgagtacttcctcagttccttatgataagatgttttgggtttgtccaaaatcaaacttattcagtttgaccaagtttttatagaaaagtgtagcaacatttgtaacccaaaacaaatatactacaaaaatatattaaatggtgaatttaataaaactcatttagattttttagaggttgctatgtttttctatatataaacttggtcagtaataaagaacttagaacaaacccaaaacgtattataatatggaattgagggagtatttgttaaaggggacatacttacaagtatgtgtgtttggtgcgtgtgcacatatacgtgtccaggcaatcataaaacaaaggaaaatttctatcgtgtcatatcatgaaaaaaaacatacaaaaggagagaacaatcccttttatagtggggagcatgggaaaattcacgatttgctacccatttcacggggctttgataaaatggcttctcccccggtgctagtgagctcctagagcctcgaacatagggagaggggagagagctctaggggaggggcataatatgtaggatcg

SEQ ID NO: 35436 - DNA, 686 bp, Oryza sativa
ccaccagtttaagtgaaaaccgaaggctaaatgttttgttttttattagaatttctagggatttctctaatttattagagccccacttggcggtttaggagcgtttgtaggaagtttcgtgtacttttagtatataataataaatagatagatagatgttgtgttttatgaaacacttatatcataaaacttgtggaaatatgccacttgtcataatacacgttgttttctacaactttggctataaaaatgcgattttctaaattttacttttaaagctacagttcggacatatttttttgtttttttatgatatgattatatcaaaggtacaatgtacatgactatcaacgctctaacacactctaacatatacatgttagagtcagtataaatacataatctaacctaatcctactaaaaacgtacccacacgtatgtaacaccagtcaacacacaaacatactcccttcaacctataattagatgggacacatcctaatacaataaatcgtgtcccattcaatgttgggttgacggagagagtacgtgttagcacaagttgacaatggcctcacaaaaccagaaaagagaaaccattcatttcatcttactttatgtttgtcataagttaaacatttgtatctttgaccattaatttttggacatcaatatagttttatatc

SEQ ID NO: 35437 - DNA, 541 bp, Oryza sativa
cgaatgcgcgggctaccttcctagtttatttaaattgtgattagttttagcatatatgaaatactatcaaggaactcagtttaaaattttatatccaccatggtttaaaatttgaagtatagtcatactcaatatatataggagtagagttttgtgaaacttgataattataataatatctgagaaaaggttaaaataactaggttttatgatactttgttttttaaaaaaaaaaaagaagtaggagctcaagtggccgttcccaaattgatttctcgcctccactcgtttgtgggggtgatccagtcgcgcgctcctccttccacgcgccaaaaccccagccaccaccaccatctcccgtcccgttcccaccaaaatctccccctccgatttcgcgcggctgcggtggtggtgcgtgtgctgctgccactgacgttgcggcgggagagcgcgatcgatgtctgtgcagtgcgcggtccggccgctcgcggcgctcccggcggcggcggacacgtcgcgctcgcgccgcgttggcggggcg

SEQ ID NO: 35438 - DNA, 826 bp, Oryza sativa
aaaatatttaaatcatgacaacaatcataccacagtgcacggaacaaatgaattgtctcccacactgcgaaatcaatttagacccgagaaggcttttttgtttgaaatatatatagtgttacatgcacccaaggtatcgattaataacaatgaaacaatctagccaacatatagaaaaaaatagcaggtgcatctcaccaaagatacagtaagttgtaaaatatgtagccaattttctacatactaaaaggaacaccaaaagtaactatcaagttctattgatcgttggcaaatagttatacgggcacaaagatttgtatgtaccattactttcataatcaatcaatgtaaaatgtcaactttaagccacttatccaactttttaattgaatgaacaattgtgttcatcgcactcataaacaaatgatcttcacgggcattcttttcacatgttcctcaaatatgcaccctcctatgtgacgagcttggctcagactcatgggccacctttagaaacaacttttgtaatgtttttacacaactattttagtggagtacttaacccacaagatagcattgaaacttttatagagagaactattttagtgaagcacttaatccgcaaaggtagtattgaatcaatctactcccttggctataggggaaaaaactcattttatgtcctaacgatattttattcttttttaattttttttatgcttctctacatacaagccatatttcgctttgacacatcaataaatgaatgtcaatgataattaaacaaatttactaaattccacaacttgcatgtataagcttctaa

SEQ ID NO: 35439 - DNA, 529 bp, Oryza sativa
tttcaagtttttgaactagatcgcacccacctaccaaatttatttactgtacacgcaattgactaaatagggtaaattggcttaaaccttaatatttgctaaacaacctaaaaacggattagctaaaattatgtcgacacatgctatagtcgatttttttagctacttacacagtaattacacctcacttacacccgcttacacctaacttatatatataattagcatgtaatttttgaatttacatatgtaattttaggattcacatatctaattttcatatttacattataaatacactaaaaacatataccttatttagacacttacaatataaataaaccccgactatttttggtgaaaaaataccgcgccataaatatagctacaccttaaaaaaaagcttatattgtaataaaacagatattataaataattatcatgaaacgcttaatctcctcgaagaaaacccaattccaatcatgaacccatccaatcgattccaccctttgcatgtgtacaccacacc

SEQ ID NO: 35440 - DNA, 570 bp, Oryza sativa
acatggtgacatgatgtggggttgtgtcttgtgggtacagtggtacacctctgatcagagtaaacttattcgaatagccgtgcccgcggttatgggcgggtctaacaatgtctttcgtgattagtctcacccttctcaccacaatagaagatgctataactggtaataatttgattagctcctggtttggaatggtatattcctggtttggagatagaactgtgcagccgggatggttgttcagaatggttgggcttatgcaacagggtatgttgtatagcgttggattaatattgtttaattacttaactgttttattaaattctcaaatgtttgctaaatgctgcttttgcaaatgaaaccctactatgccatcctttgttatcctgttgtcacgcccagaaattcacgaaccagaatttctaagctgaatgtgcattaaacccctgtccaggaccagccagggtacacaaacgacaattgttgacatacagatccacgtcttacaaaaatataaaagattacaaatgcagcggaaaaagataaaagcgagctaagcctgaagacttg

SEQ ID NO: 35441 - DNA, 594 bp, Oryza sativa
gatgagttcgaggacgagagtgacgatgaaggtttgtcttcctttattgtgtccacagattctcattaatatccacttgtttctattagctatatgatagcataatatgattctgtgaaaatataaattaaggaagcattatttttgcagtttggtaagattagtatggtttagtttgaactgcctgaccagatgagtgatatgactcatgcacgtgacaaatgccattaattgaaaggccaattcttgaaaaatctgcaattgtgtgattcgtactcttaacagcagtgatcaaaatattgcacctttcatgcttggcacatataaatgcaactcaataggataaagctatttttttcatcatacaggactgtttcttgatattgtgattgtaaagtaaaagtgctatttaatggttctcctgcacattttggaatagtttggcccgaattatgttgttcatgctgtaactattatggtggtaattagtctgatatgtttcttacttgcattgattttgtgataggtatgatactaaccttaatcacatgcatcaaaagtttcttaaccattatacttacatactggttagga

SEQ ID NO: 35442 - DNA, 1393 bp, Oryza sativa
catggtatagtactagagctgaaaattcagaaaacaactggttcaagcataagtaagagataaaatttccaactaatgaaattcttcatgtgattgatcttgtatattcattattctcagctgaacttgtgcttgtgaataaccatccatgattagggaaccttatgcatctaagtaattgctttatgtgagatgattaagatgaaaggaatccttgcaactttcttatgactcttgggaatttgttttcaaaaatagaactattttaaaaactctatcctccagttgactttaccttatacctaccaagaccatatgcaagtacattaataatcaaacattatcatgcatatgactgcttgacattatattgagttttgtcaaatttgtgtgacttgtgttagatatctttcatactgtcatgatcaaggagtcagtatcatttccactttccaatttcacatataaaattaagctaagcttctacactagaagttggctttccacaaaaatatcattcaaataaactcctacaatgaactatgctttcttttcttgggaaagttcatggcaaaaagaaaatgagaaaaggagggaaaggcatggctatgaaaaaaaagaaaaaaaagaaagaagaagatggaaataaagcttgtcctaaaaacattgagcaaagttgaaaagaaaatatagccatgccccttccatgatcatgccaagagaaccaatttggagagaaagaataggaaaaaggagaatcatttctttattccagcattccacaacatatttccattttcaaccacaaataaagacccttgatctaggagtatgacgaatgatcttcttgagtccatatttctgactttgcaatatatatgatgcaagtatgtcaccagtttatccctaccaagctccacataacagccttagaatagggatgaattctggcatactttgccttggagaggatccaaaaagaaaatatacatctttgagagacaagagagaaaagtcaatatgaggaaaagagctagtttgcgaaaattcataaaaaccccacgagtctaacagagaagcaagaaggactggaatcaagatcattccatttatcaattactcaagatggtaagatagccactgataaaattcacaggtataggtatgggtgtgaatgatttatatgcttgattcatctcttgaagaaattcattctacactgacctttactcagggacgagcaaagtgctaagtgtggggggttttgttggcggctgttaaatgtcgattctataccgccaacgtctgcataaagttcggataataaaacatccaacatagtgataggtgcttaatctcacgtattccacaagtgttggtgtatatttgtatg

SEQ ID NO: 35443 - DNA, 596 bp, Oryza sativa
  unsure (1)..(596): unsure at all n locations
ccccagttagtgttttaattcttaaaacctgcctaacaactaaaatgtggaatggttggcctgggttggcttgggacgagctgggacccagggtcgggttgccagttcggtctgaatcatcgtaggccttgggttaaggcaggttcgtgtgggctcacggccttgattaataatattgtatagctctaggaccgtgtttacaaaatagctttgagcaactaagtgacttttaatgctgtttactgcaaaccctaaccctttatattataactcccttgtattcccttgcatttattctgcgcttgtgggtgtgtcttgttgagtacggtggttgtactcagtcttgcacaattttccccaaactcagaagaggagttcctggaagatgaaggctttggtgtctagctcgtgcctgccgtcaagcacctgtggtcgtcgccctagtcttccgctgtttgtcgtttgtcttctggtgtgctgggccttcgccgcccatgtaataaattaactatttacgcttncgctgttaaactctgaactgtgtcaacttttggtgtaccttgccttctgngacaaggaataatgcacgcacgtaa

SEQ ID NO: 35444 - DNA, 700 bp, Oryza sativa
atttgaaatttatttacgaagtggttttggagatgattggaatttgcaagtgaataggaactgctgcttttgatgtggtccggtcagaccgggcatgtgctgccggtcagaccggcgtgtattacgcagtcagaccagcgcgggcgactctgtgtcggttttggtttcaggttgtttatttggaaatccatgattgtttcatgattatggcttctagatggatactatgcatatgtaatactgtagtttgctaccaatgaatcaagttggagatagcttggtctcggaatatggtttctttgtttgtttcacgtgtaggtgacttgatgcctcgggatagtattgccggtgatggatcgggagtcgactggatggtaaggcgatgtccgtgatggtcagatatcatgcggaatacttaggcttgagttcaatgtacgtagttggtaaagattccatatggcatacgatggaggtattgtgtgtgtaggatgcggagtcgaatttggaaggagtccaaatttggtatgattggttatgtaaagtttgtttcttgtacgaggaggtttcctatgtggattagaacttctagtatgagtttggttcgtggctttaggctgcctacctcatgtataaatagagagggagcgtgaggcttcccggtttcaattttgagagcaattgagttgatagtttagttagg

SEQ ID NO: 35445 - DNA, 1022 bp, Oryza sativa
agagagagagggaaaagtggggggaaagggagagggaatcacggggagtgatttccccctctttattgcgcgcggggacgccgggatgcggcggaatccgcggcgtcggcggcgctagggcacggactaggcggcgggttcggcgcgaggacagggatgacaggtgggcccacccgtcagcggcacgcgcgcggggaggtggccgaatgggccgcgggggagaggagagggagggggagggagctgggccgagccggcccaagaggggaagggggggaaaaagactttttagggtttttctttttatgaactcattttaactttgtttatttcttaataattattatttgtgctctgaaaattccactaaaatttgagggctctttttagaccaaggagaatttaacaaaaattctccgggccacatttgaatttttcttgtacgtattttagtgtttgctaatttcttttcgaattttaattaattctattattccttttagagaatgatttttatttcgggatgaatttatcaggacgtgacagaaatatccgagatcctagtcggttacgattgtattttatctgtaactacatattctgttagggatatggactttattttgtaatacggaccccttctcctatataaggaggggtctgggtgcctctaggggcacgatttcctcccagatcatacgatcaataatacactcggcggatcaatccccggacaggagtagggtattacttcttgatttagaaggcctgaacctgtataaaattccttgtctctaaacccatccgcttttccagcttgatagccacccccttttagtattgccgaaatcttgtttcgacagaatcctatgaaattcctatggaatgcctaatacaatgtaagtttgggaggaattctaacatgaggtagaacctcatggaaactttcctgtgagtctttatctcatctaattcatgtgtttttcctgtggtccaatcaaacgatcattactgtgtttttc

SEQ ID NO: 35446 - DNA, 585 bp, Oryza sativa
tgtcagttatgttgatctctcatgactatgaggattttcaggagttggttgacaaagcaattcgacttgaagacaagaagaacaggatggataaccgtaaaaggaaaatgattgtattccaggaggcacaggatagtagccagaggcagcgtatcaagccactccaaattggtgaatctttttctgcaggtcaagaacagtcacaacagttgggcatcagtggtgagatcaactcagagactaatgcaagcaatgaagacaatgatgagcaagctactcaatcagtgtcatttcagcaggatcagtctcaagaagataacagtaatggaagggagcatcgggtgtgtttcaattgttatgagccaggtcacttcgtaaaagagtgtccgaagccgaagcgtcaacagccacaaggccaagtcaacaacattgtcctcacaggagcaaatgcagtgccggttgcgtctcaagggatacagctcagccatcagttccaaagcagcagtagctttctttaaaaccatagaataattatcggagttatggaataagatagactgcagtttacctatgcccttttctttc

SEQ ID NO: 35447 - DNA, 582 bp, Oryza sativa
tttcacaaagggattatcacgaaatgtgatagaaaatgcatcaaggaaaaggggattgatacccatgtgagtcacacaacagtggtaacccatcctatgtgatcggagatcccgtgaagtaggtaatgggtaaaaacaaactgttgggtgacaggagagtacaaaactttcttacccgttcctgtcgaagatgcagtactctcattctgtatggtagggtgacatatgtcttaatgtgctctgaggttctcttagagacgaggtactgtcctacagggtacacttggaatagcacacctatatgagttaactgtggggtcgcagttttgagacatgggaactctctaaaaactcatgaaaagacacaggggcatgaccgataaacgccccaaccagaggcttggttcctggtggcctcgtatcagtaatgacttcaaaataaacttgtctacggaaagctagcaattcaaggtctgtccattgtctagctgtagatgggtggaacttaatgttctagacagtatgatcaacccttaatgggtctactgttgaaacgctggtatacaaacaacaaatggcagt

SEQ ID NO: 35448 - DNA, 1497 bp, Oryza sativa
tgttggtatttgatacggttacagataaaatccgcaagcgcacggatataccgatgtagcacttcccctacggagtattccaagggtatcgaatccaagggaacgtgtgtgatcagagcttcttccagttcacccaaggataccaagtaaatgataggccaggatagagaggatttactagtgagaaacagtgtctagggaaagcttaattttaatcctaacgtaatacttcaggaactggcaacccgttgttcctagatgtcgctctactacgtacccggacagggaggacttaagtgctctcgaggactgtcaccacctctacacccacctcaacgtattgtgggatacgcagcaattactgaataataattacctaaacatcacgtctatgcaattaatatctactttagtatttataactcaccaaagcaatcactatatttaagttgattatagcgaacaataatcccgtatgctaattaggaactaaccaagaggtaattctcacaagataaatctaaattactcaagaagaatattatattgaattcaggataataaacagaataaaagaaataggagaagattaccgacaactccggaattcttccgactccttctactctactctcttcctattatagtatacaatattatagtacaatagagcctcttataattcagcttaagcttagaagtgtgtgtgtgaagtgagggagtgaagcctttatatagaggtaggtatgactgttggcgaaggggaaatgtccgaagtaccccgcaaccgccatcagggagtgatctggagcgtccacgccaaaccccaggatcaacggtgaacctgggctgggccctcctggcctggccttcggtcggtggattccccgatccttcgtctatccatttctcggagttttgggttgattcactaatgttttgatgaagttcacaaaccctccttgtatggatacataattctcctcactttagtctgattttcctcccaacttcagggtttatcatctgcatacaaatatacaccaacacttgtggaatacgtgagattaagcacctatcactatgttggatgttttattatccgaactttatgcagacgttggcggtatagaatcgacatttaacagccgccaacaaaaccccccacacttagcactttgctcgtccctgagtaaaggtcagtgtagaatgaatttcttcaagagatgaatcaagcatataaatcattcacacccatacctatacctgtgaattttatcagtggctatcttaccatcttgagtaattgataaatggaatgatcttgattccagtccttcttgcttctctgttagactcgtggggtttttatgaattttcgcaaactagctcttttcctcatattgacttttctctcttgtctctcaaagatgtatattttctttttggatcctctccaaggcaaagtatgccagaattcatccctattctaaggct

SEQ ID NO: 35449 - DNA, 948 bp, Oryza sativa
tgggttgatttgagatgactaatttattaaaggtcattctcttagcatgttatatgcttaatttggttatggtgagagtcatagcttaggctattagactcgtgaattaccatgattaaaaatcatgtttggtggatctttttaagagttatttactcgaattcctatcaaatatgtctcttttttggacctttttgagtgttatcactcggccctttttgtattttttatccttgatatgttcaagttgagaagcagtcggctggatattttactgagtaccatgcatgcttcgctataaaaccactcggttcttgactacatgtttagtttttcaactaatcatatagtcgggggctacacctaattaggtgcatctactcgatgcaccatgttttattttcgcccttcacagtttttgattttagcactcggcaagctggagcaagttgaattgaggcactcggattactgttttttgttttgagaaggctattattgtcaactgcgaaggtctcgggggctactgtggagattatggataccccatatctacatgacaattataatttagttggatatacggtaccaaatatagatagaatatctttatgaggactcgggttagtttttaacttgtatgtcaaggaattacccgagatcttagtcggttacgattgcattttatctgtaattacatattccgttagggatatggactgtactttgtaaagcggactctttcccctatataaggagggttcgtgtgcctctcggggcacgatttcttttttccagtttatacaatcaataacacactcggcggaataatccccggacaggagtagggtattacttcttgaataagaaggcctgaacctgtataaaatcctttgtctccaaacccatccactttcctagcttgatagccaccccgttttattattg

SEQ ID NO: 35450 - DNA, 768 bp, Oryza sativa
cggtgagcacccaagcttgtggtgtgccacggaaagtttgtgaaggcttcgatttcgcctccgcaagggaagaaatcaagagtgaaaccgaggagtgcatttgtgcaacctcgtgagtaaagggttgaaatagacccggcccttgtggcccctcaacggagacgtaggatccgtagatccgaacttcgggaaacaaatcaacgtgtcccctctcttggttgctcgttcttcccatctcctatattgtgcttgagtttgtttttttacccgatctacttgcatgcttaattaatatagttagtgaccttatatcttgcttaaataccttatttgtcaccttttgattcatatacattttctttattcgagctacaagttcatagctagtgttttattccgttatccgctgaacctttcggttgagacaagaacttccaatcccataccggaagttcctatttgaaccgaaagttctcatctctctaatatgctatgaagttgtgataatttttaggaacgcctattcacccctctctaggcgacatcaaggtcctttcagtttccaaggattcagtattcatttttttctctcatagatattttttattctctttgcacaaagagcaattacaaagctatttgagaaataacaattcaataaagcatatatataaagcatttataaatcaaatcatatgctagcatcaatattgcatattttcttaattcaagtataaaaattaagtgtcatgcattatctcccttaaa

SEQ ID NO: 35451 - DNA, 616 bp, Oryza sativa
tggcaatgttttccttttagcatgttttccaaactgctaaccgactgctaagattagaagcttaatcagttgctaaacaatttggtatgtgttttctaaggatttgagtttaaggactcttgtatggatttttatttgttgatttcttaactaatgttgttggtttaacttaactagttttaaaagaggtattttactgttcttaaggttgtgcagtaccaaatggcaaatcgtgaccgttgatctagcatcatccaacggtcaaaaatcgtccgtacctcattgaagcggtatcgtgggtgagagggtacgtctgtactttcacgtgcggcatcactttctttcgtgtttcgctttcttctctctttcacgataggaaaaaaatcgccggggaagagcagtgagagaaactagccctaaatcgcagggctggggtggctagaggcaagggcaacgagagatggtggcgagagcacgggcatgaaggtcacaaatcctagatggggacattcccggtggtagcctcaatgcgactgtagtgtggtgacctccatgtgcgatggcggcgcggcgcagactgccggcactgacgacctgatgcggtttatggaacaga

SEQ ID NO: 35452 - DNA, 1641 bp, Oryza sativa
catggataatactactccctccgtgtcataagataaagatttttagacttaaacatgggtattaaaaaagcatgtagaattaaataggagaaagttgtgatcggtttagaagtagaagtaggtgagaaaattaaatggtgaagagttataattagatgagaagagaatattgatgaagaaattgttatattttgggataaaacttaaggactagaagttattatattttgggatggagggagtagattctgagcttgcacgctgcacataaagtatatatttatcagctacacgtagattaactgagcctgtagctcgttaaacaaagaacaaattttatttcattataaagaaaacgtacattaattgagacgattttctttcgccgatcccaaagcttttcgattgcaagtgccgatgaataactgaggagtcattaaagtgccgatgcatgcgctcggcctgaataactgagtcatattgttcagcttgttcttatgcgtatcgcttattagaaaaaaaaataatttatagttgaaacttttatataaatgttgcaaaataaattatgactaaagaaaaatcataaaattaattttgaaatttaaattttagcttctactaataattagcataagtgggaagacggtttgtgctaaaaggacaatacaaaatgcaccgacggcagccagagtgacgcagcacaccgctagcttgaagctagagggtggaaaaccgatcatcagcacataggcacgcatgcatatttttttttttttgtggggaaggcacgcatgcatatatgaagccacaagcgcgatcatcatcatcgcgatcatcatcataatcatcagcatatatgaatgtatatatgcaatgcagccacgaccgactacgtagctggatgctggtggatgacagttgacacacgcatgcagatatatgacacaggtggaaattaagcttgagatatgatagactaatgaacaagtaattaattaaggtggtaaagagtatggtgatggttattttaggattacaattaagtaaaagttagataatagctagctagccctgtactcggaagtcaatcgctgatgttgggctgccatagctgacaatgtttctattgctgatattattgtacattatgaccttgcgatataactaatatagttggacgtagaattttaaagacagtgaatccttatattttagggtggatagagcattatctaagtcagtcttccacgggatatatatatctccagcaccgcgcacgtgcgcacataaacgccctgcgcggtgcggcagcacgcggggaacgaagctggtgagatttgtctgcaccttaccacccccaacccaaaaaggcacgtgtgtgcagatagatttatatatagcttgcaagctagctatatgacgtggtgcgcgccacgtattacatacagtcgacaccgatcgatcgatgagtcagcttgtggctttgcttgaattgctagcttagctgatcgatcgaatgcatgcgtgggcgtggcctgcacgcgccaggtgagctgacgggatcgatctcgtcgtccacctcgcttccgcggcacacgcttggaacgcatggtttggctggttaattactgcacatct

SEQ ID NO: 35453 - DNA, 694 bp, Oryza sativa
cttgcaattgatgtgttaataaggtacagctaagtgctagactacccaaagataaccaaccaaccaccttcccaaatctcaaaaccaacgtcaacaaaaaaaaagatactttgaactttgaaggacaaataagggtttttattaagctggtgttcaagtcgtatgttgtgtgaacagcactgaatacgatggcactgctattcagcaatatgctaattatataaaaaatattatctgtcctatatcatggttttgtcattttcattcataataagcagagatatattggcacatcatgaattgtctaaaaagtagatattgacataatgactcaagcgaacaggaatcatttaccagtcaattcaataataaaacccacccagcatcatcttcatctgaattctacgcaacaattaggagatttaggcgacttggacactcagctatgcaagtgcatgctgctgcagaaaaccagaattccgtgtatttggagatatcctgagtaataaaagaagcagtcaatcaattttgacagataaaattcaaagaaagaaaacaagatatataaatatcatatcacttcaattatagacgaagagcagctattaaaactataacaagatttttcgtcccaaaccaaggcataacaattttccatttacgaccaaggaaacaagatcagttacaaccagcg

SEQ ID NO: 35454 - DNA, 824 bp, Oryza sativa
tctttgctgtataatgtgactcgaaagaaacattctgctataacgaaggttatgaatacaatatcgcttaatatttcacaatatctcatttcggcgagcgattgtttgatctaaattgcttggttggatcctggtaaaaaattgcttgaatggaacaatttagttgaacaaccggctatggttacactatcaaaatgatgaaaaagattgttttgtatagtctcgttcaatgaaagtggtagttgttctatacattctatgtaccccacagaaatgaactataatgtgaggatttttataaggattcgggttccaaaaaaaataaaaacttttatgtgttttctctttaaaagtaattctaacaaaagaaaaattgagaggagatagctaacattgttttttttaatctgcaagagataattcaacatctgttttgtagaaaaaattaactatttcccactctaggaatgtaccactcttcaaatatcattatagatgacgtaacatacataggcttacggacctttcgtttcacttattcagggaataagcgaagagctgcttctataaccaattcatatgtttttttttcaaatactgactgttgttataagagtataagacccacagctgataataaaaagataaatgacaatgggacccacaaccaatagccagaaacatccctagctatctctagggggaaaaaaacttgaaagactaaaagaccacaaagataataagtaagggtctcatcttttcgcttatgtttattcttatcagccaaaatttaaattttcgaccttaatttggagttgattttg

SEQ ID NO: 35455 - DNA, 700 bp, Oryza sativa
acatagcgtttttatttttgaaagtattactaaatgggaatttctcccttggccaacttagaaaaggggtggggcgccttttggtcttttcttacagtcgtatggctctgataccagctctgtggacccccgtttttataacaggaatcaattgtgtaaacagtaccatttccctggatcaagtagtctggtacacacgaattcatagctgaaataccaagtgcacatacacgagtgtctaatacgaattattacatcataaccccgcaggcgtagtcttaaatcatcggaccgagcggtccggaatacatccaaaagcagaaatagataaggcagcggaattcaggcagcggcatgccattgccacaggcaacgaccgtactaagacctactgagcgccatcgtcttcatctccctcctggtagtaggcatagggatcctccgaggcttcatctcccgcttctgattaatattatatttgcaagggtgagtaccaaccgtactcagcaagccaccacagcaatgatgcacatgacagaggaattcaaaggatggctatggttcttttgcgcacagcaagttttgtaattcttttcacaagcctaagacctagcatagactgatcaagttttataccagtgttcatattaaacaatgaccgttctgtccaccatccattgtgatcccaaggatagcttcc

SEQ ID NO: 35456 - DNA, 672 bp, Oryza sativa
cacttgctgaaccatccatttctgctagctcgattgatgagaaggttcctgagcagccgtccgtcaagaatgaagaaattcagactccggattgtgccgcaataatgttcagggatggttttgacgaagactacggcaataccctgaactactttagcaagaggaaaccacccgttcctttgtcaccttccgatcctatagaagttgggttcatgcgagaaactgtccgggagttgacatccataatgagcgacgaatggctaaaggaggcagagctttcatccgaagtaattcagataaataccgctccctgaatcattccttgccatctggaagggaacgatgtcggtattctctacagtccaactgtcggggtcaacctcgtctctgagtcttttgcattcgcttatttaagcaataaggcagtgaccccgacaaacaattcttcaagcatccgaacggaaatatcatcgaaggatttgggattgtgcaagatgtgcctgtctgctttgaagacagggaggcgatcttggatttccatgtctttgaaatccaagactttgatatcctaatcggaatgcccattgagcaactagtcatcaacacaccccgattaggtagcctcaaaataactctaggaatcaatgggtaccgagctcgaattcgccctat

SEQ ID NO: 35457 - DNA, 1883 bp, Oryza sativa
tttcagttatacttacacaaattaaaacgagtatgtgtgagtgtgagcaaataatcgatctactagatctagatcgacttgtggttgagattattaattatgcatggggcatggagtgtgcgcgtacgtagtggttgccattgagtctagctagtattatggattgtgggatcgatggcacgatccaaattagttgtctccatacttttaagcatccattagtattgtaattttgttgagattctcaggaagaaaactcaggaaattgcggcccaattcttgtgttatctctctgttatcgaaaattgctatacgtacgacattttgagtacgatcttcgtacgatcaaatgggcggctaacgtggacttatggagcatgtcagtcttgtactcgttctgatgcatgtcatcgtcatcgccagcgccacgtagggcaagaggttggcggtgatggtggttgtgatgtgttcgatgccggcgccggaagtccaaaagtacaacaccagcacgatcgcggaagtccaaaagttcaaaggttaattagacccataccactgcaactttacgaaattgaaaaaataccactactattcgtcatatcggctatatgccgctggaaatttttaaaattggaaccattccacttccgtccctttttccgtgctctctctcacaccgtctccattcggtcctcatccccctccctcgacgtctcggacctcgcccacgcgctgtcacgcccagccatcgcggcgcccaaggatgtccaagccgtagccgcacttgccgccgcggcggacttcccgagtcggacaacgccaactcgatccaggtccgcctcgctgccgctgctgtggagatcgaggaggtccgggtgagccggatcgacggcggcgagggcagcgtcgacggcgagtggacatagcaggttggacttgacgacgagggagtcgcagaagctacacctacaataaaatggctacttagctcagtggctttgcacgctcgactacgtctcactctgcttccagagaacaggttctcaattatctcgcacccccccaccccacttcacccacccaacaaagaaaaagaaaataaataaatgaaaatgaattagagtgcttacttttcaggtcatcgaccaagtcttctgtctgtccatgcctatctgtcgatgaacacgcccaaatagtttccgggacacttattggggcattttacacttattggggctttgtttttctttattttgagatacataaacgtactcattggcttttcagttgtcttttaattcattgctagctgtatttaatatttataagattttgcgtgaaaattaggtgtaattattccaaataaaaagatttctaggattcagatttattttataccacaatatataagcattactactctgattctcttagcttctatcatatcaatgtttttagagccaatcaaatgcttcagaaggacatctaagaaatttaataatcaaatattgataactgaagtgactaatggaaaatttttggcccgagtagtacttactaaagagtaaactgtgatcacggtacataaacttgcacgatggatacaaataggaacaacaacttataaatcgtttctatacaattactagtccatgcgaacttgagccaaaacaatatacgcaagcaaaattgatttaacacggtgcgccttgataacatctttgcatgctagcggtttttttttcacaaaataaaatgtttgttttaaatacaatcagtactctagtagtgtaaagcaacctacaagatattgcaatgaaattattattgctgactgctatattctgcaaaactgaaattgatctagtgtgtgtatgtctgca

SEQ ID NO: 35458 - DNA, 558 bp, Oryza sativa
cgatgttagatttaatagaattaatttcgtgttataagagttgctatatttttctttaacttgattgaacttatggaagtttaacttagaaaaaaatcaaagcatcttataatatgaaatggggggtttctcattcagagtaattgtatacaaggaacataaacatcaaaaggatattgtgttgaactgttagtgtatcaagcaactcttcctgaaagaaacatctgataagattacattgcaactggataaggccaaaaagggggacagaattatgggaaactagtcagtagtcacaacacacctaacgtttctacaccaagaagtaagttctgttgttgtttcaagctaagactgagctagtttcatgtttcaaacaacacacgagatggaaaaatttcaccacaaactgcacctacaaagttacagtacgccttgaactacactacacagatttcagcccggtcaggtgattcggtcccgagaatggagcatcttcacttcccttaaccaattacccttaaattttactggccgtgggctgcaatttcttgattt

SEQ ID NO: 35459 - DNA, 577 bp, Oryza sativa
ctttttgtccttatattttattcgcaatttttgtcatgagaaagggtctgtgcacattgtgaggattctttttttttatctacccggttttttcgtcgtcgggccgaactctagcaccaccgccacatcgatcggccttctcatgctttccctcctccaattgattgaaaaatcaattctccactactccatcatcattttccccataattttttcttttatttccgctttaatttatcagattcaatctctatatttagaagtcaccatttatatcctagagttttatggattcgctgcggttttgataaaaacggaaagaaaagatcgagtgaataagagcactcaaccaattttaggagattgagaaagattggatcgtatttgatggggagtattggttctggcatcatactacacggtcctatcttcgaggttgaacacggcagtcgactatacgagataggcctatagctctacttgtggtctaggttcaaaagaagtaagccaagtagagagaagtagcgggttgggccgagactgaataggaaggaagaaaataagtttttatccaaaa

SEQ ID NO: 35460 - DNA, 633 bp, Oryza sativa
acgttaaaactgttgcgctgttgattacattgtttctgatgccccttttgttttgcaagcaggacgatacaccattcaattatgagataaacaaaattagagggtactggacggaatacattcatcgaacataagtatatttggtcagtactgtttataatatgctggggtttttattttgtttagcactaaaacaggtgaacagagtacacctattattttgattagaccattggtttttgtagcggcaatcagcaaaaggaagaatcattatatagtcaaaggatacatgtttgttgattctagcaattcctaactgtgtgttctgtagcgtgggttaagaactaatccccactcatggacgaaagagtgatagactaacatataattatttaagtattagctaagaacttttaaaatatgaattaatgtgatttattaaagcaatccttctatataaatttttgcgtaaaagccatattgttttacagatttagaatcgcgcgcacggaaaatgaatgtgtataaggttcggaacctcaacaaacgaaatctatgcaaggggatgtataagggctttcgaataaacacattatggttcaattaaaaatgctaatagtagttatacaaagg

SEQ ID NO: 35461 - DNA, 528 bp, Oryza sativa
gcatatttaccataattctagaagccaactcgatagcatctttagctcttaagagaagagtcattgttaacatcctgccttgtccatcctacagtactcaccaaataaaacatgatcagcttttgcaacaggcaagacaaaaagttcatagtaacattacgacataatcctacaattttaaatttcagtaaaattcacggtgcttattatatatggatgaagtttgcaacaaactaatttatatttatattatactccctccataaaaaaaacccaatcctgtccaagttcaaacctaggattgggtttttttttaggacggagggagtacatttgaagttatagcacatagccacaatgtcaagagctcacacatccatctccaatgtcttatatatgatattttattttgaaagaaagttcgtagtattattattgaacttgtttatctcgattaaaacttttgattttgcactaacgcaactaacttttacgttcatattcacaagtcctaaagttgaaggttga

SEQ ID NO: 35462 - DNA, 576 bp, Oryza sativa
gcgtgcatggttttagatgccgcgaaaattttttagttagactttgctttacgctggtgcattcatttgtgggctggcagatctctttagcagctgccagccggtttatgctagctgacatttaaaaggtttgcctaaaaaatatagtattttttatgcggacctcttaatgtgacactgacggactcgtgacccccgaattttctacgccggcgtttttttctcgtagccgccaaaaaaaatattttctagacgccattaaaaatcgtttttctagcagtgatatggggccgttccagtacaacccgtcccgacccgccctgttaccatccctaccgggtcagtcgcccgacctgcttggtaggtgaatccgccactgcgaattaggtgagcccacacgcgttctttgaacattcctatggtacatcagtgcatatgtacctggtgtatatatataagtcattgggataagattgatcacacaagctatcttctgcaaagagcacgcagagcgacccgtgcctactgccttgcctacaaggggggtaccgagctcgaggtcgccaatagataagg

SEQ ID NO: 35463 - DNA, 541 bp, Oryza sativa
cccctccttacaaaaatcttgactaaacccgaaacccgaactaaactatcaactcaatagctctaaaaagcactaccgggaagcctcacgctccctatctatttatacatgaggcaggctgcctaaagccacgaaccaaactcatactagaagtgctaatccgcataggaaacctcatcgtacaagaaacaaactttacataaccaatcataccaaatttggactccttccaaattcgagtctgcatcccatacacacacaatacctgcatcgtatgcaatatggaatcttcaccaaccacgtgcattgaactctagcctaagtatcccgcatgatatctgaccatcgcggacattgcctttccacgaagtcgactcccgatccatcgccggcaatactatcccgaggcatcaagtcacctacacatgaaacaaataaagaaaccatattccgagaccaagctatctccaacttgactcattagtagcaaacaactgtattacatacgcatagtatccatctagaagccataatcatgaaa

SEQ ID NO: 35464 - DNA, 558 bp, Oryza sativa
ggcgaattcgagctcggtacccaatgggtacagtcaaaaacataattggttaccttggtaaggatgggaaaggcacattattagactcaagtccagaatcactaattgtcccaacaacggcactttaaaatcatatattacacattagttaagttgctgcagcctaggagcaataaaaggttaacaaagtggaaagtggaagatagaaatttcaccttgataggctacccaagatttgacttgacatagcagtaggatcaatgttttcagtggcaacagtggcagcagaagtagattttggttttgatttccttttcagttttctacaggaaaatgaaaataagtgaagtttgttggcaaaggaaatcaacatgaagatatggatatagaaatcacctttgttttgccactaaagcataggcctctttggcttctggatctgcttctttgcaacttgtccatctatggccataatttttgcagataggacacttttgctgacatttggtacctgcttttctcttgcccttcttattcccctcaaccccacctttgtgc

SEQ ID NO: 35465 - DNA, 561 bp, Oryza sativa
ctttcttatcatccttcgtggctgcacagttctttctccttgccaagatttaaccgttccttaccaggagctaatcaattttttaccagttatagcatcattttttatgttgggttttgtgagtctaatcgctttaggctttgtttctcccgcctgtaccctctggcccggctattctaatagtttttttctggccagatgtgtacctctgtaccctcgatactcggcccctcgacatgtcaccatgcgcctcaataccgtctcggtacctcgtaatggagctgtgacagtacccctcacgccactctttccacccttcgcccgttcctggatcatttcacccccttatgttcacggcatggactcccccgtgacccccatttgctttctccgccacttctctgtctggtgctccaccatgagccctgctatacgccaggtttagccgttgcccacgctggcttgtggttggtgcggttcatgtttctctaccttaactcgtgacccggtcttttttttctttggggtccggctcgtttcccttattgtgtgtttttcacc

SEQ ID NO: 35466 - DNA, 564 bp, Oryza sativa
ccgaaccccattcacaggttcagagagattcagagcttctttgcatgtggtgccttcttctgaaaagcgaggcatcagttgcatgatgatcaatcgtcacattcgagtggagcaacggtttttttttttgacgtaagagtggagcaacggtgattgtttctttccccttgttcccctctgatacaagtagaaccaaatcacattctcaacttgttttgtttttcagttgctgatcagtcttcggtgcaaggaaatgaaagcagacaccaaaaaaaatctgagagagtagacatacgaacacaacataagcagattactgcgagtttagttggctgtcttacaatttacaggggtcggagaacaaaacccagaaccccctcgtccacagattttttccccccttttttctatgtgtgagatgtgcagacttcagatatagcaaaatcagttctaagttgggcaccgcaacgccgcattacgagtttacggcacggtatacgcactgaatgtctgaattcatcctcgtagaaccaagtgaatgagttcatgttctgaactttttct

SEQ ID NO: 35467 - DNA, 822 bp, Oryza sativa
taattttgggatgaatttatcaggacgtgacaaatccaccccccttacaagaatctcgtccccgagattcgaggaggctagcaagaagataggttgggcggtcttctcttcttgtctgacttcttccgtcgcgtcttctataacgaacttgcctagcaaaacttctccactctggactgcttggctcgatctcctgttatagatggaatcgtctcttcacctgacttttccctggttgcacctctagctgacttcgactgggctgcggcattggaagatggggcttcagttccagaacttcttataactcatatctttggagtcaacctcatacaggttaccacttcatgttatgcgtcaacactagcttgtcattactaggataccatgtttgtcatcataagaatatcatgcttgtcatttacttctaacttgccaccaactgcctcatattagctttcctgctctccgggtgctagctacttctgctattcgatgcaagggtcggtaactttgcctttgaattatgtttctaaaaagaaccaacttatcccacttgacatgctttgacgtcttcccaaatggctttactgctggacttcttattgtctgatcgttatcctgtcaaatctgaagcttcgtttgtagatgtgattttaatctgacctctatagactatcttcgaacatatcacttggttcataactgggaatagctctcatgaacaagcaactccgattcactttctttatgttcagtttactttccactattctcttcatgttgtcatcatttagcattcaaagtattcctttacacatt

SEQ ID NO: 35468 - DNA, 562 bp, Oryza sativa
  unsure (1)..(562): unsure at all n locations
gggtgaaaacccacttantataggcgaattcgagctcggtaccctgaatgaaagcagttgactgtagattgttgatgtaaatttctgtggatttttgaatgcttgggtaaatttctgtgaaatttttgaatggtggagtgttgaagaaggcagacggagcggagtcgctccgtccgtcattttttttaaacttggccagtattaacactggcggctagtacattgtaatctgccagcgaaaaaacaggccgtcttaagccaaccgccagcgaaaacggatctttgctggcgactagtttaagatgaccgccagcgaaaatgaattatcgctggcggtcgataactgctagcgaagatcttgatcttcactggcctttgctttgtgccggctctaaattccgctagcgaaaacccaaaatggccgtcacgaaaaatggttttcatagtagtgcccccgacccccgatttttcaaccggctcccctacgtgtgatagctttgatagcataacctcaccccatcaaggaccgttatttgcccctctgttgcataggactaacgaa

SEQ ID NO: 35469 - DNA, 560 bp, Oryza sativa
tatagggcgaattcgagctcggtacccgaagatgtgtcttgtgggtaaagatgtacacctctgatcagagtaaatctattcgaatagccgagccctcggatatgggcaagcctagcaatgtacccaagtcagtgttttaattcttaaaatttgctcaacaactaaaatatggaatggttggcctgggttggcttgggacgagctggaacccaggtcgggttgccagttcggtccgaatcatcgtaggccttgggttaaggcaggttcgtgagggttcacggccttgattaataatattgtatagctctaggatcgtctttacaaaatagctttgggcaactaagtgacttttaaatgccgtttactgcaaaacttaacccctatattattatctccttgtaccccccttgcattaattatgcatctccggtgtggcttgctgagtactgtggttgtactcattcttgctcaatccttcccctcttcagtaagagaagctttggagaagatgtcttaggtggagtcctggcttataccccagttgagcgcctgtgaagatg

SEQ ID NO: 35470 - DNA, 1100 bp, Oryza sativa
actttagatgaaccatgatgatctcatctattgcatgcttaaaaccctgtatagttgtcatttttgtgcttagtttaggactttgtgggcctaggaaaaatctggtggcctgccggacccaccagggttcggccgaaccatcacggtgcccgatcggcaccaattttgaatggcagtctcccccgctcgtcctgagtccgtttagacgtgcgtttgtaggtagaacgttcggatcacagcataacacttcttcttcatcctttccctcacctttgcacactctcggcccgttcggccccccgttcggcagcgcgatatctctcccctcgccatgttacaagaacaaaaatccggggggatttccctgcgcaacagccgactacgggagagttcggcttgttaaaggctcaatgccttttccaagatgacgggaaggccgcggcggctcccgtcgagcgctacgtgggcaccctcttcaccaaggcaggggatgaggtgctccacaagtacaccacacccaccgctacaccatccactccaaagggggagcgtttccgcattcaaggagtgcgaactcccggcggtgggtatggtaagggttttgtcacaccctaaaaatcccaaatatataaattgttgtctaaattggaattattagaatttattttaaaagcctagaagagaagatctagttttaattaataaattccaatataaaatggggccagataaaatttcattaaatactttgcttaattctataattcctagatttttctgggatttatttgagctaaggaagtatttttaataaatggaattacatttaatgaataatttaaattaaaaaaggtttttaaaatcctcttttggctttgggccgaaagtcggcccaaaaccttctctctctccccggcccaagccggcccagtccgcccgcagcagccacgtgcgcgcgccctcggacgctgacaggtggggcccgcctgtcaggtcgtcgtctacctccggccgcccgccgcccgagccctagcgccgcgctgccgccgtctccttccaaattcgcccgcccctttaatttttccggtgaaatcaataga

SEQ ID NO: 35471 - DNA, 915 bp, Oryza sativa
agctcggctaccgagctcggtcataagtagtatagatatatttgagtgatatccccttgataagtgtattattttctagttatcacactaaataaaaaagtaaagaatgattaaattaattatattgtgctaacacatgatatttaattgtgttaatagatactaatatatatatttatctattagtttattaaatcaataaggtaaccaaccaatataaattgtacacagttaagctcggtagaaactcgagctcggctcggtaaagcttgcgagcttttgcccaagctcggggtcggctcaattggagctcgagccgagcttgaattgagcatagaacgagccaagctcaagctacttgtgaccttcgagctttttttgacagctctaaacatatcccagtgcaagcactagaagataatgagatcgaactagagcagcaagatgatggctccttgaatatgtcaggtatgactacaatgaagatagctaaaaccagtaggacgaactaaatgtttatattgaaaaattgggctcagctactattgttcttgtttaattttataggtgagagtgctaaagaagacaaactttaacacatccactactagagaaagcgtttttgctcccggtttgtaaccccctatactcctagttttacaatcgggagtacgaatccgggactaaagatggatatctttagtctcgggcgaaataattgggactaaaaatccatctttagtcccggttggggcagtgccagtcccggttggtcactgttggtatttgatatggttacagataaaatccgcaagcgcacggatataccgatgtagcacttcccctacggagtattccaagggtatcgaatccaagggaacgtgtgtgatcagagcttcctccggttcacccaag

SEQ ID NO: 35472 - DNA, 559 bp, Oryza sativa
tgaaagaacaccctctataaggggacaacagctcggtacccgtagtagtgcccagggaggagaccttgatacgatagccatctggggttttctctaagtgctgcttgacttctcccatagttatgtaaggaggagggcttccattgttgtctttctcattatacacctgcgccatataccccgagatgaccttcacatttcggccaagagcaaatgagcacctcgctcactgaaaggcagccaatttgaccaaaaccttaatattgcagagcgcacatagaggcagcatgggacaaaaaagtagcaagtagggccaggtgtatgacaccagccttgttgtccatatagagtagtagtagaataacaccagccctggtgaccatatagagtaggcagaaagctccacaaaagtccgggagatgcttgtaccaccaagaagtgatcggccgtcggtagacaccgaaaggaaggccgggtcggtattgatcttgatgatttgaatgaggacactccatcgaatgaaggatcttgggaaaaaaaaaggcaagcactggacacc

SEQ ID NO: 35473 - DNA, 2311 bp, Oryza sativa
aatcgtagattatttttggaaattgctcgagcgtaatagtatttcggtcgaaattccgagttaattataaaaatatgtttcttgatcagattagattaaaattggtagtaatttagatataattaataactaaacaattagatgaactcgtatagattattatagatcatttttggtaatctctaagagtcatcggttcgcggtagaaattcggatttaattactagggattttagccgtgtattatatttaatcatttagtcatagactaaattaaatcatataatatttctaggatttcgtccgatatttagctcgcgatagaaatctctaacctattatatggatataatgctcgggtagattaaattaaaaacttatgacagcaaaatatttatacccgcaaaatagtttaagtcaaaattgggtttgccgtagttcgcagatagtaaagttaataaaaaggaatcgactttcacattcgactttcatttggatttatttggatttttatttgaattctaaccgaattcaaatcaatttttgacgtaactatagagcccgagaaagttgcggatccaagcgaaggccaagacccgcaagactctgagcaaggcaagtcatcactattccttgaacatgttgatcccaattgcgaaattgttttgtttacaaataaaattgcatgcaatgatgaacatcctacttgtgattatgccatgccttgattattgtttacccttaaatctttgtaaccatgtttacgtatgagtccctagtcaactatgacaattgcttagaaatgctattctagaatcatgcatactcatatttatcaaatgctatatgctggggcaattacctttgggaaggtaattgagatgcggcatgtggagacatgagcgccacattgccatgatgttgatgacatgatttgtgaaaggagaaataaaattaaataactgtttttgactggggcggacggaggatttgggtggtatctggaaaaggctagtaccgtccccggtcaattaaggaccgaaccatgaagttaagcatgaaacaacccccgtacaaccgcacttctcgtatgggtatagacctagcggattagatagccgagcggaggcagtatccttgcatagatggttcacccctgagtgaggcaggtgcgctacgatgggacagccgttgaggtagggccgagaagcgtgccctacatcggtgtcgccattggtaggactgccatgagtgtgtgagagagagaacttaacttgaaccataatttaatatgcgtgagagacttctctttcccgggagcgccagaactcctctcactgctagaaacatggacgcctagagtgcatgaggatttaagttcatggagtgggtactgccaatgcgaggttatcgaaaagctttgccgtgacgcgtctcatgtgttgggacgaggctcatgtgttgggcagtcgcggagtgcgggtaaagtgtacatccactgcagtgtgagtaaaccaaatctattcgaatagccgtgctcgcggttattgagcaccgggacatgtattacacttggctagactctaaattctttaacttgtgtgggatgggatattgcatgatgatttttatgctgatggagccacttcctgagaggcggaaacgtggacgtcctcagaaaaccataacgactcaatggcgggaagctatccttgggatcacaatggatggtggacagaaccgtcattgtttaatatgaacactggtattaaaacttgatcagtctatgctagatcttaggcttgtgaaaagaattacaaaacttgctttgcgcaaaagaaccatagccatcctttgaattcctctgtcatgtgcatcattgctgtggtggcttgctgagtacggttggtactcacccttgcaaatataaaattaatcagaagcgggagatgaagcctcggaggatccctatgcctactaccaggagggagatgaagacgatggcgctcagtaggtcttagtacggtcgttgcctgtggcaatggcatgccgctgcctgaattccgctgccttatctttttctgcttgggagatgaagacgatggcgctcagtaggtcttagtacggtcgttgcctgtggcaatggcttgccgctgcctgaattccgctgccttatctatttctgcttttggatgtattccggaccgctcggtccgatgatttaagactacgcctgcggggttatgatgtaataattcgtattagacactcgtgtatgtgcacttggtatttcagctataaattcgtgtgt

SEQ ID NO: 35474 - DNA, 701 bp, Oryza sativa
acggtaatttttcggacttcccgaaaagcacagagtaaaacgactataacttttcacccgggagtccctttttgatgaacttggactctatgaaaagctcactcagaggattacccaactcaaccaaaaagaaggtctaaaaccactcaaatgataggttaatgcttgggtttctctcgaggtagtactatgatagctcactttgagcatcgaggcatacacaaacacctcgacgttacatccctcttaatagtacggcattcctaaactcaaatgtaaataagaagataattataccattaggaatgcctttttttcatctttctttcattgtcttgagggacgccaatgccgataccgtttcaccatatattcttcaaatgattgatgcggttacttgtagcttcaaatggtctcgcacggtccatcatgacaaagtcgtcactcgcccttcaccaccggatttggttcttcggtgccaagccccttgcttgcccttcaccgccgcatggtccatcgcgaccgagtatcgcttgcccttcaccgtcttgccataatagccacttcatatcacacatcttcaatatcttcactttgtcattcttggtattattaggtgtaattgtatcacttgagcatcaacacctttgtaatccttgggacctatttctttcattcaactcaataaaattattagtccc

SEQ ID NO: 35475 - DNA, 922 bp, Oryza sativa
atcacggtgaatctggttgatcgcccataaccgcgggcacggctattcgaatagttttactctggccagaggtgtacaactgtacccacaagacacgattccacacatgtcgccatgccccgaagtatcaccatgatactgcaaagggggaaatcgtgacaagaccctccacataaccctcccttaaccatccacaccacgctaaggtttcacccccacccctcaaaaggcagtgggcggtcccctcttgcgccgcggtgaatccggcagctggacaaccggacaccccggccgacccaactccatcacgcccaccctcgccaccggtgcctaggaaagggtcgagctatacttcagatcaagcagttacccactcccgcttgtggaaagcacggtaagtctcccagggtttcccgtgaaccggtccttaactgccatgggtgcgaccagcaaaaccatgcacccacagcccaccattcagtgtattttaattaactaacaccattgcggtggcaccaatctaaagctatgccaatagacaaagtctatgtaataaggtgatccccatttgtgtgctagttgaactaagcatggctaagcatttcctaaaccaacatctagtcattttgatacccaagttatcaacggcatatggtaaacaatatgtggctgaggaataggacccatcccacattacattgtaaaagaatgcaacatttaatagaaatgcgggatatttgtaaattgggtacaatatgatcaaacgtattgcatgacttgccttgctctcgcactgacgagacctcagcaacgtcttcgagaaaccgtggatcgacaaaacggccgaaacctacgcgacaaacaaagcacacaagcaaaacaggctataagacaactgaaacagggaacaaaaccattttta

SEQ ID NO: 35476 - DNA, 659 bp, Oryza sativa
taaagaagtatttattggtaaaacttgttaatattgttataaaaatgtattgaaattggttgtttcgcaatttcatatattaagtaaggtattattttgtaacttattcgatgtattagtactcagagaattgatataggcctatcgcagtctcggtcgtagaaacattatatggacttaaacaaggagaattatgtaacatgaagaaatagtagtataatttgaacatgatacaactatttccattgcggttacatagatgatattagatttgaactaggagggaggtagtgcaatagttgaacacaacgacgatgtagtaatgggacaaggaagcatgacagtagaaatttcaatatgccaagttgtccgataatagctaacccctacgtgaggatccctctcctctctcaaaccgcgctttagtaaccatgtattgctctggtagttcaagctgcacaacacggctaggtggagttagaactcttctagtgtctatccattctctgtattgacatctccttggtcgttcctgggaggaaagaatagatgtgaagcgagcaaagttagtaaatgttgtgagaaaataaggattcatgtaatcaaaatattcttaccatgaaatcgtcgacaagaatatttggacaaacaaagaacct

SEQ ID NO: 35477 - DNA, 618 bp, Oryza sativa
tagatggggatgagatgagagatgaaaatgataaaaaaataatacatatgcagattaattgcagtttaagaataaaatgaaaaattcatagttttagatcaagttattgaaaaaactatcacgcaagaggtagtgagaaaaaaatgctcaatggaatcacaacaaaggcagctataaattaaaggtcaccaacattagtgtagtttttttctttgcgaaaatcaagcctatgtaagattccgtactgtctgcaatggctataaaaaacagagaacagaacatcaacaaagaattagctgaaacatcaattttattgttaccaataagtctaaattatcctaatggactgtatgggtgagagggtttttctttagagttagttcaaatttgaatccaaatccccctatccaaaacaggactaaagaatgagttgatgataaagcatcatagttctttactgctaactcttttttttgttgacctttctgacctatcatggtcttcaagattacttagagtgggtatatatcaaggtataatcatgaaaagtactttgacaacaaattaagtgatacaaatctcatacaacaaatctaaataactttaaacatgtctgta

SEQ ID NO: 35478 - DNA, 630 bp, Oryza sativa
ccttgtttaaaaaaaatttctaaatgaaagtgacttaaaaaaatcatattaatctattttttaaatttattttagttaatacttaattaatcatgcactagcgctgctttgttttgcgtgctagggagtgaggggctttgccacccttgaaactttgcgctcctctattttatcactatttcgttatcattcattccacttttggtagtcaacgtcatttgaacatacgatttagccctcagtctgaaacaagttattagaaattccaaaaaaatacgaaatttagttttcagtactttaagttttgaaaggttgtataaaaattgatggtagaaaaaaattgggttagttagaacggttttagtgcaactttaaacaaaattttcaaaggaaaaatatttctgtgtatacacatataaaatgttttacgtgtaacttggaccttcaactttatattacgtagtagaataaatttatgaaatctagtgagtcaatgatattatgatactattttcctgtttttaaactaagcattttttaaaaaattgatgatcaaagttggtttgagaaacgtcaaaagtttctctctgtgtctctcgctcttactttctactccccccgtccctaaat

SEQ ID NO: 35479 - DNA, 521 bp, Oryza sativa
aaaagcccaagctgtcatctgtgcccctagctaatggcagagccctcaaacctcgatgcagacttcggttttgttaccaatcaaccttagtacttgactatgtcgctctgcatgccatatctctgacacgaatcaccaaaagttggctgcagtcataaaactgctgacttctatattgcagatcatgcaagcccgactacatattcaggtttaatctctataatatgttatgtaagagtacgatctcctgattttattctaaatcacatctagggccataggaactacatatgcttgtatcacatatcatacctaatatcagaatataaattactgttcacacatcttgattcttgaatcactatttgttatgtaaatgttatgacagttgaccaaacaaactagctttactcccacgccacagtccaaataagctttttttttttagcctaagctaagcaagttagacaaaagaaccaaatgtacccgtagcatcgatacgcagttccctgtcgtaaaca

SEQ ID NO: 35480 - DNA, 515 bp, Oryza sativa
acgtcttacaaacatcataaagtcttacataaatacagcggaaaattaaaagataactggagctaagccttgacttggaccgcagcgggatcaccactccacaggcatcatcgacggcacggacgaagcctactcctcggagaagccaccatttgacgcatactcaaactctggggtttggggaaaatagagcaagactgagtactacccactgtactcagcaagtcataccggaataggggtatgatgcagggaattatcaagggatagctatagaggttcgtttgcataaagcgagcatttataaacagtagttgaaagtagtaaaacaattataataattaatcaatattaatcatccactgtccaacgctataccacgttgcaacaggcccaaccacccacctatactattcaattccattagactagactagggtgaaactaatcacggtgaatctggttgaccgcccataaccgcgggcatggctattcaaatagttttactctgataa

SEQ ID NO: 35481 - DNA, 1815 bp, Oryza sativa
aaatcaatcatatgttttatgaataataaggatccgataagctatggcacctcaatctttttttaatttattcctgttttttatacgttccaaaaggaaatagttatacattatgcccagcgaattagacaaaaaaaaaacaatcgaattgcaaaaaccactgttcgagattcgagaaagacatagccaaccctaaaagatatatactggagtagtcgtgtgtgttttagcacatttacacgtggtcgatttcctagttaatttttttctctgtcttttgttaggaggaggaaaaaaatcgatatagctaagtagcgtcgacttgggttgactttgatgaacctgaccatacagatgtttggtgcatttgcatcattgcatgtatccaaggagaccatggatacacatgcctggtgcagatcgatacaaagatttgggctgaattctaaggaataattaattatttgttactcttataaataatgataaaggatttaccattgaacccatatgtcatagacgcatcttaaagtgacaaaaagttaaatgtttcgaattctaaacataagttcgcctatttttttatttatcgtgagcacacgtgtttcgtgtttaaaaattttctttaaaaacaataaataaatctaattttaagtttataatattttatatttaaatatacacatttcgttctccgtgcctcaagtttcgaacaaagctactaggaatttgtcctcttgattcgattggcaatgtagttctaggaatttgctgctcgcctgctcggggccacagagggttacgggctgggctgggctatgtctgggagcatagcagacaaggctgcaggaaccaagcagcacagcatcaacagcaggttggcaggcagcccatacacagcctggcaaattaagtcgcaattccgtcctctcgacctgtttccgagagcacccaaaattccatccctaaaatttatttttttaatcctaaacataattttagatgtgaaaatattaatctctccaaaagatattttaaaattaacttaaaaaagacccacccattagtatcaacagaaacacaaaaagaaatcgctccaccataccttccctacgcacgatctcttctcacgtgtcatcctcttcctttgctgtgcaaaaattgtgaacgagtgcctcctcacttatgaagaacgagaaagaaggagaaggggattccaattttgagacacatatgaggaaacgattggagcaaggttttttttttaagaaaaaaagcccaaatttttggattgggcttcaattagggtttgattgaggccgttcatattaaatttgagttgtttcatacaagatttgttcttaaaaaaaacatgctcactcaagacactaataagtgatgttttagacgtcattaacacataattgggaaaaaatatgtggtagaaactatatatatattgaaaacctgaaaactaccattagataaaaatagacatatgagatttgtccatgtcatcacgagtaaaaattttactcgtagatttactctcatgatgatatggacgaatcttagacatccatttttcttagtttttcactacatattttttccccatataatttgaaccattaactatatcttatagatctgaatagtttcataaacaaaccataatattacaaaagctttggttacaacatttttggtcatgttattttcatatgcctaagacccatgttaaaaatataattacagtcaaagttatctcctattaacggtatggagtttaaatgatgtatttatttgtaactg

SEQ ID NO: 35482 - DNA, 578 bp, Oryza sativa
aatttcataagtgctgcccgaaaattcctgcacttttgcccggaacctcctggcaggtttccagtcaaacttgtacgggctagatgacgtcaccttgctgttatatatatgatttcgtccccaggtcaccttttggccattccactcctgttcattcatgttctagggttttctagccactcccaagcttcctttgcttcctccactcaaattagagcctatcttgtgagattgagagattagatgagagtgtaggagtgttttggagatggcttgaagattaggtttgactgagcactttggataccttatgggctgtcacttgggcttatttctcttggagatcttttcctagatggttaggtgtcgcccgtgagcttccaaagatcttgtggatgtcccgggaaagtttgtgaaggttttcctcacctccgcaaggaaacgaggtaagtgagtaaagattcttgtgctgagttttcaaatctttgtgtgaatcttctgatattctgcgatcttcatcttgttcctctatgtgcttaaacttctcttgctaggacctgtttttcatctcagcttta

SEQ ID NO: 35483 - DNA, 537 bp, Oryza sativa
gtccatgtgaaatcatggaaatatcgttattggtaatctgtgatgatccagacaaacacatttgccaccaccacaaattgcctggaaagagcaaggccacatgtatgtacatgatattgtccatctttttcttcctttgagccaagagaataacacatacatagctgtttttgaagtctttttcaaaggaagaaaatggtttgcatgtatatattgatgtgccatattgcatatccccaagcacaatgcaacattgcacgattgcgatgagcactacctcccagccgtggctcctccaaaaaaaataataattgtttctaattggggaaagagagaatttttttttgacaagacatggttctactgatcaaagggtgataggtgtggttttaaacattaattgtggttatctcctcaagtctaggtagggaattaattaaggatgcgctcacataaatattaattcatgtagatacatggaaaagtgcgacatatatatttacgactgatcataataatgaaaatgatcgggctgca

SEQ ID NO: 35484 - DNA, 656 bp, Oryza sativa
cccaccggtggtggtagggctttcagtcgtgctctacgagatgtccgatggcctgagagattccatagtactctacgctgccggagcagacgacaacgcattggcaaaattatttgccagcggcgttgaagggatctgcccgttcgtggtttgttcacctcccgccctacttgatttcttcatgggcagatttgtggcagcagttcgtcgccagcttctcttctcttcatttatgagtgcttctcctgcatacatgttagtagcatagcatatagtggaagtaattattttatttaggaattatgcattgcaagcatagctagtcttcatatattggataatattgatggtcgaaactggttatcatgagatctaagtacttcgttttgtatacaaaagttcatgattctgctaggattacataaattcatgctagtagactcaagattttatttccatggcgagtttgaagtttgggcatcatgtttcgcgtcgctgcttagttcacacaggtttatactagcagattcaggatttattcccaatggtgagagtatggtctacttcttctgaatcgagggtgttacatcatagccatagagatggtttggcgcacaatgattgtatctatgtgagaccctttggatatggacaat

SEQ ID NO: 35485 - DNA, 668 bp, Oryza sativa
gtatccccggtcgacactttcatcaaaataaatattgtcttccaaaataatcagggcatatttatacagttcacaagtaacatataaataaattccataaaaaatgaatatggatagcacaaaatcaaattcataataaattcttcccaatttttttcattttaaattaaaataataaacatatttgaggatgttttattaatggtatattcattggttcatcaaaatatcaaaatcgaaaaaccaaacaattagtagaggtggtggcaatggggcgggatggggctgggtaggaaaggaacaccgtgttcccgctccccacattctcccctcacccctagctctgcagagccaaccgggtggaaaacctcacctgcccttacccctgtagtagacctggtgggtgagcaaggtcccactcaccttgtgcgtgagtgccaacattggctaccaatgccgagctacgacaggaaacaacggcttggagggcagcaacgaggcaacaacgtgagggtgacaaatgtagaatattttatagtaatttatagaaatcaaactaatttatgtaaaaaaactaaaattgtatatactactatttcgaaagaaatgtacactacacacagggtttaaagtgttagacgcgtcaactgcgcacacctattttctag

SEQ ID NO: 35486 - DNA, 681 bp, Oryza sativa
ttcctgcagccccattcacttctacatatctatttattattatttaataaaagtccattaaacttcctacaaacactcttatgctgccacgtggcacttctacaaacgctctaaagtcgccacatggcactatttaatctcaccgttgattttcacttaaattggtggacccgttattttacaccattagattagatctattattaaaaaataatgacttcctcaggtacacgtatgagttggtacgttacaaatgccactgctttctttccgtacatacaaacattgtacatgattgaaaacaaaactttcctaatcttcactggaaaaaaaacatatacatgtacataaaaaaagacagaataagcatacattcataaaaatcaacggtatttaaaatatgattttctacaatataaaggtaaaatatattacttcacaaatatatatatttagttaagttaagatctataataaatatccaatcaatgttcttttaaaccatcttctacatgcctgcacgaatgcgcgggctacctttctagttttcttaataaccatatccaactctaaaacttcttatattgtggaacggatgaagtatatcagcaggatttatgcattttctgtgcagtgccttcggtgtgctatgcagtttacttttcacttgctaaactccaa

SEQ ID NO: 35487 - DNA, 702 bp, Oryza sativa
attcctgcagccccctagatgcttcagtctccctccacctccacgaattagcacttaatcctatatatatattcctctataaatttctatgtacaccctctagaacaattgggttttgtttagttgaattttgccaagtgctattcaccttgtctctagtcctcgctcaattagtcatgatcgactatagattcagagcccccaatagttggtgtgttgatttgccgggtcgattagatctaccacttcaatcgcaactattccttgtgcttattcacctattcgcaatatttagattgcatcttatattgttcttgcagtgttctcttgtctgcattgcaggggtcatcaaccgcacgtcacggttggtacgacatcgtttgtggtgtagcgattgcacggcgtcctggacttgttctggttggtagccacgccgcaaatgtcgcactcgatcaaagcgagagttatccccttaccagaagatcgggccatgagagagagcgtcatcagggtaagtcctacgttccctcggccctggcaatcttatcggctacattggtgttgttcaaggctgcatcgcttcgacctcttgaatcactctggttcagttgatatttttgcctacctatttatcatatatcttagttaatctaagtagatttttcaatttacttgtatcggtcagatctttttctagggttt

SEQ ID NO: 35488 - DNA, 685 bp, Oryza sativa
ctactgagctcgcgaatcgtccacactcccgcggcaaaacaacgatgaggtttgattggccgcagttcgtccgttgtcccatgcggctacggaatcatcgtaatcgtcgtgcgtgagcgattcatccacgtgatgctatttcttgcttgctccgactttagtgttgccatggagaggcaacccgaagtggcaattaaggatggctaggcaaaacggagtggtacgcgggtttgggtggcacggctccaagcatgtgcgaagtgttcgatcgggtgccatgagtagctgggtagactggcatgatggtgaaggtgatcgatgcaaaaggaggacaaaaaagagcttgcggtggcttttatagccctagcgcagggggggagtggtgatggcttctagttctaggcgaagggaagaggtggggtggtacaactgtacaagggagtgaggatggtgggtggtgcgacgtggatgagccccgctctcatgcgaacgcacaatgtcgcactgcaccaggcatggccaaggctacaaggtggtgtgcgggcatgtggcagcggtagggccacgatgctatgcgaaactgtggttgacgcgcgtgggcgtagtggaaaaaactggaccggaccggcgattcaactggaaccagagcttggcacggttcggtcgaatagaaagcccggacatg

SEQ ID NO: 35489 - DNA, 769 bp, Oryza sativa
  unsure (1)..(769): unsure at all n locations
agcatgtcccnatgagcttcaatctaattcctgcacccccgatagaaaaacttaaaaaataagcatagtatgccaacatctagtgatgtggcgacattttggttaaaagatcagtattccacaccatactttttatgccatataaaaaagcagccacttattccatctcgacaaggatctacatgtattcgtattgcttttaatttgttactataataataataaaataattctatcgatttgaaaccgaaagatatatgattatcaaaagtaagtgcatgcaaataagcatcatttccgagcgattcgattaatcaacatattcattatcttgggctatgaacatggcaaaacacaaaattgaatccatgagctaatgatctagcagtcaagcttataataccaggattaatcaaaaggtacgtatcaatgtttttactaaaatgcacgtgattgtcagtttatgtactactctacttatttttcaagttcttgcactaaatcgcacgcatctactaagttatcgtactgtgggtgtaatttactcttcttttaaaaaaaactctgaaatggctatttatttttcgaaatctttttaaaatacatatattaaaaaaaattcacgtgatcttcaaatcctccacacaaggaaaaccaccaaacgttgggcccatgaccgcaaaaatttgcttgggaaagggaaatgggcccggcccgtgctgctgatgacgtgggctttcattggagctgaaccgctccgaggccccta

SEQ ID NO: 35490 - DNA, 769 bp, Oryza sativa
  unsure (1)..(769): unsure at all n locations
aggaggttcncnaatagaactgctatcgaattcctgcagccccgatctcgatccggatggggacgggagaacaaatggcagcggtggttgcgggatggcgtgaggagagagaaacaccaaatctagcgtttctctctccgggaatagcgcatgcgccatctatggaggcccatatggcgtatccgttggagcggattttctccccccatacccatttcctggatggaagatgggatgccggaactgctgggatgctctaaaggccaaagtcaatgtgctaaccatttttttcgttttgcctccattaattccggtgtcccactgatcggttttcaacacgcttgtctgcaagccccagccacagttctgttccctttcacgcccttttctcagcaaacacatactacaggcgtacagccgcacaccctgagaaatatatgctccaacaagtcctcctcaatatacaaatgaacctgatgacattatttggaggggatcgatcagccaaatggggaataatactctgcaagacgtacaaatacaacatgcgatttcaaggcacaatcaagttacaacaaattcaatgttctctggcaatctgaagcccaaccgaaacatgtcagactcgttgggtggctcctgactcatcaggcgtacaaggtcaatcaattcctatgcttgcttcgtttcagaaattcttgcatcttacatccctcggtcatggtctgtgcttaaaatcagaccgatttgcttttggaaaaagaatgtg

SEQ ID NO: 35491 - DNA, 688 bp, Oryza sativa
  unsure (1)..(688): unsure at all n locations
catccctgaaaagggacgggtggctttctccactaaacaaagacagcctacaactccagaaggaactgagtggatctatcaagtctgaaagngaggcgaattatcacttaatccacaccgtttgcacccttaattagttgtcctaattgagttgaattgaccatctagctagatagtgacaattggtaccaagtaccaacatgctttggatccatctcctttgacacaaggagagaaggtatacagattagtcaatagtcagctttctctttaatttgttttgtggccaccatgataattgaacagcttagctgtgacacttctccacaagaaatgctgtagtttttcaactagctagtttgctgcatatgtgcaattaacttgcaaaatacttcctccgtccaaaaaaaactcaatttctagagtttgaattatatcccagaaaaaaccaacttctaccatcctacctaccctaagcacgtaaaacgagaagttttatcccttcaacactttttacctacctatcacttttgctactttttctattgattaagggcattttagtcattcttcatctccactaactccacctcgggatgctagaaatggatttttgtgagacggagggagtattgctttgagatgtgtaggatcgaattataataactaagccaaccagaaagggggt

SEQ ID NO: 35492 - DNA, 730 bp, Oryza sativa
catcaaggtcatgatatcttcacactatgaacaaaacaaaaatgtaactttccacagtttgtagtattgttggtcattgttgcttcaaaacttgcagtcttctttgactatgttctatcagaagatctggcataaatctgttgaggcgaccagtccgtatcaaaatagcatggcgtaatgtcatgcttcctgtacagagtatagaaatgctatgcaatggactataatgatccacaacaccagtactttcctaattttccaatttttttggtagatcgctctctctgtctctggggagacttgctgttgctggtaccctgagagctactggaactactagaaaggcttcgtttcacatgacttgggaaacaggaagttgtaggactgtgctgtggatgctcctcacttgagtgttcgtctactttatcatttttcactgacttttgcggtgaatctccagctatggtggcatggttatcgagattgttaacaaaccctgcacgcacagagatgccaacttcagtataaatcctactaacaaattattgtataaacaagataaataaaataagttaatgagctgaaaagtaatcatcaactctctagacaagagtaacttacatgttactcgtatgcgaaacaatactgttgaacaagcatgctaatcaagaacttcaccagtagcaataagaaacaaacaaataaacattgcatatcagggctgcaggaa

SEQ ID NO: 35493 - DNA, 2338 bp, Oryza sativa
  unsure (1)..(2338): unsure at all n locations
ccgaccattgcctcgccttcatcatcgagtggccatggaggtgctcatcaccatggatagtaatggggactcttatagtgtcacacccaaccttacccaatctactttttaacaacgatggtaccatgctcttttactcctctctctcttctcactcattttctctttttttcaccagattggtgtgcaatgaccaacaagcgataacgttgggcttggctttgatggatccaacacagatccactagggtggcgatggagcatgagctgctgcactagggactcaagggactcgagacccaacagatccactagcacgatgacagaggagagtgagcagcgatggatctggtggccggggctcggtctcccttctcccaggcacacgatattatggcggctcgaccaacagcgaagctcgagtagacaaggagcatattagagaagaagaaatgtagtgtaggtggtaggcagctcacctctgatcaggcactggtgccgtgcaccccttctctaaccatgcgtaaaaacaaaaatagggcccacatgtcagtggcacttacataacattgcatccacaaaaataaaaaaaaaatgtaatagacccacaaggcagttacacgttggcctctcttcttccttcccatatctcctctctctctctgtgtgtggatgtatgtctcaacgatgagatcgatcgatcaggccgtggtggcacccaagcttgacgaggggaaggtgtaccatacgaacaaggggacgggatactgtaccttagtatattaccgttaattaatctcaaacggataagagcaaggtgcctcgtcaaacattactttaaaatccaccattcagtcttattccgtacgaaggtttcagtgaatgtattgatcgtgttgtcacagtcagcttactagtatntgacaactactagtaagttgtttatagtggttggcagcatactaattaaaatatgttggtattaaaagtatcctcagaaatggtagtggagcatgtgctggagaaacattatgtcacccgttaattaattttacaaacatatgattaattggagccaattaattgtacatattgtcttcgtctcaaaatatagtaacttttggctatgatatggacacaaaagtaaatttatagcatatatatgcgcaacaaagtaagagcctaaaatttgctaaatctatgcttacatgttatgcattagggagagtcagaatttgtgtgtattaattagtacagttgtatatatatcttagtttggtgctgaaaatccatggaaaacagataaggcgcgcatgaacgaaaagtttggtttcatatagtccactactgttatctcagaaaagaaaaggggcaagaaaagttactgagacttcaatgtagttttttttccttttttgagatgaagtcaatgtagtttgtttttctttttcagatcgatcagtatgaacagatcaaagaatgaattttcaactaacaccaagaaatatcttttaaaaaatcgaccagaatatataactgaaaaggtcccactaaaggcatgatacgatcgtacccaaaatcttacccacaattgtattttttggcatgtcatgatggatgtgcaatcagtagtgagatgatgaaacaattaccctacatatacattttgcatgcatatagatgtcaaacaagacccatttgttgccctataaagtctaaactagcaacatctcatatatatggaagcaaccacgaaaaggcatgtagtctagtggttgcagtgacctgagtagtaccccaaggtactgagtttaaatctccatatgagcgaatttcagattgggttgtttgtggagctaagttccctatttcagattgggttgtttgtggggctaagttccctatttcaatgattatatatatccagttagatgtagaggctgggtaaaaaatacccttctctaaaataaaaaaatatagaagcaactaaacaccagctctcagcgaggtgcgtggattggcaaattttatctcatggcagtaaccaaataacccctaaatccatttaaatgaaactaattagaaacatataacgtacaaataacgtaaacatgcatcgtcgtagggtgtatctattgtgcaagacttttttggttaacgtgtgggtaaaattctcgagacttttttggaataaggatccgttttgataagctagaggtgaaaaggatagagttgctaatcagtcatcatcatatggagtagattcatagtgcatttgcacggccaatcgttggggcgaccagcagcctaatgctttggacccatggaggagccagga

SEQ ID NO: 35494 - DNA, 554 bp, Oryza sativa
atgtgaaagcctccaacaattaaaatgtgcaaagttaaaagtcaaataaggcttagaggatttttgtatatttcctaaaaacctaaaatgtgtaaataaattttagtggaattttcagagcacaaataataattattaagaaataaacaaagttgaaaaagttttataaaaagaaaaaccctaaaagtcccccttccctcccttgggccagcccggcccatctctcctcccaccccccctctctctctcctctccccgcggcccactcagcctctccctgcgcgcgctgctgacgggcgggcccgcccgccaccctcgctgacgggtggggcccacccgtcatccccgacctcccgccgctcccgccgcctcgcccgtgccctagcgccgccgccgccgcaaatcctgccgcctcccgtgggccccgcatgcgataaagcggggggaaatattgcccgcgagcccctttcccttttcccacattttttccctctctctctcgagttcaaatgggcagatttgccccccgctaatctcgccggcgacattgatgg

SEQ ID NO: 35495 - DNA, 936 bp, Oryza sativa
ctgttttttaactatataaacccttatggtggttctgagacatggtggataatactcactgggtatgcacctagcacccatatttcattcacacattggatggcattatggatagggaaacttacagtgatggtatgttgtacctagcattttaaatatgcatatggaaaaacttttggagagcgatgtcattgaatttacaaattgtttgcatgcagtttcggaagcaagctaagtatgaagatgtgccgccgcctgcagcaattgatcttttcaaggagcgccattgcagtagcaagactggtttttactaatgcacgttgtttgttttgctatggtcagtgccatgtacatgagcttgttgtggtcactgagtagtcggtgaacctgtttccatgtatgttaactgggtttgtatttttatattggatattaattgggcctgtgtaatattggatgttaattgggcctatataacctttgtgatatatgggctattatttggtataatgctttggtatatatgggatgttagtcttgagtcagttcctggaggtatctcgatccacagtatagagaaattaaaatattactaaaaaataaaaaaaaaggtggtatagcactttgtatcttcatgaggatcacaaacgaaattttactgaaaacaaggtggtacggcattccatgaaggtcacaaaagatatctcaagataaacagcagttcaaaacacactccaaaacataaaataagttgacatgttgctgaatgaatacacagaaattctttagtcaaaatcctcctcctcctcttctcgtagggagtccaaatgttggtacgacctgcaacgtaatcatcagttctagggtgcataagtccacaaccatagcaaatgccaaactccttgcgacaaaggaagatggggcagaacacgtgca

SEQ ID NO: 35496 - DNA, 638 bp, Oryza sativa
aagagctccagtttctggaggaagatgtttacagtgccgcaccaacagccagtctgagttcttcaagaaatacggatgattgccctgatcatgataatcttacaaatgtttgttctgaggtgcgcattcttgttggtgttattacttattagactctcattagttctggttttcgttggtgccaaaatagtatggctgattaggctcactgggagatttcttgtaccaggatgaacaacagcctgaagattggctggacggagcagtgtcttttgcaagtgtgattgtcctggttcacaatatgttaaaaatggattacatgatgcaggttagcaacacaaggatctgcatgtaagtgagtttcatttgattgcttaccttttcttctcacagaagctagagtacactgcaggaaaagattgtaaaggcattttgggttaaaacatcatcgtcggagatagagggctactgtcaaatgtgggatttgcggccatacatcgatgacaatgtgatgcagctggcctggcagcttgttccttagaagctacaaaaacaacggagaagatgaacagcagcacccatgtttgacaggcaggtgagtttcctgctagcactagtcaggaagaagttgcagtagc

SEQ ID NO: 35497 - DNA, 701 bp, Oryza sativa
aggaagggaatatggtttgggatgtttttttattagaaaatatatcaataatgatgtaaaataatgtgttcatatttaagtggaagccaatggatggatgtttctataatttagaatgtcatacaacgatttagaaatgtttataagaggtttaatagactttaacgcctatttatgagattattttccataaagataattttaattttaattatgatagggataaaaaacagaaaggaacagggagcctacaaattgatacgtgcgtggtacacggatatggggacatgggaggttttggtattctaagatagatctaacgaagtccaccgatttaaatgaatatcgatggttagatttctctattttattaggatgccatgtgacggtttggaagtgtttgtaggaaatttaatagattttatttagaatttaatagattttatttagaatataatagatagatagatagtactacgtacatatggatttttgctttattttatatggtagaaaattatattttatattttttcttccgatgatacgttgtactaattttttttttgcctttatctcattttgacactggcaatttttttattccggcgaatcgaacggaagcttttcttttttttctgaatcatacgtactggtatttttttgtttcgtcgacggtacgtattctcacttttatacag

SEQ ID NO: 35498 - DNA, 679 bp, Oryza sativa
agtaccaatcaaggtattcatatcagccattcattggtattggcaagaaaacatgatatacaaggaaatgactggcttgatgtttgaacagtttcaatctataggcacagttcatgattccatataataagaataagttgaatactccataagacaggcaagacccacttcagttagaaaaagagggcgatgagtgaaattgcaaaacaaaaaggaatgaaataaaaaagtgtgagataagttttgcactcttcatgctaacaatataacttggtaattttattagtgaggtctgaaaataaaatatgtagggagttgcatcgttacagggtactgtacaaagaaatggtcacgatggttaatctgactaccactatatgaggaaatgagaaattaatttgaatggaaagcaatattgcacaaagtttttaataattagtcataaaaaatctgttttcaatatagacgaagaaacaagaaattaatttgaatgggaaggaatatttcacaaagcctttaataattagtaacaaaaagctgttttctaatatagacagaacacctacaggtagcaataggagatgtgatgattgggcacagaaaaatgatctatgacttacaccggttcatgttctggatgatttcattgtgatgggtgcagccagcttcaagataagac

SEQ ID NO: 35499 - DNA, 685 bp, Oryza sativa
ttcgcttgtacccagggtgaatcgcgccaattcttgctgcacggttggattggagatagacggtggtattccctctcacaattcaaaccattcacccccgagccggccgttttcaccctcaccgccgccgcgcgtcgcgcccggattggcgccaacacgtcgccagccgattccaacagcggtcaagtcaatccttcgccggtaagtattcaaacgtgacctcccgccactcaaattgatcttggccgccctctcacagcctctgccgccctagccatatccaaagctcgagctcatccatggcgatgacggtgtccgagctcatccgctcctcctagccctataaataggaccccaatcccttccctgtccatcatcgatcatcaacaaccatagccccacaaccccgaagctctgcttcaccaatccattccatcaaccaccatcgcccgtcggtcgaacaccttgtgcgcgatcgactccacaccccttcatccatcctccgcgctaattaccccttagaacacctataacctaccatgttctagcatactaagccctaatcgaagcatcgcgccgagtttaccacactgcaccaagccgagcaccgccgcccccgcgctgctatgttcttcgccgccgcgaagtttttccggccgtaatccatcgtttcaaccaatctcgg

SEQ ID NO: 35500 - DNA, 959 bp, Oryza sativa
ccacgtgatgattctgaactgattgataaattctcgtgccggattggtcgattgcccgtgcattttactaattttttttacaaaaggtaagtaggagtattccctattatattaataaagaaggcaagactactttataaccaccctttcttaaaagggaaaattgaaaccatgccattataattttacaaaatttgatatatgctgttattgactcatgtgggtcctacatgtcattgagataccgatggcatatctcaaactttgcaaaattataatggcatggtttcaaattacccttcttagaaaaggtctcccagatgatgatttgctaagcattagtaagtcaattagcagactagtccatattcaaagggcacatcaagtcatggaggcttgcgtacgtgcactcggtgtggacaatggtcaagtaatattcggtagaccagatacttgagttcagataattaacaaccagtattccatgatctggtaataaatttcgtttatttacatgaccaaatgtatccctgatcggaatttcaagaggggctagaatctggtaggaaatttcaccttggagaaagatttgacaggaaggtgaaaaggtcatattgggagtactagttaggtacaccgtacaggccaaagagaggcattattattgggcgtagtttaatattattggattatgcatacacatctttgaaactatattactggtggagattttagatttatagagtctagatgttgaattaatgtaacagatgcacattcaatatatcctgatttgttttatggtcttgcaatgtcaagcgatgatgcatgcttcccatgaatggatgacgtacgtttatgggaaatggttttacacaccaattatgtcagactatttttggtggcaaaaggtttaataagggtcatagtgatggcatttgaatccatgtattttatcg

SEQ ID NO: 35501 - DNA, 1912 bp, Oryza sativa
ggataattagagtagattgaaagggttctaatacttgaaccaaatttaaataaaaatcaaatagatttttaaaccaaacaaatttaatcaaaagccagcatgatgcattcaaattttagtttaaaatttgaggatgttacaaaatagtattgtaaaatttagtggttgcatgttcagtttgaaagttcgaggtattacattgattttcaatcaaagtttacggaagtatttggatttttttttcctaagaaaatctcataaactgtgtttgtttcagccgagccaggctgtgtaaggcccataacgcttacggcccaccctaactgaccagtgtagccctcccttttcctcgcgtcccgtgttccctcgccgcgccgccgtcgccgtcgccttcctccatcccgcccgcgaccagcgttgccgccaccggtgagcacccatacctgtccgcgcatcccccgttcacgccattcaactcctcctctagatctggaagcattttctctttgcaggtttaatcttattagtactaataacagtttgctcagactgccatgagcaatccaatccacatctctatatgctctttctttctggaatggagactcgaacctgtctgctgctgatttgtttacttcgtggtggagtgctgagctgttatatgcatttgggttttgtgctgaattttcaggggctcttgtcgtggccaaggaagcagcgagtcgggaatggcatcgcctgatgcatgtgtggaggacaaagttcatcgcatcttcttggatttcatgaccaagtaataatttcgatcctgcacttttccaaccattgaggtcctgatataacttttgcagtagatctgatgtgttgtgtggtgttgaaactaatatcagtagcagtgaaaacaactgaattaataacttttgcaaatctttgcttgcacatatttaattcttatatgaaaacctagggttccaattcttatgcaaacctagggttttctttgaataattttcctgggtgaatattttccaatttatggtgtgaattaatgcgtactaattttataagagtctaggaggtattgttttatggttatgttcgttcgttttcttacactggcagacaccttcattaagttgtttatttcttgtggctgtctaatttatggaaaatacacgggcgaatttgttgctgcttttagggttgcacggtatgacgagctagttgatgcaggtaaaaaggttcttctcaagtttcatcaagaggtaggtgagttcatttctttttccctgaaaaaaaatatgttagccagcgtaattttctcttctctattttttggatctaaatttttgaaggtttcacctgattgtccatcgtatgattcatgtccaagtcttctaaaattctatagcataattacttataccctattgattccccatgttcctgaccactattgatagtttagggctaggtcctgatctgttgaaacttcaggtcctagaataagccagggctttcagttttacgatgaagataagaaaaatgtaaaaattcccataataagcctgtcttagatgggccaagttttatactagctttcttgctttggtaaatttgaagtaaactatatttattttgctacattattttatttcaacatttattggtgtaatctcgtattttatttcagttctacctagctgtgctgctatttgttggaccgcggatgttgtatttaacagagtaaatttctgttgtaaacttgtatgccatgcaattgtgtactgaaattatcattttctggcaaatgattactcttcaaatctcaatcctgcccatggattcctgcttcatgtttattctacttattagcatactcacgttattacatcgattcgggccgcaggaa

SEQ ID NO: 35502 - DNA, 1588 bp, Oryza sativa
accacctcccccacgctcgctcccgctacagacgcccccacccagggcttctgggcgcttcccgcacgggcggacttcggccagctctatagcttcgtggttgtgttggagatgatggccgccgcagcagccgcgcccgccatgcctggggaggcgtccggaactacctccgtcgcgacgcacgcccgccccgcacccccatccaccatcgcctcatcgtccccgtcgctgcaccacgccccttgttccccaccgccctaccgcgcctctcccttcccccatctcccgctggccacttcccctctcccccattccctcctctcgttgcgtggcgctcgaggcttgcagagcttggccaggctcgccggccgcctctcccctttctgccgctggtgaagataagagaagagaagagaggaaagaaaagaaaagagagaagaaaggagaaaaagaagatacgcgggccccacattttccccttctcacttacatctaggcccataattttttttattttgatgactaggatgccacgtcagcgaaaacacggatctatactgccttgggatcgaaattgcatgattctgtatagtttagggcaacatcaatgtataatatggaagtgggcattagtgtgggaccatgtgtcagtcagtagtagttaaattagccatcacaatgtatgggaataagatagggccacagaataaaataaatcgctacccccaacctcccgggtcttcctcccgcggccgatgcgatccccacttccccagtctcgactccatcgctaccttatccaaaaaaacaaaaaaaaaaagaaagaaggagactccatcgctgccactactcgcatcgctcgatccggagcggtcggccgccgcatcaggccagcctccgagccgccgacgcctcgatgcccagcagcccaggctggcggagcagcagttccctaacctggaacgcctctccatccaactatctcttccgatcccgatccaaaatccttccgctcaacgccgccatctattccggttgactccgacttgatgtcgtcctcatcaccgccagtcccccctctggttgtaaccaatgtgcttgctgctgaaatccgttgaagcttggagtagaattgccatttggttgatagttggtaggagccccaaaaggatggaagttgtgaaaagtgggtgttgaggattgagaaaactgtgtttgagagaatattgaggagaattgtggagaagtggagttttggctaccatttccagaagcttggctttgggagccctggctaagcatgtgcataaaacctctgttggggggattcatcttgtttgatgaaatgcaggaaaaaatgactttgagttgtgtttgtatttgtagaggatgaggttgcagcgttgctgcaagaagttgcaacggctacaaatgtaacggctaactgctactctattattttagtacaactaacagaaaatcactgtacacatgctattttttgttcctctcttgccggcagtagcactactacctggatgttgctattatctactcccacaatggctactacctgcttagatgggtg

SEQ ID NO: 35503 - DNA, 1650 bp, Oryza sativa
ttggttttcattgtgtagcacatatgtttgtgagctggctcgatggaattcataataatttgaaattacatgttctgttaggagcagctgctacttgttagtcgctttggctatgcaggaataatgtggtttttgattaaaaaaaagtcatatcttcccctttgcaggttatatattctcttatccattggctttgtatatgggctatcctacaaaagcctggttcgcggaaaatggtagttgcggcatgtcaacatttagagaatgtggtcaaggagttttttacctagggatatgggtggcgatctagtcttagaattggtggtccttaaaactatgtgcttttggaggagatggccaaggagttgttcatgagtggcaatttagtcgttagattgatggtcctcaatactccatgtcattcttttttcctttcgagtgtggttttgtatgttcggttgtgtgcatcttagttatgcagaggccggaagtgttctcaggataattgtatcaccttgatgtaattgactgagttcaataaaagcttccattatcttaaaagaaaatcgcctgagctcggcgatgacgctagttctgccattgatcacctggccgaggaaggtagtccgagggatcaacgccacgcctgcgctacccattataactgaaaagtcggactcttgagcgtccacaatatttgagtgaataaacactaaggatgtccatagcagcaacttgcaaaacacaggctttttggctagtttaaccaaatgcacttgagtgtccaagcacctaatagcaatatataccaatgacaataacatcaagggagaggaagtacacaatatatcatgcattcatactcttgcaagccataatatggttcaaaatggtaattaaaacaaaggcctgcactactatatatcgaacataaaagtcaaacacaagcttagcatgtacagaagttaaactgcataacaaaagcagttgtaacgattcattccacttatatataaaatggaaaaggtgaatcatagttaccaccagaagatactgtgcatagacaaattcactaaaccaaaaaccatcgccaattaatgtagtccattaatttccatgctaatccagttcttccataattatgcctactaacataagatgccacaagcaaattacaggaggcctctcatgtgcatgacagaagagatagattgcttttaccaagtaaactgaatgataattttaccatgacacaacaaattgcaatacaagaaaccaatccaatcacttaacagcccaaatgagaaaattgcatgccagatggacaccttgttgatctgatcacaatatagaacacacaagaaatctagaacgctcaagactcgttgaaatgcgtatgtgctgccaacttcccggtcgcactagtgctgctctcctacatgaaaaaaagaacacaaaatataaaaatatcagaaaaaagaaggccacggtatccttcagcagagccagcttagaacgaaagaggttccacactttgtatccaaccttgatttcattattgttgtgtgcatacacaaacagcattgcgttgcacactgcaatatactccctccgtttcaaaatatttgacaccgttgactttttagtatg

SEQ ID NO: 35504 - DNA, 887 bp, Oryza sativa
  unsure (1)..(887): unsure at all n locations
tttatatcatttgatttattgttaaataaactttcatgtacacatataattttacatatttcacaaattttattgataagacgaacggttaaacatgtgctaaaaagtcaacggtgtcaaatattttgaaacggagggagcaggaacaatattgtcaacagaccaggaggggattgcaattctagcagtagatggatccgccggggaccacgctccttgcctagatcttggtgcagagcagaatacctcctctgacctctccctccactccttccgcgtcctgcatgaagcaaagcatctggtatgattgaatcttggacaagacgataatggcgaatcgtatggttcttatatgctttaccttatgtaagattgaatcgacctcagggtgtcagactcgctgcagtgcttgaagaaatcgctgccgcatggatgcacgagagggaggggagacggagatgatgcaccggtagcaaggtggtcgcggtggattgcgaccgtcgcctacatctgccgctgccgctgcagatgtcgaggtgaacgacggcgtgcgacggcgctagggctgaggggggtgccgttgcgtggaaggcctcgcgggcgaggtggcgcagggaatccccaggtggaaatcggcggcggagcgatcggagtgaggggtcgccggcgtcgcgatggctgggcatcggcgttgtcgcgggatgcggacggcgtgaggaggcgtggcagcgtcgatccggagggcgcatggccgggtacggcnngtgatttgcgggagtgcgggtgtagcgtggatgcggcggcgttaggggggggggggggtcgtggatcgatgcggcggcgcgacgtggatcggagatgctgtggatggaggttgaggcgaagaa

SEQ ID NO: 35505 - DNA, 557 bp, Oryza sativa
aggacaccgaaggcaatattttataatttctgggtaaaaagaggtgatatatttttccaaatgacgagattgcccagtgtgcaaagaaaattatatattcagaagaagaagacatgagacgtacttgataaagattaatacgtacgtacccttaaagatgcactaatacaagcatggcaaatgatagctagaagatgaattcatggaaatctactgtcgtcgatctagagatgcagctccaggtccatctgcttgtcgccggcgcccatggaagacacggcggtggctgcagcggcggcggcggcggcgtgggacgctcttgtctagttgagcatgtccaccgtgttgtcgtcgcggccggcgctgccgagagcggccatgagctgcgcgtgctccgtgaagcgctgtgcgccgacgccgacccgctccaccactcgattgggcctacgctgtagccgtgggaggagatggcgccatctttccccacccaaaatcaaaaaatttcttagctgggagcagccgccgcgccgccatgggcaccaccggccttcttcccc

SEQ ID NO: 35506 - DNA, 4609 bp, Oryza sativa
agatcttgatgagttatacaactttattgttgatgaccttttcagttgaaatcatttagtattttaaatgttgtttgaagctggtatattttcaaatctaatttcaaactgtgcaaacaaagttatatagataaatgaccaaaataaaagttgtagatcttgatatgttatgcaacttggttgtatgccatcttttccattgtaattatatcctacctgaaaaattatttgaatttcttatattttaaaatttagattttatataggtcaatcgcctcgggatggagaaatgaccaaaataaaattggtagatctcaatgagttctacaactttattttttacaacttattcatatgagttcatttagtataataaaattcaatttgaaattcatttttgccaaagagtctgatttgcctcctctttgggttgggctggcttatgagctatggcagccttatgtgtaagtcggatatccgatggaaaattccggataatatccgacggatatccaattccggcggatatcacctatatcatattcgttttcatattcgaattcgaaaattttcggatatattcgaccgaaactaaccgaatccgaaaaaaaggtccggtcgaacggaaattatccaaatcactttcaaccctagccgccgccgccctcccccctcccctccggccggatttgggagggggagccgccgccgccaccgccctcccctctcctcgctccggcaggatcttggagagggaagggagaggagccgcaaatgttgctccgtgcctccgctgtcactcgggaggggagccgcctccgtgctgtcatcgtcgtgcgcccgtcactccccttcctcccatcggatcttggaggagagagttgccgccatgcactgtcacttcctccactgccgccaccgtcaccgcgtccgtgccgccatcgttgctccccctcctccggccagatctaggagtggggagggagagagggggagccgcctccgcgccacctccaagccgcgccgccactgcccttccctcctccggtcggatttgggagggggagggaggaaggggaggggagcacagtgaggggaggggaggagtggtgaggagatggtgtggtgagaccgggtggtgatttttataacttcaaaactttttgcaggcggacatcctaagatatcgcttgcgaaaatcgatttttgtaggcggaccacttaagacaatgatcctgccccatggatgttatttttgttaggcagctatttagctccgagagacctcgtctggaaaaagaaaattgggttttctagtaattgcatggttttaattttgcaaaattacagtgttacctagccaatattgttaatagtaatggtattttttaagtgacaattttgtaatagcatgttcaaatttatccttcatctaaaaccgtagatatgaggcttactctcccaccctctcatgtagctaaaaattaaaaagcggtatctataatcttgtattggtgcggcagtttattaaaataagacactagtaatatatatgcaagctttttttaataaaccaacactcttaaaatgtaaaatgattatatgtgtcggttcttaggtggtgtttgggagggaccttaaaaatagaactatgggaatagagccaagccgaccaccaagcaagctagctagcctagtttttttatgaaaaaattttatctatagtacaaacattttcctagtaccataaataccacaaaattcttccaccttttagaaatagcacagcaaaacactattagtataaaaaaataccacaaatctcaacgaaattgacgcgggtggggaggcgacgctacttttcaatgaccaagttgccacttcgccccttttctttaaccagccgtatcttctcccttttttctcgttcttcaccagttttctgttcaagacttgagacctcgcccatagcacctcctcctctcatcatttgccgccaccttcttcctctccttgatccccttttttcgcgatctctctctccactcaccgcctccctctctagttatgttgcatggctgcctcctcttggcatggcccaccctccctccgcttctccacataccaactctctcgccagcctcctctagtaccatctctcgatcgcatcaagaatttagatctactagattcagccgtcacgtgctcgacggccgccatgtgaggcgtggaaaacctctagtctgaatttgaaaggttattgtccaaacacattgatgatgatcattagcaaaaagggattcgcacagtttcaccacaagagagatatgcacaaaaacagccattttcttcttcgaatgatttcgtcgtcggctcatccaaaacgaacatcacaaaacgtcaaaatgcacatatattactgtccatgcaaaaaaaaaatatttattcgtgtccatgcaagatttgggaagaagccgacgttgctattgtgactttctagaagccactctcacgcatcactctccatctcaccaccagggcccacacacacaatataataacaataaaaaaacacaacccccggatgaaggggcccacctaccttcccgcgccatcggacggctgagcctccgctgatccggccacggacggcccagatccaccccgcgtacgtcgcgcgagcgtgagggcgtcggcgtcggcgtgcagatatttctgggcccccgtggggacgacgcggtgggggaagagataaccccagccaccatccagctgacgtctccatgacaggtggggccatgctatccatggcccacgagtcagtggcttgtaggagtaggagtcccggtgagggtagggggggtctggtccggataagacggctccctgtctccgcattgacgcgcgtgacgtcacgctgagaccccgcgcgctgtcgacgtggccgtgaggaggaggaggcggagacgctgacggcgtttataggcgggagtttttacgcccgtgggccccaccacgaagaacgtggggcccactacggctggggaggagcttatttttattctgccttttttttgtttatttattgttcgtgaggtggtcaggtgctgcacgcaacctcatgcgtttttcttttcctgtaatgctgtcctatttttgttacaaactgccttttatcttatgctcgtaagtcaccgcggttgagggttgctaaaccttttctccgcgtacgaaaaacaatgctactttattagcctataattattaaattaataattaactaaacaacttaaaaatattttgacgaggacatcaacactatcgatacatccacgtccccccaagtacagcatgatggtcctattacccgcgctcgtgtacgtcaactaaattatcaggtgagttctttcttgagttcatattcctcttctttataccccggagacgcgtgcactcgtgttttacttaggaacgatggagaggatccaaaggggagaggattcgcgcggggtggattcggactgtagggcagcgccaacttctgatggccgccacgacttcatgcgaactccgatttgggcgtgcaagtacttcatggaaagcttatcaagtctactttcaaatggatccagccacatgtccatatctattctggagcggccgcaattatcattttactcccgactgttttctgtccatggtgctgcgtcacttcttttggcccaatgggctgtgtatccaagttgggcccattaggagtgcgtcctagggttggagcacgaccctatggtcgttcttcccctcttcttatacctctagtcgccgccaagaacactgggggttttgatgatagagatagctacttgctaccagctcgcagcgcgcgtgttagctaaaccgcccgtctgcctgtaatcggaaccccaccatattgtgttttgatagtgaaactttcatctttatctagcaatttcagtgcttgttctacttgttcttgcttgttcttcgattgcttgcaggacgagtgccctcgtggccgggttgacgcgcaccacaagttcgcggcgaccattggagacggtgtatcggttgctaaggcgcagcgtctttggacggttgtagtcgggccgtgaacgtcgtcttcatccaatcaagttatcccttacctctcatcgaaagatcgggccacaaaccctagcgggttcgcatcaggtggtatcagagcgtggttcatcggtgagagaatttacccttcccttcgtcattaattttttttcctatagtccagaaaaggccaacaaaaaaaaatagtagattagttttcccgtgatcctatagaccattgtgcctttttactagtactgcttagttaaggcttgttgagttttcgattgcatcggttgtgttaatttgctagtcttagtgttaggcgattagagtttcgagttcttgccaccaccgcacatcgccaccttcatcaattttgccgtcatcaccaccgtcaccgccgtcgcagtcacccaccaaatcactttctatttgtgtttgatctgttgccgatagcttttgtgagctgccttgtatcctgccgccactagaaaggaaatag

SEQ ID NO: 35507 - DNA, 1902 bp, Oryza sativa
taattcctgcagcccttttagttgaaatcatttaatatttgaaaatgttgtttgaagttatcatattttcaaattcaaattcaaattgttcaaacaaagtcatatagaaaaatgatcaaaaataaaagttatagatcttgataagttatacaactttatttttgacaatttttccatttgaaatcatttactacccgaaatatttttttgaatttcttacattttagaattcaaattttatatagttcaatcaaactcggatgaagaaatgaccaaaataaaattggtagatctcactgagttctacaactttgcttttgacaactttttcatatgagttcatttagtgtcataaaattcaattcgaatttattttttccaagaagtctgatttgcctcctctttgggttgggccggcttatgggccttatgtgtaagtcggatatccgatggaaaataccggataatatccgattccgacggatatcacctatatcatattcgttttcacatccgaaaaaaaatatccgaattcgtttccgaattcgaaaatttccggatatatccgaccgaaactatccgaatccgaaaaaagatccggtcggacggaaattatccgaatcactttcaaccctactaataggagtttcagatgaatattcaaggcagaggaagaaaccccgttaacctaataaaaatcatcaaggttcaatccaattaattcattgctctgccggtggttcgccgcaccatcgtttccttgttgtttttggcttcgccctgtgttcacgggtcgagtcctgtcttattccaattccgtcgccgttttcctttcctttcctaaaatggcaccgcctccttgtcctctccctctaccgcctctcctccccctgccgccaccccagccgcgcgctgcgccccaccaaatcctaccaccaccctagctgcccctctccacctctcccatgccgtgccgccgtctccccgccaccggatcgctgcagccatcatcgtctcccgtgagccctctccttccccttatccctcgccgatatggttcaccgtcgagttacctcatctaatctaaaatatccatgtttccctagttgtcgtcatcgccgtccgtgtgttcccgccggatcgccgccatcgtcgctcctccaccggtcgccgttgtttccaggtgaggtatccttttgtttcacctctttgttttgtgtgtcgccgtcacggtaccgccattgccggcgcttgccgagccaccgcgccactgcggccgccttgctgcgccgctgccctagcgtcgcctccgccgccgctgccttgccgcgcctgccgtgtcgcgccgcctgaccgcgccgtgccaccactgccctagccgcagccggccgcagcccttgccgcctgccgcgtccgctgtcgctgccgaccatcttgccgtcgcgtgccggcccatatcggcgaggcggccttgcctcgccgtgccacgtcttgccgcatgccatgtagtgtattgctgtgtcatcccagttcggtcaagccgagtcggtaaaaccctagagtccttcggttggttccgtgacccacccaagccgccggttttgttcactggttcggtggatcgtttgtgtggtcctgtgccacggtaggtcgattcgttgagtcgttgctccgtggggctcatctaccggggttctattccgttaatcttgtctgcactcgggcattaatgtttaataatggaataaggttaccggttaatagtaattacacagtgcatattgtaaaattcatatctaaatcattcgtgctccgttttaatccattcaagtctcagtaaattcataaaaatgtctagaatccattaaaatggttccttttgttgtctcagttgatttatag

SEQ ID NO: 35508 - DNA, 1009 bp, Oryza sativa
tgcccgccttatataggatgggggacaggattacaagatagaaatcttaaccaatacggcatcgatttcctgaatctactttacaatattatcaaatcaggactttaggccgttctgtaatatataaggaaacgtaatacccaagtcatgatctgtacatattccatagatataagttatctcctataacttgtcggataaccataccgtgtgggtattgggtacccataatctccacagtagcccctgagaccttcacggtcgaaaacataatcttctctcgaatagattactccaaagctgagtgcttcaatcatcttcgccatggtctcccgagtacttttaccaaatctgaagactgtggagggctgaaaaataattaaatgtaaacttaggtgcatcgactaataggtgtaatccccgactatttggttagttgaacaaactaaacatatagtcaaggagtaaataatccaatcaaccgagtggttttcataattgtcgtcaaccaagtgacttaatattaatatgtagcatatgcggtgtgaatccccgaacaacatgatccgagtgatatacctaaagttgtctacatcatggaaaattcgcatagcaaaacaactataaagaagcttgtatgttgtgaataaagaaattttcaaagtattggacatataccatgtgcacactgctttaacaaatgtgcttgagtccctaaaagacacatgttttcaccgcacatggaaatatatggcatatgtggtgtaaaatctgagtaaataaactcataaaggatttaccaaccgcctggaaaatgaccacaatacataatcagcctaaaccataatattggtcaatacaaatgctcacttacgtggcaaaaagcaacgatattatatccaatcaattgctttataaaaccaaacaatgccttgactatataaaaaagtcagcggggcagctatataaagcttcactacgtggcaccttttaaaatgcattgtaccaa

SEQ ID NO: 35509 - DNA, 577 bp, Oryza sativa
catttctgttgctggagtttgctcgctggaatcgtaagcatccctacgccatcatcctctttaatcacttcagatcagcaagctagcacaggctatatttgccatcaacttcctctttcctttcggcaaattggtctgatttttttctcaaaaataggaccaccatttcagttcgtacatgtatgtatttcaatgtgtaagcatgctgcatatgcatacataattgtaattacattagttttccagtttggctatctcgcatttttttcaaccagttctacccatatcaattccttctttataccatgcatccccattcgttttcacacatgattttagatacttggttactgacttagttaattttcttttggttgtcccaaatcacagatcatttttcattactgcagttgaaggatgtaggaaacaatatcatctagaccagttggttgatttgtcacctacatattcagatctaatatgtatttcaattatgatctttacctggtgaagttatcttaattagtttatatacggtaatatgattccagaaactccatatcaagaatgagggcca

SEQ ID NO: 35510 - DNA, 743 bp, Oryza sativa
ccacgaaccaaactcatactagaagtcctaaacaccttatgaaaccttctagtacaacaaacaaactttacataaccaatcataccaaatttggactccttccaaattcgactccgcatcccatacgcacacaatacctccatcgtatgccatatagaatctccatcaaccacgtgcatcaactctagcctaagtatcccgcatgatctctgaccaccacggacgtcgtcttatccccaagccgactcccggtccatcaccgcaaatactctcccgaggcatcgagtcacctacacatgaaataaacaaagaaaccatattccgagaccaagctatctccaacttgactcattagtagcaagcaacagtattacatacgtatagtatccatctagaagccataatcatgaaataaacacggatatccaaacaaacaacccgaaaccgaaaccaacacagcgtcggccggtcagaccgcaggctagccagtctgaccgcgcacatatagccggtctgaccggcaaccactgcccggtctgaccggtcacataaaatcacagcacctgcaattcacctgtaaatccaatcatctccaaaaccacttcgtaaataaattccaaataacaaaaccaataatctccaatgccaattgttcatcacagaataataatcaaaaacacctttgatgattttacaagatggacatggggtaaggtgctatctttctacagtggtgaagccag

SEQ ID NO: 35511 - DNA, 1547 bp, Oryza sativa
aaaatatcccagtcgattttttataaaactggtagacccattacttatatcccattagacatctaacgactttctatcaacttagttatttttttctcagcgtgtatacaaaagctatttacccatacgttttgatattgatgcttttatcaataaatgatcattttaggagataaataaataatcttaagatgatcgtagcgtctaaattatatatatgatctatgaagtcatgtggccagttgaacaacatactgatcgtactaagcatgttggttgcaccaaggaatcttaagagtgaaacaacctgatgtcgcctcagcaatatataacccaattccatataggaatttaaagaccgtatccatttactttttggtaaaacttgctgcagtacatcgtgaatttgtgacatatagcatggaacaatctacaaacgtgtgattcttacctgacgctccagtttagcggtaatttgctaagaaaatactatggcctctatattaattttttttacataattggagcgagataatttagaattatggatgcctttacaccatgccaagttgtaggatcaacccacttatattgagatcaaagcatttcaaagatgcttcatatagtggatttgtccaaaaaaaatgaagataaaatgaaatgaaaattaaacaaaatttatctaattttaaaattctttttgttgggtttataacccattctagatagaaatattcaaacattttagtaggaccaaaaaatgaaaatatttaaaatttcaaataaaatctaacaaaagaattggacattcataggaaacacatcaattgtttcgttacaaaattttctcatgaattaaaaacaacacggtttgatgtaattttagttcacaatttatatgttgcaagtaaccaacgttcaaagcatgttaaataagttcaattttagtttatgataatgtaaaataatattttggatagaaaaccatctacacatggacattcgtaataaaattttacgcacatgcccgcgcatatgcgcgggctatcttcctagtttaaaaataataataaaaactgatagcaccattttcatccagctgccactgcatggcagcaccaaccttgcgctcttctctctcatcactctccagcttcccccagccaaagccaaagcaggggaacacgccgcgtctcccctctctctcctgctctctgctgctgctggtggcggtggaagagagagaaacgaagagcacgtgatgcaccacgcgcttctcacactccagaggtggaggggaagaagagcagagcatcgcgcttgctttcctcttcctccggttgcttccccgcgtcgccattgccgccacctccaccctcctcatctgtccttcccctttttcctaatgcgtgcaagccatcctcccccacatcctcaccttccctctttttcccacactactcccccactcattaccattctactataaaaactcaccatcctcccaaatctttcttccgtttcttgattttgtgtgctatcttggc

SEQ ID NO: 35512 - DNA, 2170 bp, Oryza sativa
atctgggagagcaggcagaccggtgtagccgggacatccgccgcgcgaggaccgtcgtgctgcaaaggatcatccaccatcctaactgacccttggggagcagagttcaagattgcgaggtattgctcattgttgtgatgcaattcatgttgttaaattgtgatagatgtacatatgaggtgcactttgctgaaattttggagcaagtgaaattgatattgactattactctattagtatttggttcgattttggtgctatggtgaaactcaatttgaatgaaattactacaaatatatcgaatcttttgagtgcctaggccatttcgggattcatggtaatcgaggtatgtagttagcagttatactagtgactgccgaaatttccgaagcattagtgcatttgaaccaatctaaaaggtatggtttgcttggataacaacaaaaaagaaggaaccatgatggttgttgtccatgataggttagtttcgatcttgctggaagtttggcagactggtacgtggtatcggtacaatatgctttcttccgtgcacactcatgcatagtgtctatgtttttgagaatatttgtgaaatcacatcaatttgcttttgccttttggcaagccttttttccgatcgctaacacagttgtggatatcatctaacatagtaataacatgaggatgtgccacattcttccagaatatgtctttttcataaatctagcaaatggcaatgggatgtctgagaggtattatcattacagttagggagaatcaagtgacttaagttgctgatagcagccacaaactgaatcctttgtcagatacagagattccatgcaacagattatgatgctttgtgagttgataacttgcagcatcttcttgcaagtgccaactgaataatgaaatttatgagttactttctttctttttttaaagtactgcattcaaataaaaggggcatacttgtcaattgcttttccttgtctgatatgtcatctgcagcttgtttgagatgatgaatgcatttcatgatatatgccgcaaggacattaagttcaagacatcccattattacttgaatgtatgttcaactaattattgaaatcatcatttgtttggtgatctgttactctggaacagggagattgtgggccttggttgcagcagtactttctttttttttcaactacatttttaatcagaatcaaaatacttggtagcaggattaaatactattaaaaagtcttcacatgattcaaacaagtttctttgattgaaagttgtattattggttaaagtcaggcaacgaaaatcgatatacaaaattctcagtttgtctgttgcatttctaaattcaatatatggtcatgtaaatgtttccttaaaagtaagatatgctgagctcttacaatgcattccatggtgtttgcagcagtagatttagattaaaagttggttcacatgacaaaagtaaaaggattcatagttcacatagtaaggaaattcagctatgtgtgtgacaaattttgaggccactaatcaggagtttagtttctgctatctactatttattaccttgacctaatatgtttactatatgaactatatgaagccttctactcaattatcagatgactaaatgcaagtgtcactgggagcacatagttcactttcttaaatgagaagcgaccagaattcacctgatatgatgaaaatacaacggcacaactgatggcatgattgatgtaacaattaagtttgaccccagcctcctaagtttaattttacctgattaaaagagcagtccatcatatactttcacagctccgactgtgctttgcagtttcttagctcaagttatcaggtttacatagctgttgcttgaccagatacactttctgatgcaaaggttggagtacgttttcatgtttctagtttatatccggctggtgcatcttatattcgaatgccacggatgcttctttgtaaatgttgtcaagagatcctgaaaatatgaaaacaggagggcacaggtagttcgattcatgtgggtcggctctgatcgtttaagctacggtatggttgataaaagccgtgaaaagataaacggggcaaataaaacttttatgtgtgttattaggagggaatctaatacttagaa

SEQ ID NO: 35513 - DNA, 2229 bp, Oryza sativa
ccagattcaccgtgattagtctcatcttaataaatggatgtgttgaactgatttagttcaggtggtttggttgggcctgtttcaacgtggttaaacgttgggctgtgatgttacattgattaagctatatctactttttactatgttcaactggtgattttaaaatgcttgcttttatgcaaatatcctatagcctttcctttgcttttaccttgcatcatgccttcctattggtatgacttattgagtacggtgggtggtactcagtcttgctttatttttcccccaaccctcagaagcagagaattattcagatcgagattattttgaggattaggcttattccggatattgaggatgcctgtggttatggaggatgctacgctatcaagaagatcttagtttagattattcgataatttatttccgctgtatatgtaagaatcatttattattttttgtaagacgtggatctgtgtatcaatttatcgtttgtgtactcaggctggtcttggacaaagaatttaacacacattctgcttgagattcgggttagcgaatttctaggcgtgatagggtttcagccaacgagttatctgaatgttacgtcggcttacaaggattatatacaagttggttttagccgattgcaataatggtttcactgattatctaatcatgtggatttaatgacatcggaacaccaaccaaccgatatatgcttaaccttcggatcaagcaattattctatcatatcattattgattgattggtttttattggattatattattattttataacattatcatcaaccaattgtctttttatcattatttacttaagtgttagaatctacattggatatatagctgattgctcaaaactctatcgacatcagctagcattgctatatcagcttattgcctgatcggctcttatttgtacatattgtcagttgcagaatcagattgacccgcacgtccacatctcatcaatattttggacctgcactggagtaagcagatcaaccaggccgttgtgttcgtcgacttagtccgtgccaacacaaatctggtaccatcggccgagcacggattttgcgtcaatagtttttgaagatttggggtacagcaataaagtgtgtgttctactaaattcaaccaagttgagttttccatttttagacctagtatcaatttcatcaacgatcaatgagcagtacggggcctaaactcgtcacaaatgtcaaggatacatcattgctatagatatttccagtgtaaaacgttatcggtcaaaaatgatagtggaagtcttgtacttcccgatttcgtacgaatttgaggcaaacatatgtgttgactaatataatggaatggacttccattgtcgaggaagttaccacgtaaatttgttcttgcttttctacacttttttttttgaacattcttttctacacttgaagtttcgactatttcatacctgtggacaatgacaatttcccacggtagacatatttgatgacataatccaaagtaactatataagctagtgatctgccaaagaaaatactcactccgtcctaaaatataagtattttttagacttcgagatgctactttgaccaataaagttaagatgttttaaataaaaagagttgcatattatgataatttgtttaataataaatctaataacaccaattttacttgattgatatttttcatttattttactattatagttaaaattagaatgtttgacttgacaatattataaaaatgcttatattttgggacatatggagtaataaatacgtttaaaaaaatccatcatgttcctccaattagtttaataaagcattgatattccttttttatctaatgcacaaattgtgtaagaggtttgatagcactgtttactttgtggattaccaggtgaaattggaaaaagttcatgcttttcaagtgaaccatcagattacatcgcgtcgcaaaatatcgtcagacagctgttggaaaaagtctacgtaaggaggcaactgtcggtataactaataaggtagtattacttattttgctgaaaattaaggtctgaaagtttgcatagtcaacctcttccatcttaattcaacaagatctccgtaactaagtccgtacacacaaactagcatgttcaacaggaatgcattgactattcgaccaagaatatggcaccatccaacaa

SEQ ID NO: 35514 - DNA, 788 bp, Oryza sativa
aaattctggccaaggtcgagttgaattttgatgaacatgtttagaggatcatataaaaaaatgtaaagaaaactacagatacctataaatattatacgagtatttttcaagtggtatcacatttgagggaagtgaaatcctcaacgaagataatttgatgaagcacaccgataattgtaagaaaagaattaaatggaaggaaaacatttagcatctctttctttatcaccgttaatgtgtgcctacaactaatgataaactaggctgagttacttttctcttttctcattttttatggacacgcttcgtaaactattaaagtatgttttataaaaaaaaactttatataaagatgtttgtaaaaagtaaaataaatttatttttaagtaaatgatagttaagatttaactaatcactcgctaatgactttactcactttttgcatagcctcttgctgtcaaaatctctactgaattacacgagtttgttagctgcattttgctcttttggttttctactcatattttagttgtgttcgaaacaaaaaattctcccatttttaccatgatggctgccaatgctgtaaaatggtaaaaatgggatggaaattttctgaccgttcaagtacaatttcctcaaaaatgatataataataatatgtttattggctgttgctattttaaaagtatagtttttaactcctatgagtgtcacattgaaattaacactaaattagttaaattcatgaattttctaaccgtttgcatagaatctatctattatatact

SEQ ID NO: 35515 - DNA, 615 bp, Oryza sativa
  unsure (1)..(615): unsure at all n locations
ttctttttactcctacttcttttagcatgtattttttattgaattaaatcaaattcgacgtcattgcggttgcttgttagtgaggttgactagttctatttgttttttgtattatttcctgcatgctttgttggctttcagtttcgtaggttgtgcagagacgttgtagaaagtgataggagacaagagatcctgatgtcttattttctgtttggacccccaaaccgcaaaatatgggtctgtgtcatgttttttgctcgtatcccagtgtaacctgngccctcattttcttcgatacactcaaaactgaagtcaaatgtacatgaataggatcttgagcatttgcttcaatatagtattaaactgatcaattcgatcaaaccgtcatattatttggttacggcgatttaacattatgaaccattttaagtttttaaccaagacaatgttttgctcttgaaatgcagggatttgtcacacaataatctcacagggtcaatccctagcaccgtaggcaatctgaccagtcttgaggtggttgatctatcaaagaacaagctgaatgggaccctaccagtggagctatctaatctgccagcttgcgcatttttgatg

SEQ ID NO: 35516 - DNA, 600 bp, Oryza sativa
ccttcctgtagaaaacttttgaaaagaacgtatcgtttagtagtttgaaaagcgtgcatatgaaaaaaagaggaaaatgagttgaaaaaaaaagggaataagtggacttattcctgtgtacgccttaaatcgccatgtgcatgtgtatagcagggttgtatggcgtccaaaaaaacacgcacacggatagttttgttcggtttggcataacaatttatagcatgttgactgttgacctcatcctgtcagtcgctcggttcatcatttcaactgcttgtgcatcacccaaataattcgactggctaaggtttatcagaaaatgtgtgttcgtctattttttctggtagaagatttacttcggaaatagttgtggtccaaatactgtccaaactcttttccaaacgagtgagaagagaaatggtggccaaatggaagatgatcacgtacaccaaaaaatagtaatcttatagatatatcatcaactagtagtgcacaagctcccacgttaattaaaaattttgatcaatttattgtctacatgcccaattaattaatgtttgaattctaatacatgcatggaagataaaattagaaccagat

SEQ ID NO: 35517 - DNA, 615 bp, Oryza sativa
ttgccctttcagcaagcaaatatgagatctttgcagctataattaatcaagaactgttctctgtaaaaataaataggagtccacttttggaccagtcactgcattagaatgtaaacaattctttcgctttcacaagtttacataaggttcggcatgagtaagatcacatttttctcgagacataagaagtggtaggagtccatctttcaaaaagaattggtgatccgttatcatctattcttttcgatttggacctatcctctcctccctgccaaactctgaactgaccaaaaaggtttggatctttttgcattggtttgaggcaagaagaagaagaggttggagtgcgaattccaccattaacgcaatagtgatgatctaggggaggcttccctggtctgcattacattctgaaagcaaaagctcattgagtcggcacttcctgtgctgtgatgcgagaatgtgagttcacatgcttttgtccttggacccacatggcctgccttggctgttccattcggtcatatgcccaaaaagctctcgttaaatcccctacctgctgcactttgccatccatcgatttgattttatatgatgcaacttggtgttatccca

SEQ ID NO: 35518 - DNA, 820 bp, Oryza sativa
ctaaaggagcccaaacgaacggatggctgctgaagcctggagaaagaacaacgttaggtaggggataatgttcccttttgcaagtggcgcctagtacttcctcagtccaagaaaaaaaggtaaatcctagattttcgtgtccaacttcaactgtccgtcttatataaaatttttttataatttgtatttttattgttgttagataataaaacataattaatattttatgcatgacttgtctttttaattttttttcataaattttttaaataagacggacggtcaaacgttagacacgaaaaccacggtttgtctttttttttttttatagatggagggagtagacagtagcctctgaacggtgttccgatgacgcgttcgaggtacgcacgacacgatgatagcgagaaccgccacaaaagcgcagtgccagcctctctctctgcccatccgcgacgggttcgcaccagcagcaacttgtatagctgactctgttttttttttaacgccacttgcatagctgactctggcttccaacaattttcagcgaaccaattggcatcgttccatgagaagctgtgtaaactaagaactggtcgactgttttatcgggcaatcgatcgagggaggaaaagtcgaacggcagctctcgtccacaagagaggcaagattttcgtccatcctgtgtcatctgacgccgacgagtcgacgaacttcagtatcttgtattcttgtccgctcatcatagcagggaattttttgcctcttattttccagcccagacatcaccaaatcgtgcttacataccacctccatgacg

SEQ ID NO: 35519 - DNA, 549 bp, Oryza sativa
tccttggaggaaaataaaaaataggcttgtagtgatattagtttttcttctcaggtgtgcgggtgtctaggctagttatgatctaaatgaaaagaagcgcatagcagtaaaagttttatttgatctgtgatatttgtattactgcttgaataaagggcaaagtattgtagttgaagttgatagcaacatctgttattataaaattaagcttgctcgtatattctataccagggctccccggaatcttgcatgttggtgagaaaaatttaagtatgttatatcttctcttcatttgtttgtgattttcttcatacatcacttctcaccggccccatatgatttggttgttttgttgatcttttcttatgagcagaggattcctgctcctaacctaaccccacaacaataatttgagaagtctctccgctgaaccacaatgcatggctaactgttaaagcatgatgaacacaacttgccaatgctttgtcctcgagcacctcggacagcaaatgaatgctcactgtggagattacgatgctgctctcattt

SEQ ID NO: 35520 - DNA, 613 bp, Oryza sativa
aatatacatccgaggaacgtacatttcactgtcagtaaccaccggtgttccctgcgaacctgtaattactgttaacctcttcttttaggcagttgcaattactgttaaatttaccaggcaactgaagtcagactatctgtcagcaacagaagggtcgatggcacatcacaccggaacgatgagccgtggtccatggaaacactgaagcttggctggccttccaatggaatgcctccagagatgcagaaaccatacaggtttgtactggagcgaactcctacgttgcattcggggggctgcgggggttttttcttcccgaaactgccttgcgtcggtgcgtcccccgccgtctgattcctcgcaataattgtacggttatgttgctgtcaggaaacggacgagagagagagagaccttagtcggcggacagatgcaaacattgatgaggacgctggatggagtgagtctgcccaagagcagagcagtttgagttctctcgtgcaagcggacaacaaattgcttcgatcagtttgagctagaaaattctttgaaacaaatttgagcaagaaaattttggcatatggtttagcatgcggcacgtcgaacacgagtt

SEQ ID NO: 35521 - DNA, 942 bp, Oryza sativa
agttcacgtgcaatccaatgcgtctgaaggtgaatcacgttgtttgcgtggatggaaaaaatatgttgctccgccttatcgtagacggacgtgctgtctgtccaggttcaatacacttgcctataaagtataaactccattctctcatgtgcaattcgaaataaactagtgatagtagtactgaataaacaagtcgtcgacactgcagcattatagtactgtactacatttctgaaccggaaacggctggtatactcgattgtaggaaccaaatcgaccaatacattccatgctctcaaatgggatggatatatcaaccttcgtctttctgctcgagcagttgaaccgaacgcgagccaccaccggttcttgagaaatatcaggcctgaacatcgacccaagtccccgacatgaatacatgattgatgattgagtatgggtcactttactgaagatacgcaatgcggtggctgtttacagttcagctccggccagcttatcaatgatggcagagcaaatttctattactttctccgttttatattataagattttctagtattacccacattaatatatatgttaataaatctagatatatatattaacatttatataaatagataatactaaatagtcttataatctgaaacggaataggtacattacatatatgccgtttcaagaagtatatgaaagcaaagcccgtaccatgccatattgccatacacctagacgaacagtccatcaccatggttaatcaaggagcacgcatcagcgaaaagcagcacacgtatgatatgggtggtgcgcattagcgtcaagtatgatgagaatggagcatcaatgaaagcatcggcatgatgtaacgccacgaaaacatatgcgacgtggacgtgtcgagagtagcacgaacgcagacgctgttcctgattggatatt

SEQ ID NO: 35522 - DNA, 616 bp, Oryza sativa
catgcacaggcataagttgagttgtagagagaactccataatcgcacattgggaatgttgttattgacctaatatcaaaatagcaatttgtataaaaaaaacttattttctattcaaaacttcattcagtggccattatttaaaaatgtttttctttttaggatagattacataaaaatcgataaattcatagtttgcaaggaattacctaggcgacgactagtacataatcccgtgggcgcatttcttttttagatagattacataaaaatcgataaattgatagtttgtaaggaatcgcctaggcgacgactagtacataatcccatagacgcatttcacgactaaagtattctgtgggccatatacggcccaattatgaggaagttaggccttacggttttataaatcgacgcgtgcatgatgaactttcatgaaaacgcttcgtgtaagacattcgaccgtgttcggccccaccatcatttacccatctcttatgggatcatctgtacatttgtcgacaaattttctcctaaaaatttcgcatccaattatagtacaatcgtgatgtgattatattgtaacttgtatataactcttaacaatctcttcgtaa

SEQ ID NO: 35523 - DNA, 667 bp, Oryza sativa
atgaatggatgtcagttcacgattgtactatcaattgaaatccgacgtctcactaatcctgaaatgtaacaaccaataatgttagtaaggaggatcacggtgataaaagaagtgctccaaatcattctcacatcaaaatggtacaaagcgatcaactggaatcgtcaaaacttgtggatgtcacaaaactactgatcaacgaaatggcacacttagctactgatgaatagtgagcgaatacaacgctagagtagatgccacgaattttcacaggctccttgtttcaagccaatactcctatagtctgtcatcaacacatcttcacgttgttacctgggttgatgccgtcagaaggagcttcatgatggtacagagttggagctcggctgcttgggactgtagtaccacagagggccggaggtggagggacaagtcgaacggacgaagcggcgtccccgacccttcatttcatgttatataatgtctgtagcaacaaatatattatcacatgagaaaaatctgatatggcaagagagttaacgagggcagaggtaaaaagatgaagaaaaaatttcttatgcaagaaaccatttctacccaaggattaagaatgaaaacaagaggataggtagataaaaaaaaaagataaaggagatgattagatgat

SEQ ID NO: 35524 - DNA, 528 bp, Oryza sativa
tcactccaagaagggaataaatgacaggaaaaaaaaactcagtaagatctaatttgcatgcctttttacagcctggcaaacttctagtcctgtgttgaagcctatgttagataataagttggcataaaccgaattttcatcatggcacctagttctgcacggaaggaaaaaaaaagctcatccaactgtagctcaacagcaaaacaaacctttccagactcatgaaaccaattcgttaccagcataaatccagattatcagtcaatatatttgtcgctccctataaaatataaacctctggaccactgttcttttcaatacatagtgtggccagctcagtatatatgaaagaaaaaaaaatcaggcgtgtgataaatgtatagcaaaaacaaattaaaaaccggggcaattttggtaacagagtcagataactgatactatgactgcatcacaatccttaacaaattcgactcaaaactaagcaattgcatagacaattaggattttccgaacaattaccgtcgttct

SEQ ID NO: 35525 - DNA, 696 bp, Oryza sativa
ttcctgcagccccttcaagttcaatatggaatggccagccagccgttagtggaagatatggcagttgttcctcatattgtgagtgtgtcccatacttcaagcacaagtgcacaagttatgtgaagaaaagcttagtcagtcagtttgcattttacagtgacagagagggcctgaattggagagtttctcaaagcctcatacgtagtgtaaatcgagtaaaggctaaacagtttggcattggcagtatcaggaaacgttaccgagagagaacacacggaggtgcagtagtttaacacaagacatggacaccagctatcacaagaggcgagacgattccggcagaaatgtccagaatccctcgtattctgcttggtgaaataaacaaagcatatatttttgctttttccttgtgatagatcgaggatgcagaccgcagatgcacccgttcgagacactacaaaacaacacgtccaatgcactagagtgtagagggtccagagaaggtcttatatagcattaatctacactgtcaagttgcttccatggtaaataacatactaatagtaaggtttgcttctccattctccaatgtttgagtacatccactgatccacccatttcccccaagaaaacaactcccctgcactgcaccactcgcattgcatgttggtcttctgaaacactcagatgtgggat

SEQ ID NO: 35526 - DNA, 511 bp, Oryza sativa
atccacgtagtactccgcctcagctgatactccgtttctttcgcccgtttttccacgtaccactcgcacgcaccaacatcatggctctgttgaagagagtatccacgatatatggaagagcgggtgctctgaagtcggaaagctacgcggaatggcagatggtcagatacagataggcattgatcgcaatggccaggaagcaaacgacgacgcaaatcatgcagcgcgtcaagtgaagatccaatcgcccttggctgtttctgcccccgcatgcagcgatgcaaacggagtgtgccatgctgcagtacacgggattacaggaaacattttttttgctcctttggttcagaaaaaaagggaagaataagaacatttaccccaactgtccagtggtgcccacgggtggctggtagcgatgggtcgcagcccggccggccttaccgaaaaggagaaaagaccgtacgacaatgggctttgtggtccagctcgttgggctcggcacggatggccc

SEQ ID NO: 35527 - DNA, 591 bp, Oryza sativa
aaaaaaaaaagaaggaacaggtgagttctagagtcctagcctggtctttcgaccattccacttatcagagaggcaacgtgcatgcttaccaggactccgctcgccgcagttaattagctagcttcgttttggccttttgggaagtaacaatcaatcgctgggttcgttttgtcgaaggttagatgctagctaggtttagatagtagtgcgcatgcatcagtgtatcggatcatgacactaatgagatccgcagccaaattaattcgtctaatctaatatgtttggcccccataaagatccactaataagaaaagttccccctttaaccataaaatcagtatgccggtgacagatcgtgtgtataggctgggcacttttctgcaggcagagatcggacaaggccagctcaaaaccttatctcctaattaaatccgactgtcacagtcccgaattaaagcactaatacagaatgagatgttaactaaggcgttaagcatgcagcttgttgtagacttgtagtgctcatctaatccctggataaacaacacaaaagcacccgtgcaaaaaaacggcagttcttacagcttgatt

SEQ ID NO: 35528 - DNA, 604 bp, Oryza sativa
cctcatgagatcaagatagcctaaaaaagggaggaagttcacagggcttgagggcaagttttatagtggaggtggatgtcacatctaatttagatcatgtcatcttctcattacttaagaggcaacacataaaacatatcacatctaatacacaaaccccaatattaatctactctcacatcatcttgtacttttcttggatattgtgtagaggttgccccttgcatgaggagtggctcattctctctctcctaactcctctcctccacctcatcatctaatcttatatggtaaatttagaagcaatgtgtagagactcgtagtacttgccctcaggggttgccttctagacctttttaccttgtctgaaaaaagggcctctagggagtcagctatgaaggaaagcatgcgatgttcatagccaaattaatgctaggatgttgattttcatatgctttctccgaaaaagaaaaaaagggacagcaataggtggtactaaagttgttttcaccttggaatgaatggacatggtgatgaccagattcgattctctttttcggagatacacatacaccactagtagaagagactgtcatagcacctt

SEQ ID NO: 35529 - DNA, 1224 bp, Oryza sativa
ttgaactaatctagattctgaacggtgaagttttacctgtatattgaaaattctccaaaaaaaattgacaacattcacaacatatatatgaactactctaaaaaaaatcaagtaaagactcaactcacacattgagaaatgaaattaaaaaacaaatccagcattaattggtactattcacatatgaatttgtctttttatttctcaatgcgcggatcaaatttgaatataatttttggtagaatggtatatgctgtttatactctacattagtaattttttaaataattttacaactatttatattaaatataaaagaaaaggttatacgcgttgatattctctcgggggattagaatccctcttccgtgaaagtaacttacaacttcagattcttctgaatctttgctgatcaactagtataatgtacgggtgtacagattctgattaatcacaaacagatactgagagcagaagaaatatcaatatattgtcattacaacttaattcagtactggccttgattggctgcgattgctgctacagacgctgtggctgaggtagttgaaccgttgcaagctacagccattttgaactgccgcaataacggctgttatggtagcaatcacatccgaacatgcccacgtatgtgatagatcgaaatggcaatggagttcggccccagcttaactgaaatgaactctgcttgattgcatggcagacaaactcattatcatggatgcgagagctgaacattcaactgttacatggtttaaggcgaggcgtggtgtcctaactgttaggacattctcttggatcagtgtcacaacagttactgttctggtgctacctacagtagtagtgcactgtactgttatttgtttcctacgagtatatactggtagcccaaagactgtttagtgaaatggatgaccagggatggtggctgttctgttctcctcactccgttttttaatagatgacaccgttgactttttatcacacgtttaatcattcgtcttattcaaaaattttatacaaatgtataagatataaatcacacttaaaatactatgagtgataaaacaactcataacaaaataaattataattacgtaaattttttgaataagacaaatggtcaaacatgtaagaaaagaaagtcaacggcgtcatctatttaaaaaacggatgtagtattccacacttttccactcacttgct

SEQ ID NO: 35530 - DNA, 615 bp, Oryza sativa
tcctctatctgctaatcttggctctcgcaaaactatcatctcttcaggcttcagcaaaagaatttagaagacacatgtatacagattatatattcgagaatcgtgaattttatagtacgtgaactgttcgctgcataggagctcctatagtactgtagctgttttactgatccattgcagacaagcgtgggtgagcagtagttctagttcgtcactggagctagctagctgctagtctgcagtaaaaaaaatgtctaccggttgctgtgcgtgcacacatgtctgaacatctgatgagcagttcaatactggtgcattgtagacatcgagaacaacagcctctgtaggttttgtgtaaaaaaaatgcaggttcgaaataatctgttactgttgcagtacatgttctggaatcactacagtgatgaaaaaaaagatgcatttgtctcttccaccgcatgatcaacctcagtatagctgattgtttatgtggatttttcggggatcaccccgtgccaaggtataaaaaacagacggaaatcactcggttttcgtatagaaattgaggtttcgggccagctcaagatcacaaactgttcagtaaaccgatcaagttcc

SEQ ID NO: 35531 - DNA, 779 bp, Oryza sativa
tgtcgccagaattattaatgagtataaagtacgtgtcgagcaattaggtcgcacttaactacacgctttaattaattatttgcactgttttatagacttcgacaagacagagaaaacagggtcctaaaatctttaccctacatgttgcaggctcgacaaatactgattcgtacctttcaaagcttctgaaactgatacgccatatgcccatatatattcctggtctggccccacataccatgctgtgcaagtgcacgtctacgagccacatgcacccacgtggcaaggttgggcccacctctcagtccttggttgagctgattctgataccgtgggcccttttcctactgcagctcgacacctgtacccttcttgagtggcaagttgagactgaccctgagcagttcaccatcacacctcatgtcatcaggcagaaaacaaatagttaggcgagctaagcatctcaacaagttagcttaagcagttttgacaaaatcagagggaaattcggattgataacatgatcagagtcactgatgttgtagtatctcttgatctgcaactcatttatttccccagatagtgtgtgttctccatttgttcagacaaaacaatggacagaaaaccagcacaacctggacaggtgacctctagtgcctggatccagtgttcctgagctaaggtccagtttttcagtttttctcagaaacttctgcatattggtgatgcttgggcaaacttattccctgccataggattatgaaattgacaaattgtag

SEQ ID NO: 35532 - DNA, 1141 bp, Oryza sativa
ccttcgtggtgctttcacctgaagcaagcaactaggcctagaataaacaaacataaaggatccataaatatatctgaagttatgagaagctcgggaattgataccatcatgattgatcaaaaaacaagagggaaaataaattagtcttgtaccaaaacaaccattttatactcgctcgttagatagagaatatgatggagcattacacaactctccatattgcgctactaactccataattgttgtttttcaatgctccctttgtcgcaagagctcttgtgctctcaagcagctagtaactggagcaggcttctactagtctattcggctattccatcaccgcatgttcagttcagctgcataatgcaatgcaaagacaacgagaagttgtcttgtacttcgactcagcaccaatctgccatttgatgggaaattctttcatcctaacaacttctaatcatgcactgttcaagggtgcctaacttaattgtcatagttgtattaaagtacatacaggattcttcagaacatcgagcacttggaaagccctgggactcttcttttaaacaatgtaagagtaaaaacaagtcagaaagaagtaaaacatatgttgtggacaaaattcttaaggttccatgtttcgcaatttgttgcatctgtaaccctttgtttggagtgaactacaaaataaatgatacatatactaaagttagagaggtgtgcacttgtacaatcaaaatactcacctcctatcgtgccaaaatttctaatctcaatgcaatcaaacaagcagctgtactgctattcttgttctgaacaaaagttgttctcactcaaaaattactgtcaggttaactccagcaagggattcaatcagaatatcgctgatcttaaaattagaacataatgctacggcacatgagcagttacggaaacaaggaacgattctcatcgaaggaccaaggggatagagattagtaaccttatcgaggcggaattcaaagcagaacgaaccccggaagcctcgcctgcatcgtttctactagggcatatatgctctggcgctcatagaacacagaattcagatccagatggagaggacggctcgattagatgaaaatcgcaacgtatttttttctca

SEQ ID NO: 35533 - DNA, 610 bp, Oryza sativa
atatctgggtggtttcacgtggcatcctagtcagaaaaaaagaattaaaaaagtatatggggtccacatgtcagctgcacatatctctctcttctcttttcttctccctcccttctcttttctctcttctctcttctcttctttggccagggaggccgggggccggcgagcggagcgacgatgggcgggcagcgggcggagcggcgctgggccacgggcgggcggtgggctctgcggccacgaccacggcagttcctacagcggcggcaaccatggcctcgacgggaggagagaaatgtgagaggggaggcggccggcggaagatggggaggggagaggcgtcgccttcctccagacgggccgacgctgtccgtcgtcgtgcacgacgccgcagccgcgtcgaaactccacctccacaattttactcggataccatgataagagcagaagtaaatttcacatggacattcggcacagctctggatacagacacctcaattaacaaaccaaaatgtacacatttagattccgataccaattaaccgatcaaagagcaaacatatgaactaaaaaacatcgattaaccaatcaaagactgaaaattcagatt

SEQ ID NO: 35534 - DNA, 1039 bp, Oryza sativa
atgatcgatcaataattgatcaacttacatatctatgttagctagcaagctgaacggattgaacggattgtaagaggcttccatgtagcgtgaaagctgtctcgtttatatttgcctattttttttctctagctagctaactacagcttaagaatttgtatatctgtactttgttcgaagcatcatagtttttgcagactatttaaaaaactattagctcgttattaccatcctaaacgtcctctcttctgtgtactctaaaagttaaaaaaaatgccaaagtgaaccccacatttaaatgtgtggcagacagttttcggcatttgaaatgttccgtcataggaaatgttcaccgtaggcccaatggcccataagtgcggctcgtcattcggaactgatgaattggactggtctgaataaagcagacctggtccagggctaagtaggccttggagatgtcttatgcaggaaaaagtctactgtggctccctcaaattaggtaggatttgactggtatacctccataaaaaaaaaccgagtgtatcgctcatctcaactattaaaatcaatataaaataattggggcctagctatccatcgcgccacagatttttgggtccaaatcacacagattttagatagttggattaggctcatttgatcacttgattagaagagtttatatatgtatcaacatatattaattatatatattgcatatattttatttattagatctttacttcgcaaaaaaaatatcaccaactcatctactaaaagttactgtgtaattacactatagttacagtgtaactacactatagttacactgtaactatagtatacttacagtgtaactatactgtaactatagtgtagttacagtgtaaatatagtgtaattacagtgcacttacatatcatatcaactgaacttacaaatgtaattttagttatataggactgtaattttatattttagtttcaaatgtgaatacagtatgattatatgtaattacattgtcatttgcacgtaactg

SEQ ID NO: 35535 - DNA, 747 bp, Oryza sativa
aagacggaaaggatgctctggatgaactcaagattaaggcattgatgcggtacaagattaacatgtacttagtagtgatagactgatgagtaggtacttttttttaatgtaaatttaataactcttagtatctagatactatgagatactaaatttaatactaaattttggttcctcataatatcttcccaagaattgtaaaattactctagactgctagcctcacatagtagcaggctgcaagaaataggccacaccgaacgggacttcacggttgtactgcatctgtgactgtgacgatggcgaggcttaatttcgtggatctcgaaccttcttaatcttgttttctcgcatgacaaacaaacgaaaacaggtggagctactgaatcattagccttttgttaccaaaacagaaaaaaaaaactgaatcattagcctttttctatggtggcgagacacgtacggccggcccgtgcgacgtgccaagggctaaactgtggccgtgacgcggtgcacggtagaaaaaaaaattgcaccgtagtaggagtaacaattatcaccaaacaatattagcaagtacgctttgcgaatgcctttgttggtatgatcacgacgtcgcgacgttgataacatagagtaaggggccatgacgtatttcgatttgacataaacgacaatacaaaattgttttcaacttttttagtgaaacagacagctgattccaccctttaattgggtgtcattttc

SEQ ID NO: 35536 - DNA, 526 bp, Oryza sativa
attagcctgatttgcaataatccctagaaatcgtacggggatcgatcacaaattttgaacgacttagtgggatagagggaaccggaatattactgtcagcttgacactaatattttcctattccattatctaacaaaattagtgtcagtctgacttagctcaatgattttaacacgcgctttggccagtaaaaccatgaagcccttggtaattaccagccaagaaagtgacgctactcaaaagtaagactggtgttgtttcagctgtctgcttgtgccatatgtaccatgtcaaatgtagcgtctttgaattcgtccaattgtccagctgatgccgacttaacgatcgagccacggccatgcatgtacggaagaaacggcgagatgatggtcggcaggtcattgatttggcaattatcgtgtttcttaaaccaacttggtgaggttcttctgtgaccagccagacgcccaaagtccccagaccaacgttgccagcgttcagtttctgtgatacgacatgccatgca

SEQ ID NO: 35537 - DNA, 754 bp, Oryza sativa
atccttcatcgtgctactaaaagcacacttatgtgtacgaaattgtgaccaccagattttaaaatccttgtagtcaagtggatcgagtcatcgtctatccatgattaagaacactccccaccattgtacctctagtgatttcaagtagataattccactccgcccgggtagaataagcagggcatgaaatatgtacgtagtacgattgagcaagaacatcaaaagcgtcaaattcactaagacggaaataccaaggtccacagggaatttggactagcagatggtggcaccatttgaagacatttgtggagtagtcaagcactgccggactaaactatgtgctagtgttctccatcatattttgaaaagaagagcaaattaaagaacaagagaaagtacatactctaggcaatgcagaaagtcttggaaagcccctcaaaaaaaaaagaaaaaagaagaagaaagtcttggaaagagactagctagctatagacagctaagttaaggggtctgatcgggaccattggtaatatccttttttctgtacccatgccccgttggttttgaccaagtctaccacgcaaattgctacatgttgaggtagtcaattggtccgtcatgtgtgccaaatactctctagatgaattgttacagtgcggcacaatgctcaataatgtaggaaacggatattgtggctggatgaggggatcttacactctgatgatcactgatatcactcatagggctgcaggaa

SEQ ID NO: 35538 - DNA, 640 bp, Oryza sativa
ctagtactattctaataagatgaaataggtgcaatgcatcaggagttttcagatgtccagaactgctaccaccaaaaaagaagaagaaaatttctgggtgcagaacgaaaagtcgagcaaacaacagtgagaaattacgaaatcagtgaatctgtgctttccttgtttaatctcagtcatacaaactgaattctgaaccctgaactctgaagagatgcattcaagtacagcacagcagacatgcaagtacagtacatcaccagaatcaaacctgcatatctaaatctaaatctaaatgccaacaaaaataaaagagagagagaaaataataatcaaccaacgcagagaaacaaagagcagaagatgctttactcatcgacagccgacttgacctcatccttggtgatcttccccccgagtccagatgcaagatccatggccccagacctcgacatcgcggcgtcgatcaccggagctccacctgcaaccaacagcagcaaagttcctcacggaaatcaggagcatccacctcctcactttcctcccaaatccgaacaaaccacacacatatatattccaaaaaaaattcaaacggtagtgcgaaagggatggatatgatttattttcttcaccctttttt

SEQ ID NO: 35539 - DNA, 531 bp, Oryza sativa
tcatatatattagataatattgttataatatatggctaattaagaatggtactattattgatactaaaataaagtgtattattattgtgggtgaggatactataaaagttgccatacaaaatgttgtatgcacgtgctatatatgtatacgttttatagcattgtcactgtgcagttttgtcaaaaattgccagtattagttactagtttctcagctgacaaagagatggacaaactgatcaactagctagtagtagcagattttactttctggactcgtatatactccctccattttaaaatgtttgacaccgttaactttttaacacatgtttaaccgttcgttttattaaaaagtttgtgaaatatgtaaaactatatgtgtacattaaaatatatttaacaataaatcaaatatataaaaataataaataattacttaaattttttgaataagacgaatggtcaaatacatacttaaaaagtcaacggtgtcaaatattttaaaacggagggagtagaagaaaacaa

SEQ ID NO: 35540 - DNA, 604 bp, Oryza sativa
gcatttctagtacaatcacgttaatggatcgtactagagacgtagaaactagtgtcatatatggaggctgcctaatgattgagtgaacataatcatgcgtgatgagtgtgtgagtgacaagttggaaattaaaggatccatcaaatgtcttgaacgagattacatcttcgttaagtgcagtagacgacccaacggtagctgaacatggaggtggtaacacgaacaaacgctaccaatttcacccgtgcagaaacacagcaaagtatagccaagctggtgaacggatttgacccctaatctggtcgattcccaactgtacactgtacagaagaaacacaaaaatgatattccactagtacgcaggttagcaacgacacgtgagcatcacttgtcctctaggatcagggcaagtttccaaagcttcacatgcacatggatggacacacacgacacataggggtggacagaaaaagaccgaaccgaaaagatcgagaccgagaaattcggtcatcaattcgatcttaggcagtgaaataccgaattttgttcagtcaattcggttagtcttcttggttaatcgaatagaccgaataatgaaaaaagg

SEQ ID NO: 35541 - DNA, 619 bp, Oryza sativa
tttctagatctgtatttgttctgcaacgcgaggtgttgtggttgatgcgattcatgcgaaaacttaatctgtcatacatacttggaagggtaaaaaaagaaaaaaataatctcctttctactggagatgcatagcgtgggaattataattagcctcttgttatctgctagcctggttgttgagcgaagctttcggatccaaccttttaattcagggtagctttatgtagtacagaaaactgtgtaactgtattgtgtttcctgttactttcttttaaaacaagttctggttgaaaagcgtagaaacagtcttaactggcatgtcttgttttcatgcatatgtgctgtgcagtagattaatccttttacctagaacttctcaattgagttttatgttagttgattccaactagtagttgtccatgactgaccttattgcatcttcttcttttggcagaattactagacttccaataagaaggaaacaccttagggaatgcagaaagatgtgcttgcatgctagagagctaccttgtgagggaattggcagggtagcaagccatatttctccttccacaactcttcatgacattggaacacaagagtatatacagcgcttg

SEQ ID NO: 35542 - DNA, 664 bp, Oryza sativa
aatacgtactgttacctatctcttattttgaaaatatgcagcattacctatcttgcttctgggtacaaagatggggactcacgaaccaccatacgactttgagacctgacagcctgcataccgcattgtcggaacacaaaagcgtttaaaggttaggctaattggctgttgtcacgtcgtacccggtcagaatagtatgtgccaccatttactagccaaaaaaccaaaagaattagagcttgaattccacaagcaaaatgggttaatttatggactaaaaggccttgtctacatattgccaatagcgacgtcaacagtctagcatttctttcgctatgattatgccggcttagcgcattttcaggcagtcgacggttcacacccaaatgtccatcaccatcgttgtgcctaatcaaccctaatcaaatacatcaagtcatgtacagacaacccacaagtttggttaatactcctacccctacaccagcaaagctagtgaggaaaaaacaaggaacttcaatttattctctctttggataaaaatattggccactcattaaccatggtagctgacgaggtacatctccccgtgtcacacactttgtcacatggccacaagttcttcaaaccctcaaaatatgtagagtttataactgaataatgc

SEQ ID NO: 35543 - DNA, 611 bp, Oryza sativa
ctcattcagagagaaattcatggatgtatgagtactgcgtatgcgtggtttgttaaccgttctcgcaaagatcgtttatgaacgactgccaaaaagcagaagaaccagtttcactgcatccagtgtcaaatactggagtacacggagtattactcgtactgcaccccacaagctgcagatcagaacctccttcctctactacagtaggagtatgctgtacacaattactcctactctacacacacatcatatactactgtacatgtaagcctgacaaaaggcgctgcagctgcaagccgcagccacacacatcgggcattcactacgttctctctcggaggcctcagtgattagtcagtgaagggctttaacattgagacatcacatccgactatcgagagcagggagaatgcagtagtaacaatggaaatggggagcttaattaactccagcaaacaagtgactgtgacacccctgcagcagagaaagagactgaagaagagacggctgatggccagtgctcgtccagtgcagagtgaatggttcatgtctctcaacctccagtgcagtgtaactacggccctaagcagatccaattcaatggtgtaact

SEQ ID NO: 35544 - DNA, 569 bp, Oryza sativa
agagtgagacttgagagatagctcgaggagttggagtacgcccaatgagccatgcacacaacgggccagggatacgtacttgctgccaggcctcctagtgttaccgtgtcagcaccggatattttcactttacccttcggtggaggtaaacagccaagatggccccggtccaccgcaaatatctttcacaccgtccgtcactctagccagccagcgagcatcagtttggcagaaatcactgatcaggtgtctagctgtcgcgctgaccaaaagaaaatgcaaagtttacagaagaagtccacggtaagtgttgtggtcatggcaaatgttcagcggaaaaactgccacgctggcatcgttagttgtcagttgtcacagccaaatggtcatatgttcctggcgttaatttatccttacgattttgttcaattaatcccatctaatatttttttcatgggaaatggccaaacaaggcctaagtaaattttgaaaaactatggttgtttagttcaaactatcactaatcactttgctacaattttaattgggtatttcacaaaattataaca

SEQ ID NO: 35545 - DNA, 552 bp, Oryza sativa
cactgtgtgctctctgctagtttaaagctggagtttgggttatattatatcggaagcatcttgtgacgtcatcacctaataattatttcttgtgatgtgacctcatcaggccagcttgctagctagccgccatgttcttggattaggttacctaattatgtatacagtacacgaatcttaattaaatcttaatcgtttgttatactgatgattcttcctaaacacgcaggagctactacaggtgcagttaccaccgggagcgcagatgccccgcgcagaagcacgtgcagcagcgcgacggcgacgacgtcccggcgctgcacgtcgtcgtctacacccacgagcacacgtgcctgcagggggcgcccgccgagcttcccgacgcggcgacgaacggtggcgccgccgccgcccgagtcgacggactacttccccgccggcggagagacgccgtcgtcgctgcggcggctccggggcgtaagaggcggaggcctgcagccttagttcgtggaccaccgccccgccatggaggagcgcgagcgccaggtgctc

SEQ ID NO: 35546 - DNA, 724 bp, Oryza sativa
atccacttatactttaaatgcaattttctcttaaaatactcatccgatatacgatccgattgcaccgttgtgttcgtaacaattaattctttataacaagatcttacatgattatattttgatgaaaaattataaattacttttatcatatatctaaattacttcttagacatataaaaataaattcaataaagcctaaaagtaatttacatatattatagaagtaacttataataaaaagaaagtaactctaatgaatgccttttttcattggacgtgaagtcatatttttatccctacaacgaatttacttctaatgtcgtgacaaagttacttctgttttgtttttaagttacttttataatatatgtgcattacttttagactttattgaatttacttttatatgtctaagaagtaatttagttaaatctaaaagtaacttatatacatgataaaagtaacttatatatataataaaagtaatttataaatataaatatttttttatcataatataatcatgtaagatcttgttatgaaaatttaattgtaacaaacacaatggcgtaattggattgtagatcggataaataatttgagagaaaactttgtttgaagaggaaaaatacatgcatgtctattaaaaaaatgcatgcatgtagtacgagtacgatgtagtagactccacgtcttctccatatttaggcgtcgctggttaagg

SEQ ID NO: 35547 - DNA, 640 bp, Oryza sativa
tcgtgtcaagcaacagagcgcggcgacgcctggtcggcccgtgcacgcgcgcgtcgcgcgtcgcgagatctctggcacggaccgacggacggtgacagaaactccgcccgtacgcgtaccacccagtaccgttacatcagcatgcggcaagaaccgatctgtcgcgcccaggtgatcgaaacgtgaggctggccaccggccggtcgtcggccaagaccaacccaccgcgggaacatcagcttcgccgtgaatggaactactcgtggaagtgacggatcgagcccttctggtcgcgtcacatcggggctatacccgtcgccaaatgggaagactcgtcacgtttcaagtagctctgccccatgccatgtgtcccaacagttgcacagcgcaacgcggagcaacgcatatcagcgtacggggttaagtactgaacggtaactgcgtgtactcctacataccacgaggtccaccatcctggacgggtggagtagtagtaacaccgaataaacaaggattctccatcggttaacacaagtaaagtacgccccatgttatccattctcacgatttcatggtaagttaaattatttacacgatgacgggcaaattttatttttcatcgtaagggggaaattaaata

SEQ ID NO: 35548 - DNA, 554 bp, Oryza sativa
cccgttgaaaaaacacgttagctgggttgaagctgtgacgatggtagcaccatgaggtaggcgtggaatgctgttacgagctcctttccacgcgtcagtcttgttgtggcgatggtagccacattggacaggctaatgtgaggagagaggatccatttttctctctcaccctctccctctataacccacccacaaggatggatctatagcactccttaagttaatatgctactttgatggccaaccatctgctaagcatcaacacaatggcaacttaaaagggattacctagcatctactgttgaatttaacagatacttaatcaatctttaaatttcttttccactacctatatctacaacctcctcccccccccccatataaattccctcaccaaacaatacccacttctctaatctacaaaacttttacccctatacctttaaaatactactacttatctatatccaaccttccaagatcctatccccgttttttccactttccaaccttaccatattaaacacactggaaccattactaccttaccaaaa

SEQ ID NO: 35549 - DNA, 581 bp, Oryza sativa
ctctgcctgttaagagctgtcattagaaagaacaaactgaattttagtacacctacacaggaaatgtaatccaaatccaaatggatgttaaaatctcaaatgctacacggtaatttagtactgttataagagccaccggcaaacatcacaggtatgtcacccccaatttcattatatgacttcagcaccaacccagacagactatcggacggatgccctaatgctgtcaatcaacctaaaaatgcgggaagcacatatcggcgatcaaagtacacgttgaacgattggattgcgacgaaatgtccccatttggattctgaaaaataaaagtagtggcgaattcctacttgatgttaacagagactacgttctgacagatcatcagttgcctacactcaataggaaacactaaatcgcacaaattccacccagtcgcagtggaatcgaaatctgacgacaagcagatctcttcgggggggagaaggaccatacctgatcaggaactggacgaagacgggcagcgaaccgcagacgaacccatctgaaccgatcaggcacgacctcgcggacagcaaatggac

SEQ ID NO: 35550 - DNA, 701 bp, Oryza sativa
ctttgatacaccaattaattaaccatctttttttgacagcggccgtatagtaacatactggagtaagcatgttactagtaatttctaaattttgactctaaacgcaggtaccacaaacacgcgctggacactcttaagttgaatctcttttgttcggagtaattcttaaaagacaagagatcatgatatcttgagatcgtttaactgttgaccagctaactattgattgcattagagcaggtacaatagcaggttataagctagctataaacatattttaaagagataaatgaagagagagaaaagtagcgggctacaaatctgtagccagatgcagcacggacttcaagacgtaatgtgtgtatgatagatagaaccaggtattaatactatagtaaacaactattgtataaattggctattatattggctatagatgatttagagctagtagttggttatactattaaacttgctcttatatgcacctggtacatatacctggcctagcatgcatcatgatttattttttatttttaaaaagcatttctgcacggtgcacagtgccatgtcacgcgtgcatgcatgtcagaacttctcggctgctagttacaatagctgtaccatcaattatagatcagttttgccactttgccctaaattaaaacagccatcggtgcagacgtaattgggctgcagga

SEQ ID NO: 35551 - DNA, 626 bp, Oryza sativa
aagtaccgtgagctgccggcgccggcgccgcccccggcagggtccatcccggccatggccgtgtcatctggccgctcccaccacttcccggccgccagcttcccggttgatcggtgcccctcctcctctacaactcgctcctcaccatcaccaccacaacctgccaagacaaagcgagattaagccccttgtaaagaatctcgaagtaatttgcatggcacagtagtgcagcccaaacccaaacagcgaagcaaagcaaagcaaccaaagcgaaatgggagatcttttcatcaacagcaaagctttggcctttgacttgtccacacatctagcagctagctctagctagcatagctaagctacccagcaatgatgaagctctcaaaacgatcgatcgctgtagctagcatgttttccttacctccgccgcacgcttctcctcctccacgcaccgctcgacacgtcgacaccccggcggcgcgcggcagaaacctccctccgacgaacctgcccagccgatcgatcgcccaagaaaaacctccccggagcagcaagcgaaacgatcgttattccaacaaagagaaagtaaggaggcacgcggtgtaggatgggggtgaaacgggcgg

SEQ ID NO: 35552 - DNA, 544 bp, Oryza sativa
ccgccagggccgcgccatagccgtccgggcagcggcggccgtggtagaggatcagggggcgcacgtcatcttgcagcgaaggacgcaccagcagttgcagggggaggatggtatttttcatgtgggtccgattgtcgccgcagcgcgcggccggcgcacagcccggccccagttccaccgccaccgtgcccgggcctcggccggtgtgcccccggcctatgcctgacacaacagctcaggacataccctgggcggtatggacaggccgtgatcaatgcaagtttggaatgattcaatttcgccaattcatgcctgaaaccgcggcatattgtgcacaaaacccttttccatcaaccacttgaacattccacggcgtcaacaaagcaccgacaagccatggttgattacattccaggtctgcagacagcctgcgggcgaccccacataatgcttgcatcactgtttcagtgactggctttgagccccaacgccagccaccaagtctgatgaacaacgtcaacgacatcgccccctatctgggaca

SEQ ID NO: 35553 - DNA, 651 bp, Oryza sativa
cattcgcttgctacgatccatttcccaactgtattaagggctaatcactatgcaaaactgttgtattaagggctcaaagccgcgtactaagttatcaattttttttttcatacttcctttttaagctctaataaatgtcatcggcgagcgtctaaaaaataccataccattgtactccctctgtcccctaatataaggtattttaacatcttgcttgtattatttgatcattcgtcttattcaaaaaaaattaaaattattatttattttatttgtgacttactttattatcctttattatccaaagtattttaaatataactttttattttatatttgtataatttttttaataaaacgtgtggttaaatgttaaaagaaaaagtgaatatctcttctattagggtatggaggtatccatctttcctaaagaaatgtcatcgccgtcggttttccattaatagccaatcgtgtttactgtcggtcaacacggtcaaaatccgccgtaacaaaggggagctagatgcatctgaagaatgccgtaaacgctgagatcgactgcatcctctccatgtctggccgaacgcgagtttgccgattgctttgcagctggtgatctagcggccgattcctcgcacgttgcatcgacat

SEQ ID NO: 35554 - DNA, 1149 bp, Oryza sativa
caatggaagcatatgccttgacattcttaaggagcaatggagccctgctttgacaatttctaaggtgcttatatgaaaacttcactagttttcttttattatgtataacatagtaatgaataacataaacgcctggtaacacatttatcttcttcatgaagtatggctcttattatttcattggttcatctcatacagtctcaactgctactctttgatctttgttttccaaaagttggagctgttattttttttctacttggtattaaattacgcctcatgtaataatattagttttatagggttctaaattattagtgttctgtatgcatagtatgataccggaggacaataatagcattcaaatggtcttgtttatttcattgtggaagtggggaattggcagaatgttaagtgaagcctctgttcggtccaaaactctttgaaatttctctagaaaccgtaaaatatgtcaagaaatagcgaggttctgtttagcgcattattcatttctatcacagagtaaggtaggtggacaccttcattttgaagtgtgaacattacatttgagtaaattacactcatggtgcatgaacttgtgaggtgggtgcaaatagataccacaacaatgctcattccggtacaataacttgcccggcctgtgttaacctagtccaaaacaatccacacatgcaaaattgatctgatgtgtagtaccaggacggcacctatgcatgctagcagttgcttgtagttgtgcaggcctgcacacactagctcaatttcgtatttgcagaatatagcagtcagcaataataattactatgttgcaacctcttgtaggctgcttgcactactggaataccgatttgatttttcaaaacaagcattttatttttcaaaacaaaacaactgctagcttgcaaaggtgtcatcagggtgcaccacgtttaatcaattttgcttgtgtggattgtttttgcctgggttcgcacggactactcaaattattgtaccgaaacgagcaatttacctatttgcacccaccgccccaagttgatgtaccgtgagcgcagtttactcattacattttaatgcttattcggtaactgcatatgtggctatcttacattttgattgcatttacca

SEQ ID NO: 35555 - DNA, 528 bp, Oryza sativa
acgtgtaatccttttgcgcgtttgaaaaaaaaatcttgtagcaaaattttccattcctaaacggatcacatgtattcgacccgttttgacgcccccgcttgcgcacaaaaacaagccggacccggagcggaaaccgagcgagggctctctccgtccagtctcccacccccgacctctcgtgtccgctgcgaagaaaaggttgagcacacacctcacctcacctcctcccccgatccccctcgcctccttcccctttcccccctcacctctatggttttatccgccgcaccaatccgccccctaacgattcgaccagatcggcgcgagtaagtccccgctccatcccgatctggatccgccgcccccccccccccccgacctctgcgtggttttcccccagaatcgaatccctctccgtggcccgtgttttggttggggtagatccgacggttctcactgcggcggattttttcccttttgttttgtttttggtcgaattcctggtgcctgtttgttcgatccatttgt

SEQ ID NO: 35556 - DNA, 2210 bp, Oryza sativa
aaaccatctttttcggtcgacccaaatccacaatagttccggttccattaaaaaccgggaggaaaaaggttaataagaggaagatctttagtccctgttgttgttaccaaccgagactaaagatcgatttttagtcccggttatttgaatcgggactaaagatagcgatctttagtcccggattcgtagtcccggttagaaaaccgggactacaagggggttacgaaccgggactaaaaagcacttctccaccagtgggtgttatagctaaaggagccaagtggccagcatgactctaagtggggccaacatgtggagctcgagctagaagatgcatcgaagaggataattaaacttaagctcagactcgctagatagcgtggacctaagctcaaactcgagcgcaaacatgacatctaccgaggtagagccctaagagcagttacaatagtagactattagctagctacaaacatattttaatgagataaaagatgatagagaagagcagcagtctacagatctgtagccagctgcagcacagactccaagatgcaatgtgtgtatgacagtgtgaccatatactaatagtatagtaaacaactattgtatgaattgattgactatagataaattggagctattagttggctatactattaaccttgctctaacacgagcatagtgtcgacggagataaagcttgagcgctaatggtgagcatgatggtgtgggtgaagatcggaaaagcaaaagctttttggagggaaaagaggagcttgagctcacgtatgtactacctaacgagaatactgtggtgagttgctagagacaaataggaaaaatatgattggtctaaattacatgtgtttatgttattacctaacccaaagtaaaaaaatattggcgagatgatggtccaaagttaaacttattacaaccccagttgtaagacaatgtgattttggagtttattttgtggtgtttttttcatcatacttcatttatattatttgcttttgaatcgtcaaaatatgcgtataaaagtttcaccaatacttattatttcttttaataaatcgtacgaataagtacaagcggagcgatagaagtatcttctacacctgctttaacattttccactaccatatcctaaagggaaattttgctataagatactgctattggtgtttttagccttaggacaccgctgaggaaaacattttataatcgtggtattttgccagtacacaccacaccgactaaaataataatttccggttaaagaggagagagaaatcgcgtgaaatgtacaaaaaatacccttgggcccacataccagctctcctatctttatttttcgaagtacctagctcaacgcagactctcacaacacacgctctctgacccctatgaaagcgcggacgcttactagcaggcactcacaacacacgcacactcacccatatgagccattttaaagactgggccatgctaatcccctatgaacgcactcacgcaaacactatccctatgagcatattcgaagactgggtcgggcaaatccactatgaacgcacgcacgcaaaaactacccctatgagcatcttcgaaaactaggccgggcaaatcatggagattgaagaagtcgtcacaggcgcatcgctgtcgacgggtatgtcgcctaccactgaaagcacaatgccgttaaatcatagaaaattcgctcctatgggaagttgaacttaggacctaaggtgctactgaggctataggctctttcgctctcctatcttgtatatgtggggtctacatggctgtgactcgggcgagcggcggcggccagtggtcgagcggtgaggtcgggcggccacggcggacaagatgcggccaatgcctacggtggcgcgaccctacagaggagcagcctgtggtggcacgacatggaggaggaggtggcccttccggaggctgggcgaagcagcggcttggcacagtgtgacgacgttgccccgcgagcggattggcaacgctgcagccggccagatccgcggcgaggcggccggccggtgccggcgtgcggtcgcaggcgtggttggcttgcggcgagcggcaacgacgctgaaaatatcgccatccactccccttccctttttcatttttatttcgttttcttttcttcggtttcttctttcttttcatttaccttt

SEQ ID NO: 35557 - DNA, 632 bp, Oryza sativa
tcgcttatgatccagatgggctgaatctacttaaccggttggaccgtgagcccatatttagttggcatgggctatatgtttcttcttggtcatcgggcagtaacgtgtgccacgtcataaaaacgccatgtttttttttaaaaaaaaggagtagatttgtaaaggacgtaactatacagctagtgttagctaaaccagctaccactccatctaagaggcaccatccacctatacttcaaatacaattttctcttaaactactcatccgatctacgatcgattacaccgttgtgttcgtaacaattaaatctttacaacaagatctcacatgattatattttgatgaaaaatcacaaattacttttatgatatgtctaaattacttttagatttcactaagttactttttagatatataaaagtaaattcagtaaaacctaaaagtaatttacatatattatagaagtaacttagacaaaacgaaggtaactttaacatgtcatttgaagtaaatccgttgtagagataaaaacatgactctatctataaattaaaataatcaacacaaattatggaattaactaaaataataataaaagtaatcacctcagagcattatgaatgtataggaa

SEQ ID NO: 35558 - DNA, 604 bp, Oryza sativa
taaattgttttaataatatatagttagatataatattaggcggagtaaataattggtttcttcctagaactaactgagatacgtgtgatcgattcccgcgggtcatctcaattctcagccactaatcaacgcctaagatggtgtttggattcagggacttaactttagtctctatatttagacactaatttagagtattaaatatagactacttacaaaactaattacataaataaaagctaatacgcgagataaattttttaagcctaattaatccataattagagaatgtttaatgtagcatcacataggctaatcatggattaattaggctcaatagattcgcctcgcgaattagtctaagattatggataggttttattaatagtctatatttaatatttataattagtgttcaaacatccgatgtgatagggacttaaaatttttaacaccatctaaatagggtctaaagcttttctagattgtgatcaacgcctaaatctccctcgtcagtaaaccaaatattacgatcacacgtgcacacgtacccgaggcccagagcagagtttaattatgatcgatcaatcacaacacaggtata

SEQ ID NO: 35559 - DNA, 882 bp, Oryza sativa
aatagttgcatgtgttggtctagtggagcagatatgcgtgggaatttactactttatcttaaattattttaaatttgcccttagcatttatttttgctgtagatgtcaggaccatgggctcaaataacatttgtttatctttctggtttacaagagagaggtcaaatttggatggatattagtgggtccatagatttgtaaatttaggataaattactttggatgtgttgatagcaaggttactctgggtgtgctgagcttaattcttttgacctgttaaaaagaagccccctgctttgcttttcatctacttatattcgattcaattttatgtaagtatgtaccaatgcatgtttagaactgtagaactaataatatagaattcattctcacaagtatgacaatgcaatttaagcaggggcatatcatggcatcgaagcggatcctcaaggaactaaaggacctgcagaaagatcctccaacatcatgcagtgcaggtatgagaaagatttatcagtggaaccatggctgattggctggtagacagtgtgaacttgaacgttgatatgataatgactctgttggtagtaatccatgttttcatgtctgatggaattgtacaggttgtttataatgggtttccttattattggaatattgcgaactcatccaatggtgtggttgtccatacattaatctttaatttattgtattgtattccatgtttgattcatgccgaaattgaactatcagtgttctgaatgtatagggtttatctagtactcttacaagagaatgcacaatcttgtcagttgcagtcttgatgcctttgtgttgttggttaggcagttgttatgtttgtaatttccaatgagtgaagtg

SEQ ID NO: 35560 - DNA, 1109 bp, Oryza sativa
aaatctccctccactgtacgtacgggggggggggggggggatggtctctgctcgtgtaatcgtgtcaactgcctcgaggtcaactcgtgatcgagctcgactgttgctttttgtattgtctagtagttggctcgtccttttggctgtttgtgtttctgctcatgattaatggcgctgctgagtgagtgagtacaaaagaaaaaggtggcccatgcaggtctcgaacctgcgaccttcgcgttattagcacgacgctctaaccagctgagctaataggccaccaggttaagataacctattattatatatttgaacctacaagagcagcggagtacaactttccaacgaaggttaggggcccttgaatcaaagcaattatggagaaatttcataggattaaatcctacaggaaatttttctatgtagctctttgattttaaggattgaagttttccaaatcctacaaaattcctatagaatggcttgttgcatataggttttggaggaaacttaacaaaaggtctgtagtccaatcaaacgattattcctgtgtattgcaatcatctgttttatacttacattcctgtcagaattatatgtttttcttattccttaatttttttattcctacgattcaaaaaggccctaaatggctgacaagggcagcagcgcggagatactgatgctcacgtcgtcgcgactagcttggaaccagaatcgacggtccgcaacgcgtcccggtcaggaccgagcacacgcttggtgaaaccgtggacgtcaaaacgtggatcagaagaggcaacaacgaaattacctttgataaagtcacactgttttctctgtaatcgtttgcatcaacgagaacccgtgcagataccttcctcacgagtaacattacatcatccatcggagtacgaggaatcccagtccccagctacgagaaaggcacagctaggcgctattgtggcacatgagagaaatagcatcaccaccataccataataatcacggcaagcatatgttatctcattatcgacgggcaatgatcatatgttgatgttggggctacgagacacgatgctacatggatctgacacacacgactggca

SEQ ID NO: 35561 - DNA, 1417 bp, Oryza sativa
  unsure (1)..(1417): unsure at all n locations
ccctgaacgcacccatgtcgccgctcatcggccgcctggttctccgcgacgtcggccggagttcgctgacgcggctgtgcatcggcgagccacctctctcttcccccgattgctcgccgcttcttgaaccagccctaacgctgccccgatcaaatgctgcgtagggagccgagctggtccgcaccggaggctgctcgccgccgccgtatgcgacggaggacgtgcggctcagcgtgtccgggtcgtcggagaacacggaggcggtgtcggcggagaggatctcgagctgggagagcgcgtactcggcgtcgtccgtcggctccgggttcttgcctgctcaagccaacgatcgaacacctcgtcaggtactcaggaacacacccgcgccggcaatggccgacggcgccgggaagaatcgtgcggcgtgcgtgcgtacctcggatgggcgtgcggcacttgctgcagtagtagatgatggcgttggggtcctggtagatcatggcgcggcagtaggggcaccgcccgaaccgcctcttcacctgctcgctctccatgctcgccggcgaccggcgacgtcgccgatgctacgacgccgtcgacgcgcccgcgcccacgcccacgtttgccctgcaaagagacgatagcttcaagatttgtcatccatgaacttaatccccatgcttcttctgcgttctacagttttgcagcgctatgtgtccatgttcgattggtgaatctactgaacttatcaaactcatttgcatctagaattcaagatggttatcccctaatctcctccctaacctacattcctacctggntaattcaagaacatgagcaagaactcctaggcagaaattgcaaagaaccgagtcatacaaggccacagaaacgaacagattaactaacttacctagatcagatgccaaaactctcaaagctcttcccgaattcttcacctaatcatcaacacgatcacacggattcccccaaacccaaagttttccgaaacgtgaagcaacaggcgaaagcgagcgaggcgatcgatcgtggaagaaggacaagaacaagaaaggtttcttcttttttgagccaccaccgagccaagcaagcaaaaagaatagaattttagtatgcggaagacgtgtgcgaaccgaagcgttcagcgcttcagctgagcacacatacaccccgctttttcagaggaagcgtttggtgattatactacgtaatagaaatccttggaatcaaaacgagtcgggagcgtgtgggtgtgctcggattgctgcttccaaccgccgttgactcgagagaaaactgaaatgatggagagtagcggcggttggctgcacgagcattgaaggccaaagaggagacccggtcctgcttccccctgtgcagagttgcttttctatta

SEQ ID NO: 35562 - DNA, 559 bp, Oryza sativa
attcgcgcgtaccattctgccagaactgactaggctaaccgagcagtagcactgatgccccttcggggaccttatgtgatcatgtccttcgtaccttccggggctggcccatgaaaaaaattttgttaaaatgaaaaagaaggccaaaaccgtgtggcccgataaaggaatgggttaactgttaactgaccgcgcggatcgatctgactttttaaggtttgggttaagggcctgtttgtttctcatcgtataagattattataatacaaagtatttacccagattaataaactgaattatattaagctatgagtttgtttcaatggattatagtaggattaaggcagtgactctttacccacccatataatatgaaaaatatatgtttagaacagattaccatttatactaatctggcttacagatcacaataatctatcataataatttacctatttatttttattattactaataatctagattataataatctctaagcgaaaacaaatagagcggtaatatggtttggtctgtgatcatgaccgatgttggagat

SEQ ID NO: 35563 - DNA, 1011 bp, Oryza sativa
cttgcataagaggataatgaagtaatataactctgaactggaaagtggaaatgatttttgatgtttgaaaaccctaccatgcattgcccaccaaaataaactagttgaaagaaaattatgttcgccagagtgattttccaaattttagaatgcacctagtcacattataattgcaataactgtttcagtgcacatcgcctgcattggtaggttgttaggtgctgcaactagcgctaagaacaatacttgtttgaattctgtttaggcaacaatagtagaaaggcatggtaatcctttaacttgcctttttattgacaactgaatgccaatcttacgtttcatgcaaaaggagttataagaaaaaggcttgatgaaccaggtgatctgtcaataccatcataggatgttgaaaacagatagtcaccaatgctaccgtgatttgctgtattattgggttgtaatcatgtaaatttggagtatttcacgttattacatgtttgctcatattcatatagtgcaaagtgtacaatctgcagtagtcagtaatacattttcgtctacaatgaattgtaatttgtttttgggaagcaatcaagttccatctagttagcaatataatattgtaataatattgcaccacttatcatataaccattgatacatgctttagctgtatgacctgtttcttcaaatctactatttgctcagccaggcatgtgttgatgctcataattaacagaaatgtgctgcatgtttattgcagctttccattcctgaaacagagaatgggcattccacagtaccaactaggccagcacggagtaactctgtctctcgcccttcaatccaatctactcttatttccagcacaacaggtcatcagttgtcaatgcaagcatttcctctgtctgttcgccacctacaactccaagcaagaggactagcactctttcttcatcaaagccatcagttccagcttcacgtcaagtaccaacacggccctctactcca

SEQ ID NO: 35564 - DNA, 1529 bp, Oryza sativa
cgcaggttttgtttttttacagagggagtacgaatcaaaccgcgaatcaggatggatgagcccacagtaacagttctcgtatacccgaaatgatacggcggagtgtgcagttgaatgtcacgtcaacagacagatgcagtgcaatgcaaaagcagagacgacatggatacagtgctgtaatactgtctctcatatgctgcacagtgcactgccactgtaccagtatttcgccgctgctactttttattttgttttatttcttcatgttcaactttgaaattcatagtactatcaatcatctgtttcaaagtatttcatacaaaatttccttgcaatattaaatactccaaatttcatacgccttatttataaatcaaagagagcttaaatggattaaagagggagtcagggagagaatagagacaaagagccaagttatgttggtctttttaatggagaactaaaatgaagttgtatttaggtgacatgaaagtatttttgatgatgtgataaaaaaataataaagtgtcataccagtatttttttatgaaaccatgttaacattgttttcttacaatttatctcttacatgtactacctatgaaacaaaaaaaatgaaacaagaaagaaaagatgacattttcaaaaattttcatattcatattcaagtacctatgaaaaatcattttcatattaaatatcttattacctaacacttttaaaaatatgaaaatgatttctttcactgggctactcatggagcaagaaagaaaagaaaaaaaagaaatttactatgcatacgacctaactatccaactcacgtagaattgaatttgatcaacgtttgtaaacggttgcagtgcatatgacatattcttctttaattgatttatggtttagtacatatctctaattatatatgggttataaaattggatagtacatactataacattactcctacttgagaaaaaaaaatactactccctcctaactaataatacttgtcgtcttagataagagtgatgttaaactttagaatctttgattgtgaatcgtttttaaaatatttatcttttaaatattgtgactacatgtatagattagtcttaaaaatactttagtaaaatcatatatttgttaatattatatattaattataatagaaaataatggttaaagtaattttttaaaaaccgtttcgtttttcaaaccaataccaggtttatttaccaggggaagtgtgggggaagggagaaaagaaggaagccaccgaggggatcccgggcgagatacgccgtcggggaagacaaatcgcgtgccaggtattattatcatattaattaatccccacaccagggcggatctgaaccgtccatccctaacggccacgctgatcctgcggctcacgatcggtcaatgcccgattgcccggtccacgtagcccgtctctcttcgaccgtacggcgcacgcgcactgctgccactgtcactgtctccggatcttctgtggctgctcggcagcagca

SEQ ID NO: 35565 - DNA, 1178 bp, Oryza sativa
agattagtatacattagcaccttcctattgggctttgctggtgtgccttgcatccaaagtgatgccactatctccacaaatgcaggctttaccccatgatcaccaaatatgcttatgggaaaaggaattaaaggagaagattttggccagttgaatgagtttaattgcactgtttattctttcagtgttggaatgaaatgtgaggtcaaaattgttctggtgatgtattcagtagtagaagatttttactctgaaattgaccgttgtcctgaagataaatgactgtgaacagtaaattttttacacttctgtaataactgttgctgacttgctgtacctgtacatcattaacctgtctaaaattttttcaaatctttacacaagcagaacaattgatgctccgtggccgtaaaattgtctctcttgtctgattcctgcaatctttggacattcaatccagatctgaaattcttgctgtttctacacaaacaaggagtatactattatgcagttgccagtggatttcaccatcttaaaattgtttgcatttacatcagcacaatagacagaaacatttctatgctgtactacaaagatgacaagatctagcattgcatcaagaagtatctaggaagaacagaaaacaggaaactgttcttagatcttctcctcatcaggtttcctcactgaagaaacttgcaatgctcatctctgcaaaaggttgatgcatatgcattgaaacagctctccaaaatgctacaagcattatctatattgaccaaagatctgttctttgcatctgtacctcacagaagagattgcttggaacataaaaagagctaagggtgaaataatttccatggaaagtgtcatgctcttgttgcttcagaatggcaggcaagggtggtaaaagctgatgggtgcaagatcctgcatttaagcacctgggtgcagttaatggcattactcatgagattgtgtagatggatgtgaggcagttcaagtgcctctgctgggtttgaaatggcatggcaagcttctggctgacagagtgacagagtgcattcaattggttgtcattgctgcatatactcctctctctacatgcagggtactaggggttgaaaatgtgcaattttttatagactttgagatgatgctaacaaaacagtaacacc

SEQ ID NO: 35566 - DNA, 1058 bp, Oryza sativa
gtgccctagcacttaattgatcttttccgtagcttaatttttacagtgctgctcctgcttagctgaacatgcatcaacagacagaaagacagacagatctcactctacacatctctagacaacatcaacctaaatttcactccatgcttggtaatctaattaactgttggtctctctccactatgatactgacagtaaccagtgattagcagtaagtaagggcgtgttttgttctttgccaaactcaaccataccaaaattttgtcaatagcaaaggtttagccactgccaaaaaattgataaggttgatcatttgatttctaatttcttgccaaaatttttgaaatgtgtgtgctttacttggttttggttgctaaatttttggcaaagcctgttttggcaacaaagcaaatggaaccatcattcattgtcattacctttttttttttgacatggttgaattggacaatgaaccagaatccaaattctaaaattgaattttccatttgctcttcagcttatccgccacagccaaaatttaaatttcaaaacttaattttagatttgattctgatgtttcttgctcaacgtagtttatttatattactgcctttttaagtcgctaatagttgtttcggtttataatcggctataggcaagtttggggagtttctagcagatgcggtttcttccagaatcaaaagctgcctaaaatagttcggttttttattcatattccgagaagctagacttacataatttcaaaaaataaactacaagtcaggagttatgctttcttcttcagatttctaaagccggctacctatcacccgcttcttaaaatcgtaaagttcaccaaacagaatccatggtagcctgaagaatgaaaagagagtgaagagaggatgatgatgctacaggcaatgcttggataattggactccctttggcattttatagcattagcgttgggaggagtggtgaggtagcaccaccatgtgtcgtgctcgctgctgatgctgataccagggttcgccataccgccgttatccgcgcgg

SEQ ID NO: 35567 - DNA, 686 bp, Oryza sativa
cacatgactaattatctatagattactaacttcgtactaaaatataataaattttctataaatttggatagatgcttgtccatattcatagctggaaatgattacattttgggatcgagagaacattattgaaaaatatatttactcgactttttaaacaacttaaattctatatagattttttttttcataaacacaccatttaacagtttaaaaagcatatgctaatgaaaaacaattaagttaaagtttagagttgaagaaagaacatgattttatactttgggatggaatgagtaataatctttctaagcaatcacattaaattaaacaaacttgcttatatatgttgcttttcaaatatagccacttaaagttttgagtattgatttgacttgtacttagcaaaagaatgaaaaataagttcctgttgatctttaaattcccgtgtttttattgtgaaacctgtaaataaggaattttttcccacttttcctgtatgctaatccttcattccgatgagcgaatagtttcaatttctatagtaatttaaatactccattttcctctaaaaatccttcaatccgaaggagcctttgcgacctattaactccactgtaacaagggatgaagggaatatgattgagaaaagttctacagatttgctttctgtaccccttccaaga

SEQ ID NO: 35568 - DNA, 917 bp, Oryza sativa
aagctctttatgggcggccaaaattgcaattagccccttgccgccctctgtacgggcggcaagggcctaatcgcaattttggccgacggcggcagacggcgcggtcgacccaccgtctgccacgtcagcttgccgcccaccattagggcggcaggggctatttctgcaatttttttttgtcgatagattatttctgtgaatattaaaaaaaatctaaaaacgaaaaaaattcatatccatcatgacccattaattgtgttgttatggttggtactagttaccattcttgttcttttctttcctgcatcaattagattagtactccaaagaggctcctttttttttctcctcccttgtgcctgccatgttcttgcactgcactactgcaccagcacctacaattccaacagtgtctccatagccatcatttagtttgacaacaatgagaccaaacaccttacagttaactaattagtgaatatgtacaacactcctgtaccaattaaagttggtagattacaaataaattgttaaacaatttgacatgaaacatttgtactccctctattccaaaaataactaacctagaacgggaggtaacataatctagtacaatgaacctgaattgtaacattttatccagatttactgtactagtttgtattacatcccctcgtatgtaggcattaaagcggctacaacatctctctcaagtcatgtcaatgctagtaccattctccggtgtttatgtggctttggtccttctctgctccatggtactactacactccattgcaagcaaacacatttgtaaaagcgacaagacatgagagtatgtctagtactgagaagagcatgcatgattgtcccaactatggaagaaagaggggcaacaaaatactgcaattttttttttt

SEQ ID NO: 35569 - DNA, 1963 bp, Oryza sativa
caggaacagtgacatggactaaagttgagcttgagcgatcggtgatgcaagctaccgcatcatttgatttttcgtactacctccgattcgaaataaattcagtccatgtttatttggtgaaaagaaaattttttggtgtcacatccgatatttgaccggatatcggaaggggttttcggatatgaataaaaaactaatttcataactcgcctgtaaaccacgagacgaatttattaagcctaattaatccgtcattagcatacgttgtttttactgtagcacttatagctaattataagactaattaggctcaaaagattcgtctcgtgatttctatgcaaactgtgcaattagtttttctttttatctatatttaatgctttatgcatgtatccaaagattcgttatgatgtttctgggaaaaaaaatagaaactacacaaggcctgatacgaaatatgatatatatcatatcagccttttgctttattttaagattgttcgatttattttgacatggaggacttagctagtgtggtttgcctcttcatcttcaatgagccattgtgcaaaaatgttgtcttagttggctttattatctgcagccaaggcttaattttaaataattcagacataaaaaggttaaatattatttattatctgcaaacagattgcttcatcgtttgctcttcatcttatcaaccataacaaaattaaaatttaacttaattttagagttcatcatggtagtttatttttagcattggtttttaagatgctaagaacgctatgtcaaagttctagagaaattttaaaaaattgctttatcctaaacgctaataagtattactctcttcgtttcacaatgtaagttattctaatattttttacatttatattgatgttaatgaatctagatgtgagaaatgttagaatgatttatattgtgaccggataaagtactatcttctccagcctctagggtgacactggactgtatccagagtataatcgatcgtggacgatggggtgacactggagtgtacacagagtttcatacactattctactactaatattcaaatatatcctactactaatattcaaatattttaccaccgacatcttgttcatttactgagggagaaaatgactgaagattgtgtagatctctctttttcagttatctctcaagctttattagtccggaatttttgcaaaccaagataattaagtttagtttgaaatggcgataaacttttcaaccacacgagtacagaggagctgagctgagcaggtggcaggccagctgcaccgctgtattttcagagacagttcatgtaggagtatatccagcactgaaaatagtttttataacagaaaaagccacacacacaaacacttggaaagaatagaaaccatgcttcaatcgaaaactaaaaaaaaaaaataacctcacagagttctcaaaagcagcagtacatttcagagaaataaaaaactaatcttgcattgcctccacgcctacagtagaatctctctctctctcgagagagagacagctttacactgttcaaagctgccacttacccccaaaaaacctttcagttttggacagctcatccctgttttaaacctaaaaaagagagtgtgcatgcgcattagaagtgcagaagtgatctgttcaagattaatgcaaaatcctgcaaattactcagtcagttcaaacttgctatagccaattctgaaaaaaagtagtactatcatttcagaaaagagatttgctgtaccttgccaagtctgaagaaaaaaaaagaactaaaaaaacaaccttttctttttgcaaagggattcagaaaaagagaccgacctcattgtttgacttaatgcttatacttatataagtcaaaatttaaattttacagcttaatctgaatttgaccttttggtttgggctgcaggaa

SEQ ID NO: 35570 - DNA, 2460 bp, Oryza sativa
acataaaatactattaatgttttattatctaataataatattattattattaatcataaaaaaaatcaaataaggcggatcgtcaaacgttggatatagaaacccacaactacacttagaatgaacggggagtataatttacttatattataatgatataaatatatttagtaatagtgaattatgggccattttgacggtttcaagtcatgaacagtagtagtgacgttaggcaggagagggtgaggtgtgcaagaggccgggagagacagacacctcggcagccacacacgcggatgcgcccgggcccaccactcccaacgcgtgggccacatccgggccatccaatccaccccagcccatccatccgacggcccagatcacgcgcgctcctccgctttccttttccgaaacgaacccaaaagaaataaaaacaaaaaaaaataattcctctcctcttctcatctcatctccctctcctctcctctcgccgtcgccgtcgccgtcgccgccgctcgccgccggcggggatagagttcgccgggatcgcctcgccgggagagttccctcaccatcccgcacctccgctcgcctggcctcttcctcccggtcagtaagcccgccttctccctctcgctttctgttctgctctgctctgctccttttgcttttctggagggaggaagtttgcgaggagaattcccgtttccccctccgaatccgtgaacccacactcgtttccccacggcggcaagaatttcgggtagaattcgacaaacaatatctatccctgtgttgtgcggttcttgtttgcgttggtgaggtttggaaggtgggaggtcaaagggctaagcaatcatcagataatcctgtcttgatatatccggtattcgttaatgattttcacacgagtctgaaaaaaatcttcgcctaccaattgtcgctgtacttttcacacctacaatgagacattaatgttaatgcagtctgaataattttgtcgaaattatagataatggtggaggttatgtgtcactcatcactgtgttgcctcaagtctcaagacctagatatgcatgcacgatccctgcctttcttaaaggactattttatcagctttgttgtagtttgaatggaagttttttttgtgtttaggatcaaatgatgcggtttatgttggttcttaggatcactgaagcttcaattcaactttgttcattggcaggaagtgtggtgtgctgcaagctcctgtctctcctacaaggtttcaaaaccaaaatatgcctgaagcacacggaaagctggggtgattaacgtctgtttcttttgactacaatcatcctgattctgcttctgtctgcaaaaacaaccaagccatgacgtctgtagttcatgatgtttcaggtatgtctgtttcatccaccaatgtttgccttgtatatttactcatgtttaaatagtggggtagtgtctggttataaattgtaatcacaacaatgattgctcaactgtaaattccattgggagtgtattgagcacgcatgacggttatggatttttccaagcaaacagtggcatttgtattagcagacagtggcatttacgtggacaattagtaaccaggtatagaaggcaatttgaatttattaaggtatattattattccagatgcagcctgtcacactgaatttatagctggtgggattatggaaatattagttgttccattaagttggcatacactctgcagtgtttagatcaattactacatgtaaaaaggacgtgctgaagtgttgatggaacatccatcgatgcttgctaagtgctggcagatataatttcagttattcccctttttaaaaatggcaatactttaagccttttcatttttgttttctttcctatgtaggcaaccatggagctgatgagcggcaaaaacagcaaaggcaaggtgaacctgaggaccagcaagaagcctcagttactagtacagatagccatacaatggtagcaacaccttcaacagattatgcgacaccctatgcccatcacgatatggcccatgcaatggtacattacatgtattttttcccttttttagttatgagcaagtagtataacttctgttctttcagtttgagccctagtctaaggatatttagccaactgatcatagtgaaatatgggagaaacatggcaggcttgtagaatcactatggagattcaagtttgaatttggatttggattcttgggctgataaccacctcttcatactaaaactaacagatatacagagagaaaaactcttgcatagtggaggaccaatttacttccttttgaggtgaccctcttatgaaaaccatgcatcacaccttgattgtcaaacaggtgcacatgacttccatgacagttataccatatcccatttatactgctatgccacgtttccttgatacgtt

SEQ ID NO: 35571 - DNA, 550 bp, Oryza sativa
gcagcccttatccaagacgatgcaaatggcaagaatttgggcgaggagctcaccggcgagagaggagcaacgttggcgatgcggagggagtcgtggcgaggtggtcgcgacggcggggcgggggcgagcaactggcggccggcaacaaaggcgcgggtgtttcgagcgaggcggagacgaaacgagaggggagggcgcgggctttataggcgaggaggagaggtcggtttggaggagggaaaccgacattggcggtcaagggagctcggctggtgttcacgggcggcagcggcggtttcgtgggcagtgagaaagcggcgacggcgtggatgcgttgggcggcgaaggtgatggatcgagcggcggaaatcgaaccgcgggagcgtgggctggcgtggtcaaggagagcgagttggcgcggtcggtcaagcggcgcggaggcagtgacaccggcagtggtcgggaaagggaaaaagaaggggaaaaaggggcttggtcccttgccataatgaggagagggagagtgaggaggaggaggagagggagagca

SEQ ID NO: 35572 - DNA, 1037 bp, Oryza sativa
attcctgcagccccaaaaacattttaacagagagtggaagtagcatacaaagacccagaattacgtaattgtttttttttgtccggatgcgacggatcaggttataaaaggctatgagatactggcctaccctccccacgcaaagtacatgcagctataataatttgtacatgagagcttaccataggctgtccaccataagctgcataaaggcttccgtaatatggatcaatatttgcgtaagcaatttggccctgctgaaaaaaaatgcagaattagacaataaacattacaaatggaatttggcgttatgcatgaactgtgatcaggaaatccaagcaaagaagcaactcatggtgcaaccaccaacgctctctttggttaaggttagtaacaaagaaatttggctatctgtggtcgtgtggagacttgtgttatggactggtgaacatttgttgacaacgtatcaaggaaacgtggcatagcagtataaatgggatatggtataactgtcatggaagtcatgtgcacctgtttgacaatcaaggtgtgatgcatggttttcataagagggtcacctcaaaaggaagtaaattggtcctccactatgcaagagtttttctctctgtatatctgttagttttagtatgaagaggtggttatcagcccaagaatccaaatccaaattcaaacttgaatctccatagtgattctacaagcctgccatgtttctcccatatttcactatgatcagttggctaaatatccttagactagggctcaaactgaaagaacagaagttatactacttgctcataactaaaaaagggaaaaaatacatgtaatgtaccattgcatgggccatatcgtgatgggcatagggtgtcgcataatctgttgaaggtgttgctaccattgtatggctatctgtactagtaactgaggcttcttgctggtcctcaggttcaccttgcctttgctgtttttgccgctcatcagcttcatggttgcctacataggaaagaaaacaaaaatga

SEQ ID NO: 35573 - DNA, 707 bp, Oryza sativa
  unsure (1)..(707): unsure at all n locations
gaatagagggagtacaaatgtttcatgtcaaattgtttaacaatttatttgtaatctaccaactttaattggtacaggagtgttgtacatattcactaattagttaactgtaaggtgtttggtctcattgttgtcaaactaaatgatggctatggagacactgttggaattgtaggtgctggtgcagtagtgcagtgcaagaacatggcaggcacaagggaggagaaaaaaaaaggagcctctttggagtactaatctaattgatgcaggaaagaaaagaacaagaatggtaactagtaccaaccataacaacacaattaatgggtcatgatggatatgaatttttttcgtttttagattttttttaatattcacagaaataatctatcgacaaaaaaaaattgcagaaatagcccctgccgccctaatggtgggcggcaagctgacgtggcagacggtgggtcgaccgcgccgtctgccgccgtcggccaaaattgcgattaggcccttgccgcccgtacagagggcggcaaggggctaattgcaattttggccgcccataaagagcttgtggccgtacttttttnatntgggttccttgccncccaatgaaaaaagtacggccaaaagatttttctatgttatgttaataataaataaagaagtatttattggtaaaacttgtgaatattgttataaaaatgtat

SEQ ID NO: 35574 - DNA, 596 bp, Oryza sativa
gaatcccaatttgattctttagctgcatacgactgtgcatcaaaccagttttggcatggtagccctcggctatagcattatagccatcagaattcatttggctaccattgtagtggcctgctcttacttgctctatgcacaatgctaacaaaatactattataactatcagtccagttagctcggtcagaagtgctcaccggagggccgccgaagctgcctaattcctccacctcatcgtcccatgcaccttcttcgtcaaggtcgacgtaatcgccgatgggtgcttcctgggtgccgacactcctcgacgcacaccaaccgcggcccccacgtccgcggtcgcggccacggttggttgccatggcgcgttgccgacggcgacccgttgcccctgatgaggagctacctcacccaaggccgccgccgacaatgcccgacgacgacccaccatttccaccgtgtccagcacggccacctgccgcgccgaagttgagctggcgggcgcgcggtgcaccacgagatggctcggcaccccctcgaccagccctcactcccagagagcgtggtgcacggatgggagggagaccggagcct

SEQ ID NO: 35575 - DNA, 542 bp, Oryza sativa
tgagtagcctatatagactactccctccgtttcaggttaccgtttcaggttataagacgttttgactttggccacagttgaactgtttcaagtttgactaagcttgtagataaaataataacattttcaaaccaagacaaatttattatgaaaatatattcaattattgatttaatgaaactaatttgatattataaatattattatatttgtctataaacttagtcaaatttaaagtagtttgactttgaccaaagttaaagcgttttataacctgaaactgaaactgagggagtagtgaataggttaaaattagtgcacttgacttttagagatgtactagcatagttgtgtatttgcgaacgtcttctgtgttaaaaaaaaatcgaacagagtaaagccgtaaaatatatccgaacatataaagtcgacaaatcacgctggagaaattcaaatcttgtcatttttaaagaagaacaatccaagtctcactcgtatagagcagactagcaatatagtcagccgctcctatgacgtaacga

SEQ ID NO: 35576 - DNA, 607 bp, Oryza sativa
cgtacactaatagggaactctgacgatcgtactaattcgtaaagacacctaatgatcgtgtcatttcattgagcagctggttactgctgtacgactactaccatggaatgattagagtcatttcattgagccgttggtgtctgtggatctgcgatttgtcctactgacgatgatttaaccctctccagccgaatcttgcactgtttcctacagtaagttgagcctgcctgcacgggcactacagtctactgctcctacagtgcaggggaatctgaagaaaaatttaattggccgcactactcctcagacggcttttcacttcttgcagttacagatgaattttggatctaaacttcagtcttttcatcacatcaatctgtcatacacacataactttttaaccacatcatctttaattttaattaaaatctaaactttacgctaaaataaacacagcctatagaggccaacctctctctcttctcccccatcactgcacgcgtctgcgagaagcaagaagcagaagctactcctactactgatccgtagctggaggagtagatggtgatgtcatggccatggccgcgtgcctgcatgcatcgaggaa

SEQ ID NO: 35577 - DNA, 650 bp, Oryza sativa
ataaatttattttgagacggtggcagtactcgctccattccatattataagttgttttgggctttctatccctcgtgtggattaactataaatttagacacatatatgaagcacacacataaattaaattcatgcatgaatccattaaaaatccaaaacgtcttgtagtgtgaaacaaataaaaaaaagcattgaatactaaaacgataaatatgaccaaaattatactcccttcgacttattttaagtgcggttgtggaggttttatgtccaacgtttaactgccgtcccgtcttatttgaaaaaattaaaaagataagttatacataaaatactattaatgttttattatctaataataatattattattattaatcataaaaaaaatcaaataaggcggatcgtcaaacgttggatatagaaacccacaactacacttagaatgaacggggagtataatttacttatattataatgatataaatatatttagtaatagtgaattatgggccattttgacggtttcaagtcatgaacagtagtagtgacgttaggcaggagagggtgaggtgtgcaagaagccgggagagacagacacctcggcagccacacacgcggatgcgcccgggcccaccactcccaacgcgt

SEQ ID NO: 35578 - DNA, 2150 bp, Oryza sativa
tactatgcacctaagttgtatccatatgcttagatataagttgataaaattgaacacggcatattgtcaagttggtatacccacagggtaatttattctcattaaaaatttagcaatttaaaatgtcatataattgaacattttaatgttctcctttgtttggactggaaaaagtcaatttcctccctcttacattgctcgcctgtaaaatagataattagggccacagctcccaatgcaatggaataaatatagggcctatgtggtaggcaaaagttgaaccgatcaatagtgaactgaggctccgttttgacacgggatctcaagacctgatgtagatgaaaacactgtaaatgagatgaacagattgtttttatctgatttgacaagatggatttagtactagcttgttagtagggagatgagaaataaactcttactacttgttagtatttttttcctcttgttacaatgacataatttttatgaaatagataatcctgtagagattttggagaaaacttagcaagagattaaagctcttagaaaatttcctttgaggctatctctgttatccgatttttgtgtttttcctacggtccaatcaaacgatcatttctatgtttttcttgtgttttgaaatcatctgttttacacttctattcctgttagaatccagtcttttcctattcctacgtttttttttcattcttactattcaagggccccaagtatttatagttggtgagaaactgcaacagtagctgatgatttcataattttgtttgtctgattagattgagcccacctgtcgggattgtgctaatgttgtttaggcagcaagtacctcctactgtagtactccatccgtcccataatttaagagattttgaagggatttgatcctttacatccctccaaaataccttgggtgtgtttattaatgggaaatgggggtgggattgggattgagaaatgaatgaagggttgggattaaatggaagaggaaaaatgaatgggtaggatttaaagatgtcttttggtgcgtgggaattcatttccctatcccattagctaaaaaccgcccttatattttgggacggagggagtataatactacacttacaggagattttatatattgagtggattatgttagaacatgcccaattgataaaaaaaagttatctctaaaattttgtttttggaatttctaatttaattttaaggtgtaaataatttttatctccaacaaatatcttaaattaactcccaataataaaaagtggatacacccctaactatcgtacggtaacaaaaatcgctccacccattccatccccgcgtgtgatctctctcaacatgtctccctattcttttggcgtgtggaaattgggagcgagagtgtctcccgatttgcacagagcaagaaagaagaaagaaggagaaggggattccaattttcagatacatctctaaacatagtgttggagcaagtttttgacaaaagaaacctcaatttgaattgggtttcatttgttgatcattctcttacgagaatatagctaagtaggtggtgaccactactagacaatcgatttttcatgacgtttggaaaatatttttcatggcggccatgtgggaaaaccgccagcgcagaaaatcgtgggggtgggggtcaagggccgccagcggaaacacatcttcgctagcggtctacttaagaaggccgccagcgaagattggatatcttctctggcggctctcttaagctcatgccagtgaaggtattgtatctttgctggcggtaaggggatgcggcccgccagcgaagatgtaggtgtcttcgctagcggccctcttaacttaatgccagcgaagataccatatcttcgctggcggtgtggtgacgtggaccacaagcgaagatacctacatcttcgctggcggggtccttaaccctccgccacctcaaatcattttcaatggcggttcaaacgaaccgacatatgacgaccgccagggaaaatgcgctgaactatatgaaccaactacagtaacctcgagcaccattagaagcacgattttctctctcttaagaacacatacataggggggaaggttttgatcttgaatcttttgaaagattt

SEQ ID NO: 35579 - DNA, 1620 bp, Oryza sativa
aacacctaatacatttgtaacaatgtctccctttcttgacctatatcttccttttatcctagttgggacagttacttttatgtgtgtaccatccaatgcacctaggcaattctacaatccagaacaccacatcaataaaatatggtacaattaatagtgctgagatgtgattttttttaaaggaaatgtgatttattttttagaatgggttaccttgaaatatttccatctatcgtcggtggtgtcctcaggtataggttctggcttcttaagtagaagttgatgaagcctcagaacagcaagtaggcataaattgaaatgcctactcacagtctctccacttcggtaaaaaaactttcctattgttctattctttaaatggtgagatagtatatataagaatgaagctactgattcctccaacggcatatttcttgtatcctcaatacctccgacgtctctaagcatgtcacatagaatgtgaaatgtcctcctgtccattcggagctcgcttatacaagcaatatcactctcacgaataagctggaatagtctttcactcctaagttctctagttctgatcctcctctctattttccaacattttctcttatatgaaattaaaaacagtacaacaacatgataatacataagtatgacagcaatcatcatatttctaagccctaaatttcttctctgcgttttggtacttaagggaaggcgagccatagcactctacaaatatataaaacaaaagcattaaccatgtccagaatatatcctgctagcacgcataatacatcaagctaccactaaaataaacacagtacatattttttttattgctaaacctaagtgatttgctagaacacaatatcaagcatccattcagggatatttacatgtatctgttgttttacacaaaactttttttccaatcttacattgtggaaaatgatatatcacctggcagtaaaagaaatcaaaattctaaaaatctagatagtaaaaatgagttggtcaaacttccctacactcaaaaaaaatattcactaatattcaactttcctgcaatctgggaaaatatattctacataaccatgtgaacttatgaagaaaacatgtatgaggcaggatgaatacatgagattcactagtataagctacttcatgatttgttaatgaaaagattatcacaggatcatcactcatcagcattcacaatttataaagagaggtggtttcagtagggggagggttctcaccggcgaggtgattgatagatgacagcaacgacggaagtccgatgtggttgatggcaccagccccctgcttcacagcctcgcccttgttcccggagttcttccggtcaagatccacatcggaagacggcggtggtggaggagcgcaagacggcggcgtcggcgatgcgcggggggtgaggggacggcgccggcgacacgcgggacgatggggaggcgcggggacacgcgcggggcgagggggctgcgccggcgatgcgaacagggtgaggaggaggcgccggcgatgcgcacagggagagggggcagcgatggcgacgcgcgcgatgtggaggagaagctgcggcggcgctcgatc

SEQ ID NO: 35580 - DNA, 886 bp, Oryza sativa
gaaaaaagaagtttgtttccaacctcaaactatcacgaagttcgatttttaacttgcaactactccaagaccgtctaaaacttgacatagcatttcagtcaatcctaattagtgacctccctatgttttaaaaaaaatcgttagcatgcatgctattttaagtgcagccaggaaaaagaaaaggccaggtcagcatttgagcaaacaccatggcggtttcagggaaaaggggtctttttcaaccattttgaaggttcgacagtgaaagttgaagttttagtggtgcaggttattaaaaatccagcccatgccgtatgcagaattctgtaaaatggagaccttctccaattcctattcttttgtaatacctggaggctcagatgaaatgcttctccaatctatactttatatttagttggtacccactaataattattagaagctaaaactcaacatgcaaatatatcatatcaccacccactagcaattactattctaaacccttttaaatcccatacaaatatgacacattatataatattatataaagatgaacaaacaaatatatcaaattatctttctcacactatttttacaatatttaacatatactcatttataaatcctgcatcaaaacgcgagggatcacctggtattctagagtttcagaccatttggaacgcctctggttcgtccttatgcaccacccaatgtctgcattgggagcctcctcatttcagttctttgaaaaactgaagcttgaaacatatactcaagaagcaagcaagcacacactgtaatgtcatcagctccaaaatgagacacaaaggaatttaaatggaaacacgagaatacataatattacaatttagattgaacccacgta

SEQ ID NO: 35581 - DNA, 3846 bp, Oryza sativa
cctgcgcgacgccgccgccgacccagcgcgccgcgcccgcgcgaggctcgctggacagccgccgcgccgcccactgcccgcttgccatgcatggcaagggagcaatcaaaggaagaagaaaggaaagagaaaaaaaaaacaaggaagcagcaaacagctatggccgccggcgcagcctggccgcctcgccgccgcgcatggccgcctcggcgccggcaccgcctagaagccgcgcttggcagcctggacgctgcgcatggccgcctcgccgtcgtgctgccttgacgcctggccgccccgccgagcaggaaagattcccctgtgattttgcaaaaaggcccttgctgtttttggaaattaagcgcatgatcctctgcattggaatctttgcgtcttaaaccctgaactttctagaaagcacgcaaataaccctctgcatttgggatatttgtttcaatggcatcaagaatttgcaaatatcaccgaaatcatattctcgcataaaccccttgggcctgtttggtatagctccaactcttaaatataactccaggagttgagtctggagtggagttgtggagctgcctaaacccaactccacaactctagtacattttgtgagagagctccacccaactccactcctagttttggtggagctgaaactgtttggctgagctccagctccaggaggggtggagctggagctggagctgtgccaaacaggccctctgaatttttgacctcgacctcgcatttcaggtacctttattgctgatatatatgattatgaaatttaattatcgcatttacgattattgattatttgtgatgcttttattacttttaattaataccgttgtgataaaatgtatagaattgcatagaatatattggaattatttgcgggaatcttgtgaaccattatattgcaacagttgtgcatttttacctgaatctaattttgcgcatatatagaaaaatgacgtgcatcgcgaattagaaaatttgccgaatcttgaatatctctgatatatttattcaatgccgaaattacaatagagcaagacgctctatggtaccattaatccaatcacgctataggcattgactcgatgagtttgatctagcatttcaaactctcgccagtgcctccaagctactctcatgaatgagtacgctaaacgcatgagcgcgttagcatttagaggattatggtatataccttatctttcgtagagcaagaactataagcaagaatgggtatttttcgactatgattcaccaagcagatgacccagagagagtatggtaatatgatgcatcgcatttgcattgaataccgctgaaactcttaatgttctacccgaacgtgacgaaagttgcatgcaagtatcactagtacacatacaagaagtatgcctaactagttgataattgaattgcgtaatgttcaggatagtgttcactagaaaaaattgtcttccaaaaccaactagcacagttgatggcgagttcaacacgagtagctagcttggtgcacttacctcaacgaaagaggaggaaaatgggggagtagaacacaggtcaaggtgaaacaatctagaactatgaacattaaaggaaaaggacaatcctaatagcacgctcatcatgaattgagggggaaagctcctagcctatttgcatggctatggacgaagaatctcctatgctatatcggatcagccctaaaattgatgtcaggataataaataattgccatagctgtcgagcaagaagctcgctacgaagttaattgaatccgaagtaccggaatacctcgttgaatcaatatacttcgtcatcacttgttgcaattgtgaaatagaatattggattgaataaatgatctttgcccatgtagagcacacattttccccgcaataaagaattatttccagtataaaatagcatatttaaggcatttactattttgttgctctcttatagcacatagttacaatgctttgaattttgtgtaccacccaaacataaaagaaaaaaatgaattgtggtccgcgtaaccacaaataacactttaagagaaggaggtatttccagaccctatagaactggaaatattatgaccgttgctagcagcaacaactgaatttgtcggcttagaatgtaccacagtcatattacctgtggaacaattgtgcactttatagaagcatctattgtccgtcaaccccattgaactctctaaaaagtgtgatgatttgggctacaccctcttagcaatggattttcagccatttttggtcttagaattataggcataaatattacaactcgtatggtcatagcacatatatgcataattttcctaaatcatgaagatttgtgtgccagtatgcaccgacaggagatcaatgcataaaccgcatattgttctagcatccctaaactggattgcgaagaatatatgtggcttccatttggtactgtatggataaacgcgcttccgaagcagcaaacatcaagtgtctcttagacaccgtgtctgccaagactgatctagcaagatcatgtgaactccaatagaactcactaaatgatcttcagaagtccgcgaggacaatgcttgcattgcatttgatgattggtgaattggccgcacgaagtaccaaatatccgcataagcggactaagtataagctatgaattgcaatttttgctatatcattgttgtagtactcgcagtagaaaaggacatgtagtcctgaaagcagcagactctggaagcaaattcagaccatcggcatgaacatccatcctgcaactagtgctattgcatctgtttggtttatgtgcatatcccactatcataatacgttgcaaaaggctctctccgaaagtcggaaaccttttacggagatagttgtgaagcctaaattccttgacaaataagaattatttccaatcatttagggggaaagaatgtacccttagataggaaatgtcaggaaatgtgatagtccgggactaatgcatgttacaccacactagtgaatgcagtttgcataaagaattaaaactgccaaatcactttgtaaatacttttgtgatttcgaagattttgactaagttgcatgaacgaaatgcaccggaggagggtgataccaaagaaagtaaaggtacccctcgtcttatctagaggcctcgaacaaaaagaattggacaagaaactccggctcctcatgcccctaaagtaagcggagacgtctggtgaaatcagggcaagagggactatcatactcaaagtcacgaaaggtacctcaccgaatagaaggggagctagttgagatctggcaaacagtatggaacctcagaataggcgtaccgcaccttcccatgaaggaagaaaactagctgttggagtgcacattaacgctggtacatacccacatcaagaaatattaagcaaagaagaagaagcatatgaaaatgcatctccttgtatatgcatggatattcgcatacagtctcatgcaaccaatagaagttggcaatgagatcgattatgggcaatgtctcctttagacaacaaaactcaatggcagtcaaccaggagttgaataaatgaattagaagttgaaaagaagaactcaacctgaatattaacaagcattgaagatagaatcaatgaatgcatttcaggagtttggatcggacacttgcataatagtacatgaagaagtactaggtcccgaaccaacatagaaagaataaaccagaaaagaatcgaagaagcaaactcgttcgtgtgaatttgagtttaattttgaaatatttggctga

SEQ ID NO: 35582 - DNA, 2289 bp, Oryza sativa
tgatctcaacccctactacttatgaaactaaaagcagcatatgtcgcatatatgcaaatgagttacgtgagaagcaaactcactaagcgcatgaaccccaagctcttctatgcgcatgaattgcatagaagcagtgaactaagtcatgtggaagtcttatagatctgtccactaactcattattgacatcttctcttgaataggtgtgtccgagaaattggaataatgagacttagaggaatgcaaaattcagggggagaatttcgctaactcattctagaatcttgatatagaaattcaagtacccagaatcaatctagaaagattgaacgaagaattgggtgaattgtactctttttcccttggataagttttcccagcagtttcttatcaaggtttttaatgaggcaattcatgcgacgttgcaagcgtatgctatttactccttctctaaatttttcccactgggtttttgtgaagttttgatgaggcataggcatcacgcagtgagagccaaagggggagtgttaggaaaccgccggcccatgaaagcccggcccggttatccactaattgggcccatcactaaatatggaaagtactcatggctatgcctatatatagaggggaggaggtgctattgtattggacaagtgaatgaatgaaggaaaagagtcctacccctacatctctatgtctccaattcttgtagacattatgggaccctcttagactacttcgtgtagtaggagggttgcgtaatatgaacttgtgacgaaattgtaagaccaacgcgtgatagggatgacgcggccaccggcctcgcagggcagtgacacggttgccaggttgcgaggatctcgtggtcggcaaacgacatggcctcgacctcgctggttagccattaatcatcctgattagtgattaattaattactaatggtgttaattaaaaaataaccataattaattcatttctaatgatgctaattactctattaatcgtgcgagttctctagttagaaaatacatttgttgtaatgatcatgacaacgcaacttttgaaaaatagagagaatccattttatgccactaactttgttacaagtctatgatttgccgctgactttgtcatgttatacaatatgtcatcgacttttgcttaacttctacgatttaccatcgctgtccggttagcttccgttagcactgtaaattttgtccaaatgaccaaaatacccctaggacaaaaacttccaaaatttggataaaaaaatccaaaatatcatattataaacataagattgtaaacatccaaaatttggccaaaaacttaaaatatgatatttcataatttttatcaaaatttgccctaaattcctgaagcatctcatatgaggactcttcaaagagtagaaagacgcaatagtgagtctttcccgtctacgaatgtaagaaataagctcaaatgatgcaatgacgaaacatctacaaaattgtagcattgtagtttaggccacatttcgaaggggagaattgaacgattaagagatcttgttgttactattatagcaggatgatctctatgtgatacgtattaattaagaaatcatattgaactctacctttgtacatggttcttatagtccgtacctttctttatttaaaccagcaaaagagcccgtgcgttgcaacggaaagaaaaaaaagataaaattgaattaaaacatattaaattctaattaaatggaacacaaattttctgaactatttgagtattttttaagtaggtaggtataattccattccattatcttaaaaaaaaggcaggtatataattaaattaatttatgagtaaagtaagtgtgagaaataaaatgttatggttggatttattttttttattaaattttctatattaattacactctttgaaattttgttagaatttacatagcttaattgctaattttgataattagaaacatcatttcagcatttatttaaatggaaatcaaaataaaaatcattttatctctatgggccattttcagcccattttcttcttcagcccgcaagcgaccaaagttcaattattatccccatactcctctcacttttagcctgcaagcgaccaaagtttaattgttatccccatactcctctcacttgctgaactgccggcccacgtgtggctcaagtggtgcggcccatcgctcgatcgatttgagccgttcattttgatagacggctcagatctgttccaaattgatgaaaaccctaaccctaa

SEQ ID NO: 35583 - DNA, 555 bp, Oryza sativa
aatatctaggtctgtccccattctagaagctgggtcgtactcgttcgtttgacataagtatttggtaaacttatatctactgagacagtactagccacccggaaatcaaccaaatcttacgtactgtcccaatctaaattcattatatttttatgcagtctaactaggcagggctgagcaaaagttagcatatctggtttgctatatgtttaggttatgcattcaaaatcatgaatggctaatgcatagaatagaaatatagaatatagggtaattatgttcaaggggaggaataataacttgccttgctccaacgcaaataaatccgagataggcaacctgattatccgattctcgaaatatcacaggctgccatccaaaatagactctactaagaaagaggaagaaccaatttcaataaaatccataaaataacaagaaaacgataacaactaaaagggctagggtttagggtataacctatctcctttataaggtgtagggattactgggctaatatgtgtaggttctgaagggttggaggctagaggggat

SEQ ID NO: 35584 - DNA, 1277 bp, Oryza sativa
  unsure (1)..(1277): unsure at all n locations
ggctcctcatgcccataaagtaagcgnagacgtctggtgaaatcagggcaagaagggactatcatactcaaagtcacgaaaggtacctcccagaatagaagggagcctagttgagatctggcaaacagtatggaacctcagaataggcgtaccgcaccttcccatgaaggaagaaaactagctgttggagtgcacattaccgctggtacatacccacatcaagaaatattaagcaaagaagaagaagcatatgaaaatgcatctccttgtatatgcatggatattcgcatacagtctcatgcaaccaatagaagttggcaatgagatcgattatgggcaatgtctcctttagacaacaaaactcaatggcagtcaaccaggagttgaataaatgaattagaagttgaaaagaagaactcaacctgaatattaacaagcattgaagatagaatcaatgaatgcatttcaggagtttggatcggacacttgcataatagtacatgaagaagtactaggtcccgaaccaacatagaaagaataaaccagaaaagaatcgaagaagcaaactcgttcgtgtgaatttgagtttaattttgaaatatttggctgaacccaaatcatgctcacgcttgcagctaaaagcatgcgacagatggaagtctagtacatcagtccaaccgcacttagaaatgttcatggtgcatagctttggttagtcaattatcgccaaaatgggacggaattcccaaacacaagtgtgttatagcagcacacaaatacttggctaattgaactaaaccgaactaaacatcgttgaactgttcagagcctcggcatggttttgagggatggttacccgcgacagcaattgcgacttggaaactatctcaacccctactacttatgaaactaaaagcagcatatgtcgcatatatgcaaatgagttacgtgagaagcaaactcactaagcgcatgaaccccaagctcttctatgcgcatgaattgcatagaagcagtgaactaagtcatgtggaagtcttatagatctgtccactaactcattattgacatcttctcatgaataggtgtgtccgagaaattggaataatgagacttaggggaatgcaaaattcagggggagaatttcgctaactcattctagaatcttgatatagaaattcaagtacccagaatcaatctagaaagattgaacgaagaaatgggtgaattgtactctttttcccttggataagttttcccagcagtttcttatcaag

SEQ ID NO: 35585 - DNA, 724 bp, Oryza sativa
tccattaaataaatgctgaaataatgtttctattatcaaaatttgcaatttagctatgtaatttctacaaaattttcaaagagtgtatttattatagaaaatttattaaaaaaataaatccaacgcataacatttatttctcccactcacttaactcataaataaatttaattatatacctgccttttttttaagataatggaatggaattatacctacctacttaaaaaatactcaaatagttcaaaaaatttgtgttccatttaattagaatttaatatgttttaattcaattttatcttttttttctttccgttgcaacgcacgggctcttttgctggtttaaataaagaaaggtacggactataagaaccatgtacaaaggtagagttcaatatgatttcttaattaatacgtatcacatagagatcatcctgctataatagtaacaacaagatctcttaatcgttcaattcccccttcaaaatgtggcctaaactacaatgctacaattttgtagatgtttcgtcattgcatcatttgagcttatttcttacattcgtagacgggaaagactcactattgcgtctttctactctttgaagagtcctcatatgagatgcttcaggaatttagggcaaattttgataaaaattatgaaatatcatattttaagtttttggccaaattttgaatgtttacaatcttatgtttataatatgat

SEQ ID NO: 35586 - DNA, 1196 bp, Oryza sativa
atacattcgaccccctttgattcaaaggggcccatataagaaaaaaatcatatcccctttaaatcaaaggattttatataggaatttataggattaggatcctatagaaaattttcctatgtggctatttgattcaaaagagtaaaactttacaaatcctatgaaatttttatgagaatgggtcattgcatatagattttggagaaaacatacggatatgaagctttcctatgaaaaatttcctctgagtctatctctttcatccgattcctgtgttttttctgcgatccaatcaaacggacattcatgtgtttttcctatgttttacacttgcattcctgtttgaatcctatgtttttcctattcctccgttttttcaatcctgcgattcaaagtggtcctaatcaaaggaatgaatcctatggaatcctatgaaattcctatggaatgtctctttctttgtaagttttgaagaaaatttaacatgaggtagaatctcatggaaagaatcttttgagtctttatctctactcaaatttctaagtttttttctgcgacccaatcaaacggtcatccctatatttttcttatgttttggatttctctgtttcacacttgtattcatatcagaattctatggttttcatattcctcctttttttattcctgtgattcaaaggtgcccttactataaacctggactgaggtttgacttgattcatagcactgagatatatcatatccgatactaagttagtttttatgggacagatggagcaaatatatagctcggcattcacgagatagatagcgacgacatccttcggggacacttatcaccgacaataggcataacatccttgaacatggatgaccagttctacacgtgtcttcattatattgggggagcttgaaggcttccactaaacaaataagcaacttcacctcaaaagaggctacaggcgtattcagtcattttaaaccataatattgtttgataaaattgataaatgttaacatttagtttgttattaaatatttgtcatgcctagagaattgataacatcatagttagcctatcctattaaaacttggtaatgttacgaacttaccaaaattttggcaatcccaaattttggaaatgctgaaaatagctataaagggaacaagtcctacatttcccaacatgtcacgtt

SEQ ID NO: 35587 - DNA, 615 bp, Oryza sativa
caattcgtgcgcgtctctcatgaaccgctaaaaagggagaaaaaaaaagatcagccaacatagtactactacccaagtagaataaacttttcatttttctcaacaaaaagataagtcattttgtgcggagaaattatgtgcgagtagtaaaagatacggcgcgatttgtgcatgaacacgggttatactgtcgtggaggccacacggcctgactcttcacatggccacgtccacatcctctgctcgtgatggccagtcgtcttctttctcgcaagtgttgtggtctcactctgacctgttcttcactcgtctttgattacttctgattatatttttttatttggtctaacacgaactgttagcaatagagtatacgtgatggtaggcgaattgtgttcttgtagatgatgatgattaggattccttaggctgctcgatgtgatgcgcaatcaatagtcaagagttctcgtgatatagttctctcttctcgttaatttggctttgccagttgggcttttctattgtttgtgccgaaactgatccctgaggtttacattacttaattcttttttgttgttgaaatggagtgtagcgtgctaaaaaggcagtacggag

SEQ ID NO: 35588 - DNA, 815 bp, Oryza sativa
cgacccgattgcaccctcaagcaaagtccgaatgatcaccttgatatatatgtaaaaatatgattttaatttttttccgttgactgaaattgaagacagtaacaaaaatttctcgttagtttaggatgaagtggtagataaccattgagccagtctgaatcatggtagggaataaacatggtttctctcctaaacgttacttgattacaatactctcgagtaattttttttgagagtagatgaaaaaacatcaccaagctgtcatcagcctagtcatgttcttcaaagatataactaagaaactacaagtgtaggttgatatgagaagcaagagcaaccaccactatccttctaagggacgcagctatctcagaaacgcatgaggttttcaagagctcagggaatggggatctgactgtcagattaatagcaggtatgtcaacataaatcagctttaaaactgaactttaccgaatttgtaaattagatgtaaactcattttgcttgaatttctaaaaagtatctttttcctatgtatcattgcttcattttcatatgcagtgatgagcccaaggaaaacgccaaaaaggtaatttcttatttgaagctaaaatttcttatttcaattgcagaatcgtttgaatatttcttttaccgagattccaggccctcttctcacataaaaaatccaattcctgtctaccactgaatttgataggtctggcattcaagtgtagcacttatgacaatcctttatatttcagggtatactgcataaaaaaatattgaaaaatatatactaagctatacctggg

SEQ ID NO: 35589 - DNA, 711 bp, Oryza sativa
tggatccccccgggttgtcaggcagaccggcagaacgagaacgtgcgggaacgggggcacgccgcgccacgccacgcgacgggtcgagaggccgaggacgacgacgggttccaacttccaattcccagctagaacgagagcttgcttagccgacccgagacggcgatgcggcttgccgatggtttggtttaccgctttgccccggttcttcgctttcccgttttccaccccctcccctcctctttcggtcgagcatatctcctccccgcggggtgggctacttggctacttgcccgggtcccgtgtcctaaaaacacaacatatcttacggggaaaaagaccgttccacccacacgtctccacacgcttagggcctcaccttttcgtttatacttatacttaaaatttaaatttttaatattaaatttaaaactgattttaagtctttttattaaaatttatctttcatcttttatttttagatcgttaagaatacatatataaaaattttatttataaattatttttcgtttgtaaatatgtcatttcgtttattcatgaaataagcggaacgatagctccactgtactactcatccagtacacggtcacaggagccagtgagccacggctacccatctggatccagctcctccactcccagcgccgaactgtggccggcagcgagccatgagtggcggcatgtcacgtt

SEQ ID NO: 35590 - DNA, 726 bp, Oryza sativa
tcatccctgacgggcttttagctatgcccgaaagagataactcatccgtgacgggctatagagtcaagcctgttagagattagtcatccgtgacgggcttttagaatacacccgatagagataagtcatccgaaccgggactagtttgactcaacacgtagggtcaaacctatcggtgacgagctctggctaaatgcccgatggagatgactacttatccgtgacgggcttagtggtgtgcccgattgagattagttatccatgacgggttcctaactatggtggtttgactggtcatactcatctatgacgggcttggttgtcagcccgattgagatagcatccatccgtgacgggctttagcccgattgagatattttctcacatcagtgacctgtgcccactgacgggggccttacccgatagtgatgaggctttcagcccgttagagataagcgatcccgttctagtgaggttggatttccttacgtttccctcgtttgaacttacaaatgtacaacccaactcgtatgcaatatataaacttgaaatacaaaagttgtctcgttcagttttttgttccatttataatttgctgtctttgtgagttcacacatatatgtttatacttaaacattgttatccttttatgcttataatacttggggtttccgttagcccgtagtaccaaatgcctagtggcactactacaaaaaaagctcatag

SEQ ID NO: 35591 - DNA, 673 bp, Oryza sativa
cgctgcgatgtttttggcagcacaccaacttgatgtgtcgtccattttggagtttcacgtgtgtgttgaattcgaccaggagagctgatttaatacaacttggaagagatcgagctttccgcggttcaagttgcgccgatatgttagcgttggagaaggatgcatagaatgcatacaaaatcttgtaaaatcgagaaacttggaggaatggatgctatttttttcaattgagaatgttccattggaatcaaatccatgtctaatttcctgcaaaacacactaccaattttcatccaagtgcacaaactgggatcgctggggtagaaaatgtttaagcagactatccgtatccctgtctccatggctgtatgcttgagctttggaagccctactaaacccatgatgcatccacatggaaaaaccagcccttatatatctgaataagaatcatgtctgaactctgacgagaggatcgatgatgaaaaaagaagtacataagtaaccacgtacgcgaaaatttaattcatgattcagccatgtctctgtggaaggcaacaactagctagctagctgcactctcagtccaagggcttgggcccaaccacctccatcgtcgcacaaataatccatggctgcctgacacagtgagcccagggccctagcacaaaggggg

SEQ ID NO: 35592 - DNA, 993 bp, Oryza sativa
  unsure (1)..(993): unsure at all n locations
caaaattcnccatgcattttgtattctgtgatggtttgaaaccctcggaactacatttaatctgcggccaatctatcaattcttcaagttgaactaatttcaaaccctaaacctaattaagttccttattatcaaagaattacagaatacaaatgcatggagaattttggtgtctaggtcggttctgtccatggactacactgaccaatccaccaaaattccccatgcattttgtattctgtgatggtttgataacctcggaactacattaaatctgtggccaatctatcaattcttccatttgaactaaatttcaaaccctaaacctaattaagttccttaattatcaaagaatgatagaatacaaaatgcatggagaattttggtgtctaggtcggttccgtccatggactacactgaccaatccaccaaaattccctatgcattttgtattctgtaatggtttgataacctcggaactacattaaatctgtggccaatctatcaattcatccatttgaactaaatttcaaaccctaaaccatatatatagccatacatcatttcattgcaaaaccatatatatagccatacatcactggatttcagaatttaaatcacacttgcagcaatgtgaatttatatggaaaaaagagcacgattatatatatgcagttttagtgcatcagtcaaacaaaacagctaataaaatatatacaaattcatccatccatcattgtcacgcattataatacattaaaattcatcgatacgtccaacatgatatacatatataatgaattagcatataacacttttccctacaccttcatttctcatgtatggcttcggtgattcaccaattgattcttcgacgcgtaatatcttgtttcgaaaatctgtgaatagtgtcatgttctcgtattgattgtatgcctcgacatcttcgacatcatcaacttccaaaatcctttgttttcccgaaataactat

SEQ ID NO: 35593 - DNA, 711 bp, Oryza sativa
atcatccacagtatcttcaattccatgtgccagcattcttatctcttccacccagatttcatacgtctcattattgcgattgcgtacatccattcgagaaaggaattgatgtatcagcctgagctccctctgatgcggcccatgcttccttgaagctctgttatctgcgaaacaaactttttgaattttgaagtagcttggttgattgcttcatttcccaaggcaacacaaatcttcttcacagctaaaagaatcacggcttcagccattaatttctctgcacaaaactttggggacagccagattccgccccaggtatagcttgagtatataatttttcaaatatttttttatgcagtataacctgaaatataaaggattgtcataagtgctacacttgaatgccagacctatcaaattcagtggtagacaggaattggattttttatgtgagaagagggcctggaatctcggtaaaagaaatattcaaacgattctgcaattgaaataagaaattttagcttcaaataagaaattacctttttggcgttttccttgggctcatcactgcatatgaaaatgaagcaatgatacataggaaaaagatactttttagaaattcaagcaaaatgagtttacatctaatttacaaattcggtaaagttcagttttaaagctgatttatgttgacatacctgctattaatctgac

SEQ ID NO: 35594 - DNA, 693 bp, Oryza sativa
gctcacgtcaaggattcaacacgcgaacgaaagaattaatgtttccattttcaaaacttgcacgaacgacgacgaaaccatatgcttgtatatacagctgaaacgcagtagctagtggcgtctggactttaatttgatcaaccgaaagaccaagactagtagtactattacgcacgagagagaactaacacaacacattatattaattaatccaatcgtatatatgcaacggccggttcgtcgtcgtctccgttgggtttatttgatttcaattcgtccgagaccgatcgatcgagccgctcccacggtacgtggtccggtcggtcgtccggtccaggttgagttttcactcctggtctggtccgtacgtgcgtgcgcatgtacgcgtttggtatgtcgcttttgaacactgtactagtgctatatatatatcctgcacgtgcctgatatatacatgggtcgcgcgcattaatgaacccgacgacacgcgcgcgcatcatctgtgacgtacgtgttcgtgtgaatagctcgctgttcgtggccaaggcgccaacaaccacacgtacgtcgacgtcggtcggcttaattcccaccagcagccgatcgtgcagtgcagagacgtacagcgcagtgtgacagtcgtagctagtagagaaggagaagaaaactggaaacggccgagcgagcgaggcg

SEQ ID NO: 35595 - DNA, 594 bp, Oryza sativa
gtcaccagtgttcacatacatgacctgctatgatcattcacacgtaattaacttttaaaaaatgaaatgaaaaaggatgtgtttgtatgttaaaataacgaatagttctcttttacgaaaaggttgcattaccaaaacatataaatatcatgtggagcccagcttgtcggttacaattaactaaaaggaaaaatataagccgctacagatcagagcatacaatcatacacatctgacccatatgggtaagatttggataaaatgtatgggccatttaatgtagacctgctatgtgccttaacaatttaatcctatctggatgaatgcagggcagaggaagctgtaatagggaaatcaagaaagcaatttagggaagaagaagccattcaatttcagctggtctgtttcatgtccatgtgaaggttcattacaatttcagcccattaatcaagcgcattactctggtaaaacataccatgcccactcatataatgtttgctctcagcattacatacactagcagttcgcctcctatcacgctgccagtgaggctgtgagttttagccacaagttccattgtgctttgagttctta

SEQ ID NO: 35596 - DNA, 10292 bp, Oryza sativa
  unsure (1)..(10292): unsure at all n locations
tgagggagtcatccatagttggacatcacgaccaccatccgttcctatcattgcctgcttatataactataggctttgatgacctcttcgaccttttcaggatccggaagttagacactggtcttctaaaatgctactccttgtaagtgcataccttctatacttgtgatatgattggactatatctcctaattaaattagttctaatacgtaaatgttttaaggttttgttggatcgagagtcgtcgccttggtaatcaggttgggttccttgatccatccatggtgaacgaggttaatttacgacagagcttcactgaggtagttgactatgtcaagcagtgtttatgggcccatcaagacaaggagtacatcatgtgcgcacacaaccaagagtaagaggacaataccctttgtgtatattatttttgaagttaaggttattagtactaacgctacgtagccactacgcaggcgacattggattctcctagtcatcgtacctaagtggagtagggttacctaccttaactccaataagtccaaagattatgatttcactgaaatcaccaaggccttaaatatggcttggggcccatatgtggaaaagggtggtaggcacaaggagggcaaggacgaactttaccatgacaccaagttcgcatgcgcacaacagatcggagaccaatgtggtttccacatgtgccacaacatgtcaacacttctaagagaggtgaaagatttcgaccctgaggttgttgctaatggcgaataagctcatttcaataccaacattgctattcaaaacgtgctaacatcttatttattaaacagaaaggtagagctggcttcaagatctcacccatcaacccccccgctatcagaggcgaagtgtgcgccttcattctggcagaaataatgaacaagaaaggacgttttcacgtcaaatagactcatgaacttggctagataatttattgtgatgtaaaaaagatgttttcataatttcttgtgatgtaaacaaatatgtttttatggagtgcaatgtaatttactttcatatgtgcaatatttatggtagtttactaaattgtcatcaaatttgatcaactatgatttacgttgtactattcatatgttttctcctttttttccttattgacatgctgtggaggtcgaggacaatatggctttaatccatttggtaagtatatatgcggttatatgagcaacgactaaaattgtggctttcaaggggtgtgaatttgctgtgcaaaattgtggcatttgaactgcatatgtgaatgatgtcaatttttgatatggatctgtgttgttggggatctgtgatgtttgagatggatctgtgattttatattggggggtgactggaatatatctgtgatttatctgtgtttcagagggcatgactagcaaatcctgaggctagccaatatttagcatttatttttttttttggaattaactcatcagtgacgggtcggaacaaaaatccgtcaaaggtaacatcatctgtgacggactagcaaataaaggcccgtcagaggtgacctacctgtgacgggcctttacttttggggccgtcataggtagatcacctgtgacagcttctaactacggagaccatcacctttgacggcctttatttaaagggccgtcagagatgtgtcacctgtgacgggtcccaactcgccttaggctagcggagaccaacacctctgacggccttctagtaacttgcctgtcagagttgggtgtcacctgtgacggccggccacccgtcaaaggtaactggactcaccagtgaccactgatcactgaccatgcatgaagccgtcaaagatcagggtttgggcccgtcacaggtgacaatggccagtgtagtcgaatctaagtttccataatccataaataataaaaaaaagattacgcatcatagaattatcgatcgaggatatgcttacttagatttcccatccctgcctccgagtgggatatttatcaccgtgcgtggcgtggagactggagactcgatccatccccgttggatcatcactacaggcggcgcgcgccgcctgtacacagctagcttaaattttaagggcacacacaatatgattccccgcaaaaaaaaaaacctgcatatgattaatgaaaatcattgctcattgatagtatttgtagcaaaagttatcagacacctaaactaccncagttgctagtaattatagttacagcacaatcattttttttgacataattacaacaaaagttcctaatgacaattaacccatacgaaagagcactacaacactgaagataatccacattcattcaaagccacaccaccgttggttttcggatgaccaaagggttttgcactagttgacctactttgcatatcaaatacgatgaaaaggtatagctgcactttaaactgttaaaacatctatattttcattgaagggctaggcatttgtcatgctatggttaaatttgcttccaggaaatcttaaaacagaaaaccaaaacaaatgtttcaagcattcaatggaatcaccctctgcctctcgtcctccaccaattaccttttctacaccaaaagctcaactaaatttcagtacaaactatgggtataatataatgcactcggtaccatggggcctacataggaagagcaaacaatcagtattatagccatttcatctctaataggacatgacagtaaaataaacctggaaacaagcacatgacggattttatccttactatattaattttcaaaagatatatttgtggcacgggatataattttttattttgtcatgatacataggaggaaatctggtagggttaaatttcttcgtgattcttttttaagtgtcactaaacatggatattatcttaaaatcaatttaatacattaataatgcattcagtacacgtaacggaagaaaggtctaaaagcctaagcttatttcaactattaaatttgagtcatatcttagtatgattcaataacagagaaacaacgaaactatagtgaaagtatacaaatcatcaaccttcaccaagaccactttaggaaatcagaaatacaatactacggatggacatccattagtgccaaggtgggctcgatttctgtttataagaatcaagcttggccgagattgctgaactgacaattacgacacttacccaatcctcttgaaaataatatcttgtctccttttgatcatagatcaaactgtggagaacaaaaatgttggttccaatcctcttgaaaataatatcttgtctccttgtgatcatagatcaaatcgtggagaacaaaaatgttggtttctgctttcttcagattctgcagttaatgaccataaaaattaatgtgtatgataatgatctggtcagacattgcacaactgacaccaaatattacaaatcaatagcagcgcctccttaccatttcttataaagatagtctagggaatctaataaaaaagaagcctgctgaaagagaaagtcgtaagaaacaagctccaaacatcagaagactgattttccaatagacataattagtgtccccttcggatgtgtttcctgttttttgtacactttaaatgaagatgcaatggacataaaaataaagagcttatcattatcaccttagtagtaacatcaactggaactaaagatcaaaaagttctcttcagctttttaaccggaactaaaaaataatctttagtttcaatttttattcgaaccagaactagtgtagtttttggtgacccaacaaagatcagtctccggcagtggatctgaacggtagaagcataatggatcctcaccaggcaccgactgccgtagtgtcaccggccacagtgctttgatcagctgaagttctaattgacttcttgattgaacgttccatctataatctgttctttttcccctaaactactacgtcaatacgaattacccccataatctgcaaaaccagacattcgacatctttattggtatttcttacgtttacagataaatctacaagtgcactgataccgatatagcacttcactcatgaatattcttaagggtatcatatttatatttcacagggaagacagtgtcgtaaagataattatacatcattaatcaatctgtaattaatccaccataatttaaaaggggtaagataatataattaagatagtagactcacatgagattcacctctgtattaatgtttagtagaaaaaatattagggaattatgatacaactgtatttttatactaataatgtttaatatataactagtacatgcttacgatataggactaagttccaacacccaggttatttgtgcttctatactgaggaatggcctttagacaaaccgatgggctctgcggtggttttcgagtcactagagccgttttcatcctagtcgcgacgtgtgttatgtgtatccagctgtgtactgtgcgcggtggccacggccacacgcctcagcccaactgggtactggtaacggctagtccgccgcgccacgaaacctccaaaccctcgcctcctctcctctctactttcttgcaaccatccatcctcgccgtctccaattccctcgtctcctccgcccgatggcctcccacatccacgccgcggcggcgggggacctccccctcaccgggatgcacgacctccgcctgcgcccgcggcttctccgccgggtgctcgccgagtgcctcccgctcccggatccggccgcggacctccagcccacgcgcagccccgccgacctcgcccgcgcgctctccgccgtccgagagcagggactcctcgccgtcgagggcgcggcggacccggggctgctcgaggagtggagcgccgccgtggacgcctgggtcgaccgcctcgtcgcgctcctcgcgagcgacagggtatgtctccgcgtctctgcctatcccctaggtttccttcctatacctgcgagtgcgatccgatcacgtctcccgtttttgtttcgtcaagtattggtgaatcattatgtctttgttgggggcggaattcaccctattttgagattttcttttatgctggatgaccagtgccaagttccgaatttttcctttggtagtttggtttgatattagtacgacgtgaccaatgttagatgctcatcctctcttgaggacgtctttcatactaggcaactgtgaccattaatcaggcaagttgcaaatcaagaaaggaagcacaattgttgactctgcaacctcaactgcacatagaacgcactgtacttcatcatctcttctgtttatcagcatcactgagttcttggaagttcagtctctggtgcactggggccaaggcccaagagtatatttatatggcatattcgcattcactgtcaatttaatatcttagatcatgtgattatgagacaagccgtccacaactctgcataagaggtttatttgagttaggtcccttttgaaatggagatttgtatatgttttacatgagcagttgaatgatcaaatcccttagggaccaaggacagttctcgcattttaaacaggtctaacaggtgttgatgactgtcacccgattatagaccaagacgctatcacatatatagttgactagctaaagctaatgacagtagccgatgaatatgtacatgactaaaacataatgatatcaacagttcaacactccagcactgcaatttacacaaaatttcaccaattttatagggtatgaagatgaaattgcatttgtctgttgattgtttgaacatttgtcttagtgaaaatttcaaccattttaaccctcaatacttgttatcacctcttagataatatatggattatctatagaaaactgattcatttttctagcaattatttctgctcgaaaatataacttaatactgttattatgtgcttgggagattgagaaattaaggcaggtagaggagaggacctccctggttgccagcactggaaagcctcaacagcacagaggactgagtcacgagcgcatggcaaaatgagggacagagagagatagattgaacttgcttgatttctcaatagatttggccgccattatatgataggttccccctaatagatgaggattcaaatctttgactccgaatcgatgacaactctgactcacactcttcttgatatccttctcatgtgcctaggatcatgactccccaattgggccactagctatactagagctcaacgacatcatctctccctgcagagacatcttgtagtcgagctgaaatgagggattgctgtagatcatcctttttgtctaatacagagaactccagtttgtgatattgaggaccctagtgccttccttgtcatcttgcgtgcatgctggagttgtagcagtgctatttcaatcatgacaccaagatactgttggcatcaccataaaccttcatcttctcgatgtgtttgaaatgtgctttatgcctatccaggtgcatgttgattgtgaagagctgagtgttctccgtatcaagctgcttagtcttttcttcaagcttcatggtgttcttcagcatggtgccctggattccaggtgtgatggatcttgacactgataacattctgttgtgtgctggggcaatgagagcaaatagaagagggatctccctggttgctgacaacatattattaggattcaagttgcttctagcatcccctggatcaggattctatctttgattgtgaagtccgtgacttgacaacaatgatgactggaccatgattcttggagttgacttgactaggacttttgtagatgaaaactactcccactcagactctcttgcgatccttctcgtgtccccagcactgcgacatatgttgccttgccccacgctagactgctctgtcctgtgcccggagcatgattccctatcttagctatgggctgtactgtattccaaccataacaaaccttctgctggtatcttcttttgttttgctatgtgataatatgataactcaacaaattaacagtactataactgcacttttactaatatactaccctattcaaattttggtcaggaacacagttgttgggtgggcacttcttttcttggtttgacatttgaagagtgcagtgaggaccgctttgcaaactcatactctttctggtttgagaagattatgaaaaaaattaaggtaacatacatattttaatgcagttttaaatacatgtattcacattttgtaggtttcatgcattatatttctcataattctgttgtgaactatatgtttttttttttcacttttttgcagttctaatggaaaagaaagtttgacatttaagttactatatgtgtgatcagatgatagtgaattttgctgttataaatatttagatattttaagaatgtgcagaagaaatgaggaatcctcagtacaactcatgcagacaatgttgttctaaatatgatttagcacactagacattctattgaacaatctattttggtcttagtaatcgttgatcaataaaattctgaacagtgaatgcaaatgaagaagttgggttctggttcaactctatccttatttctttttgctcctagatccagaacattttagtttgcacaccttgttagaaggcaggaaaaaacagtccaaacttcaaatgcttttggaatgctcaaaaacaaactataagtgaaggtcaatctgaatttttttaataggagggtctatctgaattaatgtaggcaaaaagaacttttatgtattaggattcttatgttcctgtttagttattttcctgaaatctaggaagtaattgatcagctcttataatgatccacagagttgtttctggtcttcctgtaatataaaattacaatattgttctatttcaagctgtatgtgggactgagattctgtctactttttaaaactacattacctttattttcaattcatattactgatacatgacatgccaaataattataaatcaagtcattacagtctgtgactgagtgactctctacataaggtgcttcagaacataactgcttcaaacagttgtatccatttcaattcccttttattgttactaatcaaattaacatataatttgttccaacacatgccaatctacaaacagaagaatggtatcatctaaattattctgtttatgttccaaatttgattatttatgttgtattagtatataatatggattgtctcatgcatggcatggctattgtttcttggaatataaactgatagattctctataatactttgagcaggtcccatctagcaacaaaatggtaagcatagccacttgtactgctatggctagtctgtttatgaggtatgtgacatgtatggctaactgaatttttttgactatcctattggggagtgcatttatgatcatttaatagtaaagcataaaggaatacaaatgggttgcaatgtttcaacagtgagtcaacatctatcacgtgtggttttcatgaacacatcagctatatagagctgcaaaaattgtacaagtaaaataaaaagaatgcataggacatggtaataaaatgcaaattccttcaaagagaaaatatatacgaagatgaggttaaaccttgaaattaagcacttttagtggcattctaacgtcatttcattatggatgtaaaatattacaactccttactatctttgtttgtaaaatttgtagtcttttgaactacaagtttaaatgtgcagtttggtagtttgttataacctatacaggttgtaacttatacttgcccaaagtattattatatatagcatataaaggcccatattcagcaggtgtaccagtggcaaatctagtacaaaagttaccgagggtcctatacgtactaatgatctaaccattgactaatatgataattagcatggcataagtcaactagaggagaacaatctaccgatggtcctgtgttgtgcacatgggaagatatacataggtatgcccctgaggcgtactgcttgtgtctgagaatgcatgattaaggtccgtactagatgatcaaaacttggagttctatgttatttctgtgttcatgacagtaaagttccttagttgtttcacttaagtcaaactgactaattaagtcaaaagaaaaatagtgcgattgatcatgcagtcaccaaactgggttgccactgaattttattgagttcaacaatctcaataaaattctttaacaaggggagaattctagtggagggcatcaatggaaaaagcaatgtgcaccactcctaaaaagctagcattattgctcatttgttgcaatttcatagtataagaatgcttagcataaaagcaaggcaacccatattttttttaacagattggcgaagttttcaaatttaaaggacgaggcaacattgttagcccaaaaagttgtccaaccattgctgcggctgttggacaaggatggttctgttgcggtataagcttctttacacttcaagcaagatgatttcctaaatacaaacttctccactaagaaaatatattgttgtttatgtgtgcaggagaaagcaactgacttacttggtttaattatgaaactcttcccatcatcagtatatcggcgtcttcaacaaagtatgagatactttatttgtaatctcctttgttgtttgtgaatttctttgtttgtaccagccacatcataaaagtatagtgaatttctttctggttattgttttacattttgattgtccagtgccattaaaatggagtgattagacaaaattagatgtatgctaacttgtacgggtgtctgtggcttttgatcgttcatattactcctttgcctgattttcatcatgaatattcataaccttcttgttcctttagacaggttgattgagcatttcctatataatactccctctgtttctaaatgtttgatgccgttgacttttttaaatatgtttgaccgttcgtcttattcaaaaaatttaagtaattattaattcttttcctatcatttgattcattgttaaatttacttatatgtatacatatagttttacatatttcacaaaagtttttgaataagacgaacggtcaaacatgtgctaaaaagtcaacggtgccaaatatttagaaaaggagggagtatacagaaagtcacactgattgaaagtttgacaccaagaaattgctgttatttcttga

SEQ ID NO: 35597 - DNA, 566 bp, Oryza sativa
aatttaaaattagctgaaattcgaaattaaaaataagcaatattgaaagaagaatctatataaaaacccaatacgagattaattaaaacttagaataaaaaaataatatccaaaattagaaaaattaaaagagagttcaaatagggatacaattttgaaacaactgaaattgaaaataaaaaataaaaacactaaaagaacacaatatggtactaacttatttttttaaaaaaaatctgaaattacaaaaagaaaataagatttgaattaggaatacaatttataaataactaaatttttttataaaaataaaatttattgaaagaaaagaccatctaaaacactgacgagataaattaacatgcctgtaaaggagtagagtggtggcggttgatacgacatataaaaattgttaataaaacatcaaatagaatcctaatgacgattaaatttttgataaaaataaaatttattgaaagaaaagaccatctaaaacactgacgaaataaataaagtaacatgcctataaaggagtagaggaagagtggggaaaaggtaggggaggg

SEQ ID NO: 35598 - DNA, 745 bp, Oryza sativa
tatgggtatatatattgggagaggtcttgagaggttggttgatgtatccgcatatagttaatacaataaagctgtgatgcccctccctatccgtgttcatctactatatgattgtgtgcatgagattgtcgtcttctactccggatcaacgaatagaccactagttatttaacaattatgtcatcttcgcaaacttttggagaagataatttgttttgaaacgagaactacgacgagccgaacatcatcctctgcctccatcaaaccctgcctcacatgagcacccaccagtgcctatagcaggttggcacgaggagctgatctgagctcccatctgaacctgacagcgagacgggcatcgaagctgttgcagaattctgaaggatcaacaacaagcaagcgcatgctgcacgcatgcatgtttcttctcgatgtaaggccgcgccgcctcccttgtccctggcgatggcgattccggcttttctcctgttcaccgctgttggggcgcctgcgctgacggcgaccgcctagcgcgcgcgcagccgcagcctcgatcttcttgtggtctttgatgcagcaacaagaagctacggcactctcctctgcgtgacgccacagtacgtttcgttggaaacgatcggaacggaacggtgccgtgtgcgggagaaacggttaggatgacagcagcaacagccaggcgccagcgagcgagcgagcgagcctactgatgtggacgataaacacc

SEQ ID NO: 35599 - DNA, 570 bp, Oryza sativa
ctgctcacaacgagccacaagagaaggacgctcacgaggtagtaggaggctgagaggatgtggaggggatgtcctgaggcacagaacaacgcttgggtaagcgcaggggagagagatgtatgtggctcctcacatacaaactgaatctgagagacgtgctcaatcatccgcatcaggtgaggagcatatggaagccccctcctgtactgaagagatgccatgaccgcatcttgaggcggactctgactcccaaggatggtgatgcaaacaacatcaaccattactcccgctccgtactcctcaggttcaatcctccctgtcgtcccttttcatgtatttcaatttgtttgggaggaaatccgcatggcatctcttcagtacaggagggggcttccatatgctcctcacctgatgcggatgattgagctcgtctctcagattcagtttgtatgtgaggagccccatacatctctctccctgcgcttacctttgcgttgttctgtgcctcaggacttcccctccacatccttttcgcctcctactacctcgtgagcgtctctctcttttgcc

SEQ ID NO: 35600 - DNA, 569 bp, Oryza sativa
acatactatgaaggtgtaagaatttatatatcttgaagatatacttattgatggtatttggcaatcttattaattcacctaatgccaaaatatagaccggtttatgtcactctaagtggtttaagctaattgttgaagattagtgaaacaatcaaattggtaatgattgataaatccactaagagaaagttgcataatatttaacctcttgtattgagctaattattttatacataccgcatatgtgtatcgttgcaatttattttcccatagtcctccgtaaggataaaactttgtttgtattgcacatttgaataagtggttatacatattgctcctatacgttgatttatttctcatgttcatagtagaacttacgaaataagtaaacgaaagattaaacattttggtaattttattatcattgttttacacattaataaaaatgtggttatgacattggaacatagaagtttcaacggatgtcttattgagggggagcatatatgctaaacattgattatcatagttaagacttggaagtcttatatttgatttaccaagaatta

SEQ ID NO: 35601 - DNA, 8195 bp, Oryza sativa
  unsure (1)..(8195): unsure at all n locations
aaataatcgtgtgagccaaaacacggcaagtataatgcagtttaaaatcaaaatcaacaagatttgtaacgccacaaaatcatgtatagcgcagataaaagcctgaattgaaatggacaattatatacccaatttggaggggcttctacaaatgcaagtaaacaacatacggacgccaaataagtcaaactgaaaatgctggtgagtactgttttttaataatttgaacaacctaatcgatgagtttgaaaagaaaaagggacagtcctgccaataacatgatttccatcatcacaaaatatttgttcagtgcattatagaataaaataggataggtggctaacgccaaactgaaaaatgctggtgtttagttgtgttctgctgctcttttatataatatgagcaacctaatcaaataagttaaaaagaaaaaaaaggactgtcctgccaattctatgatttccatcacaatctacggaaagatgatgtttgtttcttttgtgattgggagttggaatagaagtttgttagtgatgttgaatacatgttagaacaaaattagtaacctgcaaattgagctaaacatgctgacaaatcttatttgcagtagtggagtgctgagaaacagaaaagagcagacatgttcaagttggtcatctcatattgcacatcagaattgctagacaggtagtagagcaggacagactgataagagaaatactgtgatacatttcatacttatcctaaagacagatacggtgcatgcacaaaatgcaactgagtatctttggctgactttggcttttattacaattattacattgcatggttgttcaacgtatgacagatagatgaataaagattattgaaactatatggaagacatatatagtggttcaacctgtttcagatagatggatgaagactaaacatacaaagcaatacatatatatggaaatggttggtgagtacaaatgctatacaatgtacagttacttgttgctaataatggaaatatggagagtactaaatctagattaatatcattgattgaataaattttacttttgctaataataggaacagggagagtaattaataccttgattgaaaattttttgtttggccggataaacataacaagaccatatagacacctccatccaaatcaaatcatatccgagggattaccaagaacagtcaaaactgagcatatataattatatatgaatatacaccaaacaattatatctaaatcgtgagtttctcatggattatcacgaataaacatattatcagggaatatctcatggatcaccgcgaacaaacgcattatcatggaagatctcacggatcaccacgaataaacacacaatcaggtaaaatctcatggatcaccatgaacaaaaaaaacatcatcaggtaaaatcaaagcacacatctcttgggttaccacgaactacacacacatcaggtgacgatggacgagcaatcaccacgaattatcaatcgtctcagcaaacgatcaaaatagttatagggttttagagagggtcaagaacctagggctgggtttgcgtagtatatttaaagaaagaaaatgaatgtaaattcgttgttttagatttgttttttgtttaataattttgggtttattatatattcgagtagtaacgagtaggcgtggtatatttatagaaggaaaatgagtagaagttcgtatgattggaaatggaagatagttttggaagcctctagaatccatatgtgatatttttttctctagatttttcctcacatatgattattagatattttttctctactataaatttatgatttttcttcaaagtaagaggcaccatgtgggccaattgaaagctagtaaaagagccagctgtagatgattagattgtcttataactggtcgatgaaccccctacgctcctcctaccttcattttaggcaatctactgctccctccgggttgataatattagtcgtttcggacaagggtaaagtcaaactttaaaatctttgactaccaaataatttgtaaaaatattttatctttataaaaatattgggggagnanaaacccaactttaaaatgtgggattagtcttaaaaagtacttcaacaaaatcatatatttattggatntatatnatatatatatatatatatatatatatatatataatgaaaatagttatcaaagctactttttggagaccttgctcttgtccaaaatgacaagtattatgatattatcaacctaaagggagtagaaaataagcgcgctagttggtgcgctcgatttatatcccatttatattatctttgtgttattaattagcacattgttcattaaaaaattatagaaatcaatttaatttccttgaaactcatacaaaaatcgtcaaattataataacagatcatattgttgagaaaatcgtcaaattttctcctttttttcaatccatactattaatttctttctttgtttttctaaaattataattaaattgtttactaatgataaaattggttttgttatcttttttaaaaaatatatgaagtgtttcagatttttgttttgttaggggccacaatgttcatcatttctttttatgacataacaatgctaagttaggtttaaatcataaacattgtatacgtgtttatattgatggctaattagtgataggtgagatatacgttgatgatgagttgcatgtgatgatttcgccgattttagaagaaaaagaagtcaattttaattcctgaactatttcaccatagcagttaacctcctaaattgtttttttttctcattttacaaacccgaactatcgaaaacatctcactttactctcctaacactatttctcttttttttatttctctatattgtaagtcatattttgcactctaatttggtataatatagatgcatttacaacataagtctcaacattgcttttaatttttttctcaccgtttatgtaggctaaaagtacataggactgatttaaacatcaaaatttaatgttcaagcaaacaaccacattttgaaaaatatttttgaactttgataatattctaatgtatgactctaacaaatttcagcttaaagtaagaaaactaaaaaatattgttaaggagtaaagtgaaccatcgttaacagtttaggaggtaacatgagcttaaaaaaatagattttttaatagtgtccattgatttagttcgaagaagtaaaatagttttttttcattttcagatatgctaactcaatttttcaaagatgctgagatatgtacgaaagtgagtagttgtatatgcaattatgcattcaacatttttttttgcaaatatactatacaatactaatgtactacctcagaacttatacatgtagagcatgtggactccattgacatataggcgtttgttgcttgcctgatcgatccttccagcatagccttttatctgcacggaaggactagcctgccacaaccatgttcttccctcgtactcttagaacgcacaactgctcaactcttggtattttttttttcttttggtgctcttcggccggatatatctgccgtgtgagagaggacacgtggacagatcactgctggcagaagcagccagcattagggcagtcccaatccatggtgtccataagtaatatctatgatgccatgtcaataagacttcacagtagaaactacactctacaacccatggtttcttaaagtgggtcattaataaatacatcatctctcttctctaccaatcatatttattcttcatctattatgaagatactattctctcccaatgtaaaacttgatagtgtctaatgcataggttctcgtgttgaagctgtgtcttacatgagacccagtttcttcctctcttcactctctctcttatttaatatagtgccacataaggtaaaagtcctacatggcaatgtagttaatactatagacaccatcctaggtggagagttgtgactgcccttagaaataaacactaaaaatgagcgtgttggcatgcttgctaagttagtttatagcccgcgtgtatttccctttagaaatcatatattcaaaaggattattgaaagtccttttttctatttttatgtttgtaaacaattaaagtagaatggtaaaatcatcctgattagtagtattatcatgctgaacaaatattgagaaatgacaaaatatgatatatattagtaaaaaaatcatgttttattaatattcaacacaattctcatatatatgtaagtcattgagtttgtattagtaggaaatacatatctaaaataaatgtgtcttcgactaccaatttcttcatactagttttatttagaaataatggatgacgatatggtaaaaacacttatcttgatttcatatatcaagatatattaatatgcatagctcaactggttagattctctacctatacgagttcaagttctaaacttagcatagatacttgcatttacggctatttgtttttttaatggtaggaaacccatgagtcttcatcaatcccaagatatgcctgacggctcagcatttggaggtgctcgtaatgattgggtttgtatgtgtgagtttacaagtgtgagtatacacggtatatgaacgtctatatctatactatatttcacaataaaaataatatagcacacgattggtgttacttaccgatgttccaaaataaatgaattcctagcataaaaaagtaaaatttgaggagaaaaaaaaccgaaatgctccaaattaattggaaagtagttgtaaacttatcggttcacaagaaaatttcacttctattctttccattatatagaaattcaggtattttcctcgtttgaagtgaaccttatctgaagatttttaattgtcctaacgcaaatccttgctgccactttttttttcatttgatttaactatttatttattttattcccttgaaacacatgatattaacatgaagtgactttccctcattccgagtaacatgtagtaaattacatttgttagtaaaatattattatggaaaggctaaaatcctattatttttatccttttctttttattcatactattttcttgtaaactggctctgtatatgcgcagcagcgcaggtacatagcggagaaaagccgtgcggcaccaggcccaagctcgcatggccttgcatctgcgcccttgcgagatgccaagcccaccctgcaagcacatgcaggtaaacgtttttccgatctctcgagaagtggcacgtggcaatttttttggagggatataaccaaatttataggaagctacgtggcccaatgagaagccagatccctgaccctgttttggtattaaagatttcctttgtgccttggttctgatccatgttagggtccggttctaatttttatgtttccaaaaccagaccgcggcacaagatatatagggtccaatccgttgtccggatgggaacaggtaagcgagtgaaacaataatcaacggatgccactagaaccatttaagtaggatgtgagagttcttctatttcttataaaatcttagctcatgttggagcctttgcagtttgcatgagctatatatggattgttcagaaattacatggcaagtccacatgaagaatatttttgggtgaagtgtacaagcggtttctaaacttgtgtcgatgtatcatctagattcttaaactttaaaaatacatttttaggttcttgaactttttatgggtgtcatataggtccaaatgcggactccaactcgcttcatgagctgacgtggtatgccacgtttgcgtttacgtgttagaaagatgccatgtcagtgcttacatgtggatctacatgttagtcatatagaaaaaataaattttaaaaagagacgagggagagaggggagaaaaaaaatatgtttttaattaaaaataaataaataaataaagatgggagaaaaaaaatgttcttatatttttctgtatgtaactgacatatgagttccactgacatatagggaccatcatatgaatatattttaagtgcttaaagaattatacgatgtatagaaactttatatatatatatatatatatatatatatatatatatatatatatatatataggatgactattttgtactcccgggagtacatactccctctcccatattggatcatccaataggatctgtagggacctcttgagccgtatgaaagagaaaaaaaaagttaaattcctatttttcagctgaacagtgaatttgccaagttgaaaaatatttaaattcaaaaaatatccacgcatgaaggcatttgatcgactccatctacaaatttgaaatagtagtatatgtgcatatactattttatttttttaatccagtatataccgattcatggttggtggactatataccatttttcttggaaatcagtatgtactgatccctgattggaagtatatacttgtttttccaggaaccggtatatactgatcccaatttgaaagagtatatactttttttattgaagaaccagtatatagaatgctagatggagaagtgtgtacttcttaattttaggattcagggtatactaatgctggttgaggagcacttattttacagtgtcaattagaaatttatggaacaggtaaatctcaactcatatactattttttccatttttaagtgcatgctatattcctcttgtggagtaccatatcagtatatactattttaatttttaagttattatcagtatatactgttttaatttttaagttattaagtttgttagacgtatatactgtttttctagttataagtagtatagatggtataccccttttagtttttagcagcatatactattttttcaagttattaagttttttagtttttagcagtatatactattttttaagttattaaggttgtagcagtatatactttttaagttagtaagtagtatatacttttttaagttatttagtggcagtatatatatacaagatgttttgttgtttttacactgtagcagcaaacacactactgcagctgcgtgcacgttcgatgatccatacgtatctgagttttcacaaaatacgaaaaggcaagatgtatttccaaaagaagaacaatctgactgacgcaaattaaagaagaactagtctgaatgacatgagaatatgaagaaaaagaagtgcttaaatgagctgttataatttagactcagattgaagcgtatgctgattaaaaataatgtaccaacgagaatcacaaagatctgtttcctgagaaatattccggattctcaatctactgctacagaaagattgactatcaacaaggcaacgacaatttctgaacaaagccattttctcattgcgccgtggtgttactctccgccgtccaccacctgcatgcaacaaataaattgagggcttagtcattgaactggttaattcattggaaataatgcatctatgaccccatctaccatcctaaaacataaataaacacgaacaatggaagaaaacgctcgatcagcaagaagaaaactcaaaataggaaggattacacagttgtctgggaatagatacgatcaatggatcaacacctcacctgggaaaatattgccgaacgccggcacgggcctctgctgacatctcgacaccgttgacgcacggccatgcgcacaggattgccgatagatgggctgttgtcgtcctccggcagacgcccgcggccgcgcacggtccatcgcctggacaggcatgctattgccgccactggtgaacgccggagcctcctgagtcgttgatggatcgcgccgccgtcgcctccccgatccaccgatttgctaataagcatcacccctgggaaagcgatattaatgcgagcagttcgggatggatccgattagtgcggcttgattaagtattacgagaaaacaaattttcgaaaaaaaacaaaacgggtttggaatctagacccgtcagcgggttcaatcggctggttaaggatggacggtggatgagagcaggtgtacgtacacctgggagtatagaagcattttcctatatatatatatatatatatatatatatatatatatatatatatat

SEQ ID NO: 35602 - DNA, 1607 bp, Oryza sativa
gaaatatcctaaaaattttgagaaaagagaaaaacatccatgcctcaatttttacctaaatcaattatccaatattttaaccatcaaatctattaaaaataaaaacaaatccctatttcccatccatccgcaaaaccaagtgcacggcccccgcacttactacagacacacatctgaactttccttctcacttttttttctactgtacttaaaaagcttatctaatgctaagtgtttgtatttattaatgatttgcaagcacacagatacaattgtaacttttacctaagaatattcgaggtatcgtatccacagggaacgtgtgtatataatctcaaaacaacattctgaaggataacaaccaaatgataagctaagggatagagaagactcctataggttaattatcttaatttaagttcaagataaaactctatcaatttgtttcggacaccaacttacccttggtctgctaaaagactccggcctcccactctatgatgtatctgaacgtggaggattacaaaggacggacagggttgtcaccacctgccgcctatctctacaatccgtagagcacacaacaaacaaatgtaacctccagtatatataccacatctatgctattaattactaccctaatcttgacgtcacgcttatagagtattaaagtactctacctagatagagcgatgaacccgcaatgagcagaatatatcttatttaaaaaaataaataccaaaggaaatcacgaatacttacttatataaaagaagcatcaattgaggtacaagatccgaaagagtttcgacatctccagaactcccctggagagaactccaccatttggggcactccttttggagcttccccacagtcttttcctactctactagaccaatatgcctaaggccctgtttcttttagtttgggattattataatctagattattgagttagattactataagctagattgttataatctgtagtagaataagaagttagttgtttctttccagattattagagcctagattattgggtttgcaagtctaaagagggcgtggggtggcatggtgggtaatttttcacccaataatctagaaaaagctcacctaaatgagcttatcagattataataagctgggctccagattataataagctacttcaataagttgtttgtttctttcagcttactcctaataatctggattataataatcccaagctgaaagaaacagggcctaagtatgaaagtgacttgtactacactttgttatgcgttgagagtgagagcttctccttttatagccatcttatgtgggctctatgtgagcttctcctttattgtccgcgcataggggtggaaatgagccgagcgaaagcggcttggcttgcagtggctcacaacaagctaggcttggcttggcttagctcagttagggaaacaagctaaaacttgagctcggctcgactcgtttcctggctcgagccagctcgagctggcttgcaagccttcctgttgaaacacctcttcatatatattctgtaattattaaaaaaaaccaagaacaaatcatcacacatgtaaaatttaaat

SEQ ID NO: 35603 - DNA, 6668 bp, Oryza sativa
taataaaagagaaagagaccgaaggcacaaaggtgcataaaaagaaaaataaaagccgcacaaaaaagaaaataaagaaaaacaataacaacaaaagttttctcctcgagtggcgaaaaaactgtagatccgaacggaaaaaaaatatgattcatataaaagtcaaaaaaaaaagtggtgacaaaaaaaacgctagattcgatttcttaaaaaactgaaaaaaagtataattcctataaaagtgaaaaaaaatctgaaaaaatatttaaaaaagtttgtccgatacccttagaaagtagcaaaaaaattgttcgtaaaaaataaaaagctggttcgtataaaataaaaaatgcaagagagaaaaatttggaaagggcgaaacaaaatctgatttctaaccagtatatatctcttctctatctctaatctaactatttaaaaagagaaaatacgtgagaaaataaaaacggtcaaaataacgcgtgaggcaaaagtcagaaaaaaagcgcaaaaaaacacgctaaaaaggttttccatcgttaataaaaaaaatacgcgcgagaaaaattatttccatcgtcggtaaaatatttttaaaaaaacatgcgaggaaaaaactatcgacaaaacgcgccatttctaaaaaaatggttttaaaaaaccttgcaagaaaaaaacaccgtctattaaaaaataaatcgctctgaaaaaagtgtaaaaaaaaagctaaattgatggacgcttgagtcagataggatccatcgatttttttgctatctactacatggctttatttcgtcatatattctcctgtattggaaaaaaacaaaaaagaaccttcgaaaaaaacaagcaaaaaacgtgcgagaaaacaagaaaaaaacacacgagaaaagaaaaacaaaaaggagaaaaatatggttttcttcgccagtaaaaaaaacaaaaaacatggttggaaaaaacgaaacgcgccatttctgaaaaatggtttgagaaaatcgcgcaagaaaaaaaaacactgtttataaaaaaacaagcggctcgttaaaatagaatcattgtcattgacatgattatgcatgaaaaacgtatattattattagaatttttttacccattgcaacgcacggacatttttgtagttcaattctatatctatctatctatacctatattaattgggcttttttttaggctctcatgttaaccagaaatatccgaccgttaattaaatagattgtgctataactaccgtagatcataaaacataacctacggtttgtgaatccgtgggcccgattaaaggccacacgatagaacagatgcatctaaaaatatgaggatctcaaattctatctgcaaaacgagatagtgataatatcgagctcgacaaagctacgtactggaaatgctccaggatgccctttttctctgaactccaagttgtctttcatcctgttctagaactatatatttggtctttcagtgctgtcatggttatcaataagacatatcttctatcctacgccttataaaaaatacgaatacgctgtacctttatatatacggtatgttcccatatgtgataagggaatctacaagatattatggaaaatattcttctaggctgggtgattaacagtcttactcggagaggattgagtttattctatatagtgcaaggttcgttgtctccgagttttatttggagactaaggcaatccacggtataaaaggcataccccataggggttcaaaggattgaatcatagcaccaacatacccaccatagtttacgaagccggaggacacgaagcccactcgccgggagaactcgtcgaaccatctcgacaaggatctcgccggtaacgccgaattcatctattctctgtgtattctgtggtttctacatatcaatctcatataaactggattagggccattaccttacgagggacctgaaccagtataatctttgtctccttcttccccggtccattgctcgggtatgctacaaatacttcttgaagttgtaggatgcgggtcatcgatcttcctatcggttcagaggttatgcgctagcttgggaaagaaaaagtaagatttgtttatcatatcatgatcggaacttagatgtaactcttcttgagtactcctatcacgtggtcatgccttgaacacagtaaataaattaataagctttcgaataatagctacactagtctctccaatatgttttgatgtcatattcttataccaacttacgttgtgtttagttccaaaataatttttgaaacttccaacttttccatcacatcaaaacttttctatgcacataaacttttaacttttccatcacatcattccaatttcaaccaaactttcaattttgatgtaaactaaacacagccttaccttaatatcatatttatccgatctacggtacccgtcgacaaagtacataattgaaaaaggaaaaaaaatatcaatcaatcttgattcctgacgccatcatctaatgtttccatgcgtccaggtacatgttacgaagaaggcaaggagatactccctccgtaaaaaaaaaaaaaaagacaaaccctggttttccgtgcccaacgtttgaccgtccgtcttatttaaaaaaattatgaaaaaaactaaaaagacaagtcatacataaaatattaatcatgttttatcatctaagtaacaccaatgaaaatccgaattataaaaaaatttcatataagacggatagtcaaagttagacacggaaactcgtgtttgccctttttttttttttttggacggagggagcatgtacttagcgacaactgatgttggatcgtcttaatcattgaaggatttattaagcagtagaaccatgtgaaccgcagcgtctgcatgacaacttctatggctttattcaggatcaaacttgctaagaagattcatctgtggttgccatatatatctaaatctgcaatttattacaaaggaaatctgtataatttatatgatttattcgagaaatcctcaattcttatgttgatgcattttctgtcaaacttgcatgttctatgtgacctattcaagacatctttaatttttttactgataagttgtgttgcagatctttttccgactgaaagatctctgttttatcataaatgccctgttctgattgtaatcaggttaatttagcaaaaattcaatgctcacttaaaaattgagtttaattatttaatattagttttcaaaatcaaagagcatatattgatctatattttcatgaatacaaattagaaactaacaagttattatactttccatatgtcttgcctgtatatatccatatactgtatgtaggttcacgtcaaaaacatatactgtctgcaggtcaaagctaattttgttgtgattttcatcgtcatgccatttttttcacataaacattaactaggtcgaaaataaaacaaacgcatcacaattcggatattacctttttatttttatcaataatggtatatgtcaatgtgatatatttcaagttatttacagggagaaatgatatgtcaaggtcagagtaactagaatttgcgataccatggatcccaacagtaatcaacttattagccttgacacgatacttatggatgaagaggtcacataatattttttttccaaaaactgtgctgatgtcctatttatataagatttatcacttatattatttactgctgggcacaatgatgcatggtgctttaaaaattttcaagttcagaccattaatatcataggatcaaaagaataaattgaaactccaacaggagaacaaatatgagtactgactaacttctaattttaaattattaattaactaatgtaaatgttaaaattgacactcaaaatcaaaccgattacaactcaatacttattgattgttctatttaaaaaaactaactaattatcaattttaaaaatattacagtaatactccaccataaatattaacaagtacaactatatacttatatttgttccaaaatttgcaaattattacactaagaaaacagatagcagcacaagaaatattacctaggatgtatactatataatgttgtaaaagctaatttttatttttggaactatgaattttaaaattagtgttataataatggtttcaatattttgaaattttatagccaacgtattgttaaaatttgatatttataagctatatctccgtactgactagcactatgagtgagcccctacatttaaaaaagaatgggccaccgattagaatcattttcataaaattcatgttatattgagaattcattttaaataaaacatctgatatgagataccattgactccttagaattagattttataaaattcacaattaataagtgtaaagttgtatatatttggacttacttagaagtttattaattaaatattgaaatgatgatggcaaattgtaactaacatgaactatttacctttccaaatgaaattggaattcataaatatggagtcatacaaatctagcttggactctcaatttatctctccatcaattcaatttaattcttatatttattccatgccgctataaactaccaacatatttgacatgcacttctttatgtaatacaaataataataacccgtgcaacccacgggttgacgactagtttagtttaacacttagtaacactactcgttcgagatgacttcaattgctgtgttccggctaataatgaaatgcaaaaaacttctgttttgtttctactagtagtagctagcttggaaagcgatcgagttcaccgcacatatccattaagtatatatcttcgcataaacagaggaagcttctatctatatgattaaatttgaaagaattccattctatttgggacaccgtattgttgaactgatgaagatttcttgatactatgtgtgggtcccaaaaattggttatgtccaggtttacattctcgatacattttgacccaaactcccaaagtcttgagatcctgacatttcaagctgacacgaaacgggatctcaaagatatattttaatgaattttcaaaaatagaaatcaaatttgacttaaaaggtactgaaaaaaaattatatagatgctatgacatctgtagtacgaagtagcataagaaattttcaaaaaccgttcatattgaccatatcttccacactttacttcatattcctataatttttcctccattttcaaaatttcttagtatcatttgttctgaatttttcacacgttcctacatatctattatatattttatatactaaaaatgaaacattacataaagactcctaagctgttacatggaagttctacaaacacttctaaccagataagagcactctaataaatttaaaaacactactaaaaaactattttttaccaacattggctttcgttttcctaggcgaaccaaaaggataccctcttataaccatttgcgaaaatagcttaagaacttctagatttagctccgcttacaaaaatcaatttttacaagcggatctcgtgaaaatacctttattaatttcacaggcaaatctcataagggtctacctatgaaaatcggttcacagtactaacaattgatcaacaccctcagatccggcctccctctcctcctcctctactcaaatttcttctcctccttccctcctcctctccctccctctcctacggatatgataccggtgaatattcaaagccggacggggaaggtcagcggcagccacagtagttggcccgcgtggccctcccctccctcccagatccgaccgcaggtaggggtggaaaaaaagcttgggctcgtgagctcagcttgtgcttggctcgagctcgcttagctcggctcggctcgaatgccaaacgagcaaagcccaagcctcatttttagctcgttccagaaataagcggagcccaagctggcttgcgagccgcttatttggcttgtgagcctaggccatcatgcacttatatggatgattttattttctagtggagttattgtttgtcaatatgcaatttatcatctagattttgatgaattggacatataaagttaatttaattttgcatgtcgaagatttgttcttacttttcttaatgattacaaattatatacaaagaggtgctccaacggaaggctcgcaagccagctcgatctggctcgagccaagaaatgagatgagctgagctcatgttttagcttgtttccctaaccgagccgagccaagccaagccaagcctagcttcttgcgagccattgcaagctaagttgagccaggcttggctcggctcgtttccacccctaaccgcaggggagggcagcggcagcgcgactgctcccctccatccctccctcccaaatccgaccgagggggaagggcgctggcagcggtggaggcggcacggcctccctcccagattcggcggagggagggcactggcaacggcaaaggcctccctccctccctcccagatctagtgaagaggggaggccagtagcggtggaggcggcgcgacccatcccctccctccctccctcccagatccggcgaagaggggaggctggtagcagtggaggcagcgcgac

SEQ ID NO: 35604 - DNA, 2820 bp, Oryza sativa
agtggattatttttttcctatgtttttccttcaaaaatggaggaatggaaaactttcctatagttttcctatggtgcattcctatgaaacgaatggtagtttaaaacccattcctattcctatgcttttcttttgcaattcctttgaaatgaataagcccttaggcttattcgtttcaaaggatttgtaaaggagaagtacaggaatatccaatcctttggaatgagcattatactatcattcatttcaaaggaatgcatgaaaagaaaaattcatatcccttcacttttagggggaaaacaatggaaaaaaataatccactccaacccaatgttttcaatcatttggattgtttgcaacccaaccataggaaaatttctatgttttccaagcacatgcattcctatattgttcctatgttttccctgttcctacggtttgaaaattctacaaaccgaataagcccttagggggaaatcaaaggaaaaaaaacaatccactccaacccaatgttttcaatcctttggattgtttgcaacctaaccataggaaaatttccaatgtttttcaatccataggtttacacatgtattcccatattatttctatattttttctattcctacggtttgaaaatcctacaaaccgaataagcccttatactttaggatgaagggtttaacgtcggtttctgttatcacatttttcatactaataaatagtgcattttgtacgaaatctctctatataaaagttgtttcaaaatattagataaatttattgttaggtttaaaataattaaaacttaattaattatacatggatggttttatcattttaggtactcgtacctaatcatctccccctaaagaaacttgaatcttcattccagcaagttatacgatgcaatatgagtatacgagtatcttgtactactaggagtatccctacagtacacatgttcgttcttgtagaaaatccaccagatactaccgcacggaagaactgagagttaatgatggcggtgggctgggggcctatcgtaagcttgtggtgacatgggagagcagagcaggacagagaggcagccagtcgctcagaacgcgagagcgtgcgtgagaagttgtgcactgcagattactcctgtcttcctctctgcccctctctactacagggaacagatagtggtttgcaagaaaggagaagagagagatctgggctctggaggaagaagcgatcatcactgtgaggcgatcttctgctactcctacccaggatgaaaattgaaaaggcctgcccatatctccactagtcagatactagtactatcccagccactaatctaatcatgcgccagattccatcacaatatcacatcatacgcagagatggtactcatgcaagtgtttcttctctctctccatctctgtgatccaaacagccccttaacatccttcctttttttttttctttacgtccatctctcttggtctgtagtacgttctctctctttttctgtggtttaatttagccctttgcctttggcctctagctggagagtgtacttctgaggagtagcaatggagatcgagagagaagcagcaggcgcgcgcgcgcatgccatggggtggatcactgtagcaactctgcccacaagaaaaggcttgttgaattgttttgttgccttcttcccagaactctagccacacgctgcatcattgcatatgacacgcttgcgttgcgttgcatgcatgcgcatcctgcagcagcgttgcaaatatacgagagtatatgcgatagtataatactactactccactactcatggtactagtactagtactagtactagtagtaaattacgagtatactctcagtgaaggtggatttttcagtgccctgattgcaccattgaatggagacgaacgaagaacagagggaggcacaaggctccagcaaaaaggcgcttccagaacacggaggcgcatttcctgaggcttctcctctctctctctctcggtcctatcggagtactggtatgaaggagtacgtggggatgggtcttttttactcgctcgttccactcccatagtagcagcagactggggtgcactgttgggtccttgggatatactccctccgtccaaaaaaccgtaccaacgtttgattgttcgtcttatataaaaattttttataattagtatttttattgttgttagatgataaaatatgattaatactttatgcgtgacttatctttttaattattttcatatttttttaaataagacggacggtcaaacattgaacacgaaaaccagggtttgtctttttttttttcggaggggtatgggctgagcctgagcggatcttgttgctacagtgcccagatcgtgtgccgcattcattgtctacctgaagttggtgagctggcctgtgtgtgttgtttcatgccctgtccctgcaagcctcctgcaagccagtgtcctaccatgctagctatattgtgaaatatatactgcggtttacagtcactactaaaaaatgatttttagcgacattggtcttttattttttcaggcaagtataaccctcagagctaaatatctgcctacaaaaatataaaccgggatgaatttttatcatccgcttgcgaaaatcaatttttcaaagcggaccacttaataggttcgcatgcgaaaatcatacctaccctaaaaaaatatatcttaagtctttcttatcttctcctccacccctccccaccagccaccactcatttccctctcaacacacactctctctctctcactggcccgt

SEQ ID NO: 35605 - DNA, 546 bp, Oryza sativa
taatgatgataaagaccatgttaacctaaccagtgaaataaaaaattctgtgttccaaagtacccaaaataaaaactgggagctagtactagctggcttgaatggcgaatggcatggacagcaacatgtgaccgaacagcacagcgagacatgctaatctgatcctgcttcaccaacagcttcgctccacgctcgcacgcatcaaccgaaaaacgttagcatctcctaatcagatttacgagtaccatttttcttctgaaaggtcctaatcagatttgtgcacaagtgtcatggaatactacttggcgagcactcgaggcattctgattggcatcctttgcattctgttcgaggtgatctttcaaagaacgccgtgcaagtgcaagcaatcccgtgatagcgagaaatctgtcaaaaaaaagtgctgtcaaaagcaagcaagcggcgagctgtgtgttaggattttgctgcaaagtcaatggtgcagtgaaccttctgaattctgaacatctggctcggttcatacttcataggactttttatgat

SEQ ID NO: 35606 - DNA, 636 bp, Oryza sativa
atgtaatgggtgcctaacctaggccaggctaatcctatctgttagtttggccagctttagattcaaaattttttcttcaaacttctaacttctccgtcagatcaaatacttggacacatgcatggagcattaaatgtgaacgaaaaaaaaacccaattgcacaatttgcatgtaaatcgcgagacgcatcttttgagcctaattacaccataatttaacaatgtgatgctatagtaaacatttgctaaataacggattaattaggcttaataaattcgtctcgcacattacaggcgaaatttgtattttgttttgttattagtctacgtttaatactttaaatgtgtgtccctatacttaaaaaaattttagcacacgaactaaacacatcctttatctgttgactataaaccattttgtgccttttgggtgtgcattggtccatgacacatggatgaccatagtgagattagtactgctgaaattgtgttcatctaagggggaaagagggaaagaggttgttgatcacagtgagaggatggggagtctaactgtctacgctctagtacttccttcgcatgataagttaatatagtacggaatataatatatcccagtactataaatctggacata

SEQ ID NO: 35607 - DNA, 624 bp, Oryza sativa
ccacctcccccacccccctccctcccgcgtccctgggccacagatcgagcgcatgcatgcgcggaagccggaaagcgaagcgccccgcggtgaaaagaaaacagaaacgcgcgtgatagccgccgcccacatcccctcctctactcttcacgcgcacgcgctcagcgatcggcgaccgggcgatggcgaattggcgaaaagccaaaaatcaaaactgcatcgcgtgtcgccggcggccggtgccaacgtaattcactccatggccatcaccagctgcttggcgccgacgcaatctccctggttgctgctgccagctgctcagcgaagacgcaatctactgcgtcgctgctgctcggcatctcataagcctccatcgcatggcttcccctcggaaggttagtaatcagcacaccaatacaccatctccgaggccaattattaatttagttactgctgtctaatctctcgatatcaaaacataaacatatgtaggtcatctcgacgcatggcgtcgcgggcattagcgcttaattgtttgttttgtagtagtatgttaagggccccaacatttagtttcgcactggggccctgaaaactcaggaccggccctgcgcgcatggagag

SEQ ID NO: 35608 - DNA, 2036 bp, Oryza sativa
cctccctctcccagatccggcccctacgaggagagggcaggacggtgtcggtagcagacaccaccctccctcccagatccgacccgaggtgggaggggggcggcggtggccaccgcatgcaaaggagttcgccggcgacaacggcgttgtttttttctaaaaaaagttaacatgttcattgatgttaacttgcaagttgaagctgtgaatttgaatccaatgctttgtgttgatgtatggatgtttgtgattggattttgttttctggatgagatttatgagaatttgtgatttgtgatttgaaacctagggaggggtggggctagcgggaatttttttggcgctatgagtattttcgcaggtggggctactgtccgcttgtaaaaattagggatttttactgtagtttagatgcagacggaaggtttgtctgcctacaaaaacgtgttttgaccgtctggaaaaacttttttttttctagtagtgagtatgtactccggggtgatgtttggtgcaccattgccaaattactgattttagatttaaaagtttaattaagtatcaatggtaggggcctctacactttgttactgaactttttttatgattggctaaattaatcttaaaaaattaattgttttgagggctttttgaaaaataaatttaacactaattaaaaagtaaatttcacctactccaagtattatggcctaaattacacaaaatcacaggagttttgatacataatacataaccctagattttatggctataaaatttcacaaaactaaactagtaatcattttgattttgattaccatacttttgagttctacaatcacatatcaaatttatgagttatttattcatcatatgaatgaacatttatgtatgtaaagctttattaattttattataggagtaggcatgtcaatttggttaatgacgtggtttgtaaaacttcaataccataatacataggatggtagggttaggtgtcacgtgccaagatcctggtggtctgtgcaacttggaaaataataggtgaagttttataaaatttactcaaactaaaattagctttagtttttatgagaaagatgggacggacagatttttgaatttctaataatcatttcagaagatcgagataagtcgcccttcttgccagaaagaggagagagatgacatattttggtggcaaaccacatggacaaccatgtcaactgaggcaatatgtgacactttatgatattatggaatgctatttgacaagtttttcttgggagcgcctaaatatatattttcagtgtttaaggagctatacaccatttgacacttttaaattaaatgaccaccgttaaattaaatgaccacagtatataattatattgaagcatttctacgacaaatctacttttaatttttattttttctataaaaacttaacatttgtttatatgtattagagtttaaagaattgaatatttgattacactcaccttaaagcatactgtttgatgagcaatcgatgtcagattgggaggttgggactgataccatagcatccaagagagtgagagacgtcgcttctggttggtatcacttccacaaatcctttctcccgagctcctgtttgctgttagcaaattgaccttcataacttcattattctggtcatatatgatttttttgctctagatccaacgttgcacttatttaacactacttaaaaaaagccagtcacggagaaaaaaagttttctctgggtggcgccgtcggcggcatgcgagatccattcttcacatgcagctaggcttacgatggccgttagtgaaaaagaccttcacatgcgacgatattaagctgaccactaggtataaggattttttttttgggagggggaggggggaggggaatgaaataaaaaaagccatttgcaaaaatccccaaataaaccaaaacaaattcactggtcacaatcacaaattcatagcatcataaaaaatgaccaaaaagctgtgcgcatattagac

SEQ ID NO: 35609 - DNA, 637 bp, Oryza sativa
aataagggaagcaatcacttatagcttcgacgttgatgctgtagacgagcaggcggttttgttcacggcagctggcgcggtaggccatggcgtcgtgtcggcgagcgcgagcgacatgaggaacatggcctgcagccccagcccggctcgtcaggcgccgcgccgaacaccacggccgccttggtgacgacgtagcacaccggacggagcggtggtcatgggagagcgtcccctcgccatcgccgccggccgtgaccccatgttcgtcaccgcctacgccgtgcacccggacgggcacgacagcgacttcctcgacttcctcctcgagctcatggccgtcggcaagatgaaggagcgggtcaacgtggtgaacatgccggagagaggatggggatgacggaaagattgacggggaggatggaaagagtgacggagtggcatggtttcaattttagaaatttacagtggcatccagcagataacgtgaatagtagtggtatatttttgatttgtcatatttgcagtggcataaatccaattaacccttactttttcaactatcttctttggcttttttgggagcataggaataggatcgactcctaacaattaatatactagccttattaattaattg

SEQ ID NO: 35610 - DNA, 683 bp, Oryza sativa
agaatccacagaatacggaataaatatttccttcttggcgaatagttccatgtatattttgaagataaaattaaaaattgaggaaatagatatattaaattgtcaattaaacaatgaagcttaattaataagggtcagtttgttttttttgggggaggggtagaagagattaggagttatatggagggctaggcatatagcagttttggtgggatagagattgagagaacttcctacttttcaatatctggagggaactgctcctttacgttgcctaaacaatacttagccctctcttttctaagcaaaacttaatctctatctaaagtctgtgtcgattcccaccatctttacaaataaaagattaaaaaatcaaattcccaaacatcaccatcaattctctcgtctaaactcttaatattcttactcgtcttgccaaacttagtgctattatagatgattagtatatatttcccctctttcgtatcatatgtccctttggtttgccctaaagcgaacctttttaatttttttatcaaaattataaaataataaggcaacattttaaaacaaaaataaatatattacaaaatatgatcgatagtggattttatgaaactaatttggtgttggaaatgttgttatatttttttataaactttgtaaggttttatgcccatagc

SEQ ID NO: 35611 - DNA, 578 bp, Oryza sativa
agcacatgtgtgggagtcagcagttttcacggtttcagtggtccttgtgatggatgatgaatctgcagccaggcacgcgctgctgtaccgggagggaggagcatggcttcccatgacgagaccttgggaccatgccaagccctagctatcttgcaacattattagtatattatacttcatgggatcaaaaaaataaaatgctagtggtaactactacctaatgtttcatactttcagtttcatagggttcagtatttcaacctttttttcaagacttcagtcttcagcttatgctagcaatgaactactactattataagtgttttttttagaagctattataagtgttttgagaggatgggaaaggagagaaatacggtaaaacaagaggcttgttcactttgctataattttcaaccttaccaagttttggaaaagttaccaaaaaagtgggtacatttaggtgttgcccaattttagtaactacatatgaaatcttgtcaaaatttagtaaccctggcaaaattttgacaaccttacccaaaatttgacaatgccaaaaattgataaggttaaaa

SEQ ID NO: 35612 - DNA, 613 bp, Oryza sativa
actattatcacagcagaaatgcatcaatttctgctagcacactgaaattatgcgccaaaatttctttttctgttagtcctattttctcctgatcacagtaggtcatttcacagcaccttgtgacatcttaatatggagttagttaatatttgtagttgtgaattatgtagatattaatacatactataccccttcaagtctcctgttaagctttgcctaatctgtcttaagttccccctttctccgctttcactgatccgctcttacatcttgattaacatgtattgcatttagcaataccctctcaaactaacatgtaaaaggagtatcacctaacaacacctcatagcataagcccctacccatttaaaccacatcgtgttttctttgcacccattcttaatcgatagttctttcttttccccgaggtggtaaaagaagcgtgtttgcacccttcttaatcagtagctctctctttccctgaggtggtgaaatatacgctcctgcattggtgaacctcaaatagaggtacttcatgtagaagaatcaatgagaaagtattttctcatttgcaagtatgtcataaaaaacagtttgattaatgataaaaata

SEQ ID NO: 35613 - DNA, 726 bp, Oryza sativa
caaaaaccgtgaacaaaatattggtagggtatattttgggattccatccaaaacaaccatacttgtacgagaaaaagggtttctagctaagtatatcaagactacttttttatatatttttttacttttaagtaagaaagaacgcatatataaaattatacccataaattatttttgttgctaataagcgttaccaagtataattagttataagcgaaatggttggtcctatgttgccttgttgttttgttttttgatttcttgtcgtgttgtatgtgacacttgtaattgtcttgattttactatatgacatttaaattttgtgtaattggcttggggatgcggtaagatcgtgtcactgttgagagacttgtgtaactggctacactaaactggagatattattttatcatttccaagtaaaagcttggagagataaattaaaaataacaagattgcccttggttgccaggcacatctcacgcaactagatctgatgaaggcaatggctcctcagctgttgacgatgaggagggttaagagtcagttgttcatgtcagcgatgtagaactaaattcagttgttaaatgtgggcaaccaattacagattttttttcctctttaatgacacgattgcggtgtccttcggataattatacatattttgaaaatgcccaaaggaaattttcatttatcaaatagtgaaagtttaaacatttgagatta

SEQ ID NO: 35614 - DNA, 620 bp, Oryza sativa
agagaaaatacagaattgtcatttgtttatatatatgcatccttcaatttgaactatgtacgcgtacgcgaccgatcgacgtgcttgctatataacacggtaatgtactgtcgcactaaggatgtgtttagttccacgccaaaattaaaagtttgaaaaaattgaaacgatgtgacggaaaagttagaagtttgtatgtgtaggaaagttcgatgtgacggaaaagttagaagtttgaaggcaaaagttgaaatctaaactgtgactaattaatacgctaatatatgcatatcacatcttatactacaagctaagcagctagtagctatcctaaactaattaagtactccatctgttcaaaattatttattgttttattttttaatttaaacatttttatattgaccattaatttttaaaattttctataatttaacaatatatataccaatgatgtattatgaaagtatttcttactataatgaatccaaaatataacactcataattttaaactttatgaatgtctaaatttgattatcagagatatgaaagttttatataggataaattaagctaaaatgataagtaatataaaatggagagagtatagttaaaata

SEQ ID NO: 35615 - DNA, 1009 bp, Oryza sativa
gacatatatattttgtgtggatgatacgcatatcagcatatggcatgagaacaaacaagtagcgtagcacacagcggatggatagctgcctgcaacgcgtcactttaatcttttgtaggacgcatccatatacatgatccacatagctagatcgcttggttgctgacaaagattggaaccatccatccatggatggatcatacatatatcctggacatacaacactgatgaattgatgatactgatacacacggagtacagatcgattcagttcattgcaaacgcggcatctacttattaatggtagaatatgatatctaacgcttaccaatattctgtaatccatatccaacaccactctgcctgtctccatacaattttttttttactaatgcaagcataattggttggtacacgaaagtttagcacaacgtgttgagaaatttatctctcggcatgaaaactgggagaaaatcacgctatggccatttccaccggttgcccatgcgactttatttctctattcacgtgcattgatcaatagcgctaatttctttttttacatccccaatatccataacgaaatattaatagaggatgccggtgttgtgttatgctgacgaataaccccaatccttagagagcgatggaacatatccaaagggtggttccagatcaatgcaggtggcactccgaaggacgacgccatactgcagttgatcgccggtgacccatttgggatcaagccagtggcctcgcatacaacactgcttgcagccttgctatgactgcctcgcatacgtcgacgaacattagagcggtacaagggacaacgtccccctattttccctctggttgaataaaaaacaggcgcaaatatgtcaaacaaatggccagttagtccgttacccctaatatttaacatcggggtaatctttaggcttattatgtttagaagattagaaaatctacacaacatactttgtcttttttcgaacacaatattttg

SEQ ID NO: 35616 - DNA, 711 bp, Oryza sativa
taatcggttttacacatatcagtcaaaactttgcagctaaacatatattttgcagctttttagtacgtaaccgcaagatatccgacaaacaatccaactgggagtttgaaaacgataaagcaagccagtaacgcagatgattacgagacatttactgcttttctgcccaacacaaacaaaattgatgatgcaaccacggggctcagtagagagatctcacggtatggccagttacaggtccgtcgtcttcgagctctttgaggacgtagaaactggccagctgcaagtattaacattaccgtgattacaagtaatatacctaccctgagtttccagttagcaacaggcatgctcagttttatcccaactggctcggtcccgccgatccattccgcgcgaccgcggcgatcccgcggctccgttccgcgcgatcgagcggacgtcggctcggtcccggacgtgcgctgccaccgcgccggaccggctcggttccgtactctcggtctacgtgaccgagccggtcccgcgtcaccgttccgcgcaaccgctgcagctctcggtcccgccccaccacgccgtgcatttgtttcgctcccacgttcccaacgcacgggagaggtgtatttgcgcaaatcctcctaatcctttatatataaacataaattatgagaaaaaatggttatttttaattttttttcttcacttatgtat

SEQ ID NO: 35617 - DNA, 502 bp, Oryza sativa
aaattgccacggaaattaatgacacaaaaacaaagctagaccccaaggttgtggaggttgttgagtcatctcctcctgagattaaggtaataatttttcaggtgtttcataggttgcttgaggacatccttgctcaagaaataataatttgcatgcttatctgtaaaaatattgcaggctttgttgaaggacaaaaaaacagccagcaaaatcaagaagaacggtcctgcagtcactaagttccttgaggaattggctaacattggtaagaattggctaagttctaattggcttgtatttgattgcatggggtattgactacaataatcacaatatgtaacttgccccctttttttatattttcgttcaaaaatgcatttttaatgaaaataaagaacctttatcacttatttccaaaatgaatcgtaacataaaaaatgagttatttttttaaaaaataatttaggtgtcatttatgaatcacctttttttccccttaaaa

SEQ ID NO: 35618 - DNA, 649 bp, Oryza sativa
aaaaatcgcatagtatggttgtgtttgcacttgcacatcttttttttatctttggattttgtaggaaatgatttgatagcttctctaaaaatagaaggcaaatcctatgttgtaaatgagactaaatgctaaaaaggatacgtgtgtgattctattctcttgatttagggtaataccttttcggggagaattgaattgttcgtaggaatagaacggtagtactattttttttccatgaaaagaaatgcaagtgctttgtgtattgaagatccttggagtacaaccttggaatttggtgagaacgaaacactattgttcttaggcttcgttcgttcctgggcgatttgggggattgagagaaaaagcatctcgttttccgcgcgcacgcttcccaaactactaaacggtgtgttttttgcaaaaattttctatagaaaagttgctttaaaaaattatattaatccatttttgaagtttaaaatagttaatactcaattaatcatgcgctaatggctcacctcgttttgcgtatcttcccaatcccctctccctcaaacacagccttagagcatcactaagagcaggtacaatagcagactataagtcagttataaacatattttaaggagataaataaggagagagaaga

SEQ ID NO: 35619 - DNA, 552 bp, Oryza sativa
tactacggtttggtatgctattattgactaaaaattgggcaacaaaactttcgatttttcgatttgtctttgcggaggagaaaaattctaatggccgcacgatgtacttgcgtacgttttttttacacatatattttatacactctatagctatacaatatgggaagggcctacgtgtcggacacccgatgctttggggaaaaatcgggcgctgacgtcatccgatttacgtgcaaaaactattttaaactgatttttctcaaaaattacttatccaaatcatgatccgattgcaccattaaattcgttataattaaatcttcaaaacaagatcacacatggatatattccgacgaaattttttttagcttattattgaattatttttaaatgttgcacgatgttccaccgggtatatcggaattgttttactaagtagatcggaaatgtttcactcgtttaaatcgggtgttgtttcaccttatataaaaacaatgtttcagcaaatagcgaaacaatgtttcagttcactgtaacatttgatccatacat

SEQ ID NO: 35620 - DNA, 638 bp, Oryza sativa
agctactagcacacactatccacgtactccagtacagaagtactacgctctaattaaatactactattagttaaactccctgatgaggccaggtagcacggagagcagtgctagctagcccagagagagttaagaaggcccatctttggagggggttggcatcctacactctagctagcccacagtccgctgccggctgccggccagcgcgcgcgtgcaagtctgcaagcaaagagttttcagatgcagatcgaagcaccgcaagaaaatttaattttatccccaccaaactactgccaccaagggtgatgaatcgcatctcgcaccaacaagtccgccgtccgcgcgtcgtcaaatcacaccctgcagcgccgcctgcgatatgagctgccgcgacggcgcggcggctgccgccccgtcgtcgtcgtcgtccgcccgcgcgtgctggctatccagccaccgccgcagtagtgggaccgcgcgtgctgggtcggggaagcccgcgcaggcctgtcacgccgccacgatcccacgagccacccacaacgtaacacgagccgatcgagtcccgcgttttcactcggcctacatgggctgacactgcggcctgcttcggctttgggcatcccgcggcccat

SEQ ID NO: 35621 - DNA, 505 bp, Oryza sativa
aggggtaagatcactggcaaaggcatttgtccctgttcccatgagttgatctaagtgagggggttgattaactgaacaactatctctgaggggggtgacacaaaaagtcaaaaacagctggaatgattgcattctaaggcctctaggggtgcttatacctagttttctcactcttactaaactagctcgatttgatcgcttgctttgccagccagcaactgcagcatccacaagaccctgacaacatagtatttttggtcttcaacaggtaaaggaaacccagaatatacaccctacaagtgattatcaacatcgttatcatcagagcattgatgttctgaatcatttctaccaatttggtagcgggtggcattaatatgtatatcctccgatgaactttggcatcgtgacaaaatttattattttataattttcttagcacgcaggtaataagccgaacgatggtttaaagtttggttcagatgctataccccctttaaaccta

SEQ ID NO: 35622 - DNA, 620 bp, Oryza sativa
tttaagcaatacttagatactacaactatcctataatataagttattttcaactatttaggagtacaagactaaacagttcttgcattgttttttcaattcccgtctaaactgatcatcaaccgagtaccgacatgttgtaatgcagccgtatgaacaaatcgcttcgactgatcagtcgtgcgtacggcctccgatagttatatatattgtgtactgaatggatatacctcgtctgcagcagcaggactacttgaattacctcattgcctgtactctcctgctgtaccccttaggtagatcgagcaaacagtggccagccggctgatataattgcatgcacgtatacgttaaatgatcagtaattgtgcaataaaatatgggagttaatttgctactcaactctgtcccaaattataagggctatattttttttacacggttttcaataacatactttgacaagtattttatttcattctatgattccaacaaatatgaaattagcatcacatgaaatacttcaaaataattagtatagatataattagtatgattattagtcaaaagctaccgagattgattttccttaaaaatgaggcgccctataatttggaatgg

SEQ ID NO: 35623 - DNA, 598 bp, Oryza sativa
cttaaaatcaatctcaaaattaagtttgaaaatttaaaatttggctttttctttggccgattaggccagcgcgggtcgttcgtaccgacgtgtctcattgcaccatcattgcgcgtgtgcgcgcacctacatgcatgtgtgcgtgtctccgaggcaagtaaagtgtcaaagtcaaggatatgattgtaagtacccgatcgttactatagggttactggagtatatacaataagtgttcaatctctaacatgcttatagtttcttcttaaaaaatatttgatgtgatgtatctccctccaaatcttgttttttttattatggtagtaattcataataagtttagttttagccccctgtttattctaaaataaatttatttacgtaattattttatcaaaatttgtgaaggtagaggataaatatattgggagtatataaagaaagaaataattgaactgttatttgataaaatatgtatattttagttttttgttttgtattggtatgcaaggaatgagtcaaaaaatgaatttattttgataggaggacatactaggcatgggatgtacatcttagaaatataaatgcccaatcgtgt

SEQ ID NO: 35624 - DNA, 621 bp, Oryza sativa
aatagtgcgagcatccatatggcattcttttattcaaatactgacaagaatgactgtgggttcatgcaagatgccatctcttgaaaaagtttgaagcacacaaagcaagtacttcaacttattttccttgtgaaaagctgcatatccatccaataataattagattaagataatccccttttcaatatgcaattgttgcagaatagcatgtaccccatgaagcatatgaatattccactaggaggaactgttcttaccaaatctatcattggcacaatttacggtctatcaggattcaggtataactacttaaattaaaaacgaagtttttgttccctttacatgtgtggagtgaacagcatcaccggtctattctccaggaccactcaccctttcatcacccaactctcaaattgcagcagatgtgttcaagaaaacgaacatcgtccagaatagtctaccaaattaatgagccagtgtacgtgcattttctttttctttcatttctttttttagtttttgatttggacaaagatcttatccatacaatcgaggactcactcatgacaagcagcaagtctattaccattagatattatcaacccccagttaaccactgat

SEQ ID NO: 35625 - DNA, 568 bp, Oryza sativa
gcgaatattccctcccccctcgccttcctctccacgccaaagccggcaaccgcgccgcctccgccgcgcccaacagctcagacgctaccggagtccggcgactcgacgcgacgcggcgcgacgctcctccgccccggcgatgctgcggcgcgggctcctcgtcgtcaatcgcctccgcaatgtccacctccagcgtctcccccggcatcgcacgcactgctcgagcggtcccgcctcggcgccgtcgacctcgacgacgtcctcgtcggcgccgctccccgtggccgcgcctcccccgccccaccacctcgcgccccgcggcggcggcggcggcggggggccccgacgccgcctgaccccgctcctcgccctatccacgctctccctcgtcacggccgcggggacgatctaccacatctccgcgtgggacctggaggggacggtggagaggtccagggcgtccgcggcacgcgtggtggagcggatgcagcacacctgcgcggcggggaaggtgctgtgcaggtcgctcatgtccgtgctgtcgtccgccaaccacgaagtgaggtcc

SEQ ID NO: 35626 - DNA, 598 bp, Oryza sativa
atatcgaggtagaatgaatatcgcctgggatttgggtgtttgctagtcgtcattagaattggatagtatgacgactaggttaggtgtctagccgatattgatagacaatacaatggctagagggataagaagattgtgaagctttagcggggtggaagtgttactccgataaccgtgagtggccacggaacggctaggatcacacagagcccgagagctaactgtgcggtgtgctatggaggtcgatggaatagtgaagctccgaccactatacgcatcgaggcgtggggtgccaggagcagcacttcgaccttaggtttggttttgccgggctttacaaccgacggtccgacgtcggggtcggtagaccgcacgaacgttcccatgaaaggcgtaaagttccaaccggcggctttttagtggctaaagggtattttgggttaaaaagaaatatttgaaaaggcaaacataaattcaaacggcatttgaataaattaagaaaattcaaataaatattacaatagcaaatttagtgccaaaaggtaggatttgaatttatataaatttaggtccaagtttcattggaatcggatcttga

SEQ ID NO: 35627 - DNA, 609 bp, Oryza sativa
catcatcataacaaaggtaaataggcatggctagataaaacagtgataacgcgggaatttaaataaagcgataatgcaataatttaaatcaaaataattttataaactgggattcaatatgttataggatgatgtgacttgccttgctcgctttcccaaacgtcggcttcaacttccacgaagagcggatcttccgaagctgcagcgtctacacgaccaacggaaaagaaaaggcttttactctaataaactccatataatcagcagaaacaaagcacaaaaatgggttcttgacttcttaaggaaaaattagagacttgaacggtccaattccgagttcaaatggccaagttatggccatttgaagtttatatgctctttaaatgaatatttgcgaatttcttcatttaaattttaattcaaaaatggatttattgcgtcaaccgaggggaggggcgcgcggaccgggtccacgggggtggggcccacgcgtcagcctcacggtccacggtgaaccgggcgcacccgggcgcgcaccggccggcgccgtgtgtcccacgcgtcagccgcacctaagggcgcgggcggctggcagccaagccccacgcg

SEQ ID NO: 35628 - DNA, 516 bp, Oryza sativa
gggcggacctagggggtgtgccgggttggcaccggcatacccaatttttttggaaaaaaatactaggatgtagtatgaaatcaaatgacataaaaatggaatcctctcagaaaatagaatataacaatgatcacggtttagaaatcaaatcaggggaagaggaaaggaatagatgaagagaaacagtgggggggggggcagctagatatatagattaggacatgggattgattgttctgaattttattgatttttcatgaattatgggccatatttgaatagaattttgaaaaagccgaccaaaatctgtcgaaatttttccatcaaaattaggtgttttctttttaaaaaaatatatggtggagtgatcgctagaatgaacacacccggtacaatttttctgggtccgccactatcgacgtatgacacgcgacagcaggagcacgaattttaagttatatatataagcctattaagtggcacgtacggacgtaggtaacagctgccaattatatt

SEQ ID NO: 35629 - DNA, 856 bp, Oryza sativa
  unsure (1)..(856): unsure at all n locations
ttgattatgtaataggtaattcgagatgggaatnnngccttggattatgggtatcctaanctaacatttggttntcgaactnnncanncnnnnnnnnnnnnnnnnaatttttttgatggcttttaagnaacnncagcnngnnagccngcagggcgacncaagaggaacccccgcgcacggagaacaaaaccgcannannagccgnggannanaacgacccaaggcgagcnnngnccgcaacncggcgggcancgcnaanncgccgcaacccgcaaggaacaaggcgcccgngaaccngctcccttnggaagcatagggaaccaacggcacncccncngggncgaanaacaaggcannnaaannngngcnaaancaaacgccggccaaaagaaccaaaaagngaaaaaggggataagcatngncagcaagaaacaaacttacttaaaaaatgttattcaattataggtttataattgatgagataatttggtactatagatattctacttttttttctacaaatatagttgatatttaacataggacaaacctgaaataacttgtaatataaaatggagtagcaaactgacgtacagttggcctcccgaagattagcagatatgtgttagattaatatatggagtatagatttgttctgtttgtgttaggaggaaacaggggagggttttgggcttactctcaccgacaattcgatcacgagatagatgcattaatagatgtaggaagatctgtctatgttccttatccttgcttctcctgctaattaatttgctgataaggggcttaaacctgtacatagccatggcccggaaccatgcttggcacgggagggacg

SEQ ID NO: 35630 - DNA, 792 bp, Oryza sativa
aatggtttgagcttaattacggcggcacggacaacatgacgggctaatagcgcacattcaaatcattaagtactactctagtactctgtccaaaagaaaaataaaatctctaacataagtagtatctaggttcgtagttagaattggacttgtttttgtttttagagacgaatgggtattttaaaaattttgaaatatatttattttttgacaatgaactttcgtaaatagtttctgtaaaaacagattatttattggcttgaaaaaacgtgctcacgaaaaagagagataccataagctaataagttcatcattattaaggtctcctttgattcaaaaaaaattcataaaaattttagaggatttcatccctgtagaaatttttcctatatagccatttgaatcaaatgagtgaaatcttttggaatcctataaaattcctatagaatgtctaatgccacgtaaatttttgaggaaatctaacacgaagttctacctcatggaaatcgcccttgaagttttatctctcctctaattccctgcgttttttctgccggcccaatcaaacccggcaatacctggggtttttcttatggtttggaatcatttattttaactcttaacatccattatcaaatttttgggtttttcttataataccatttcttcaacattgcgatttaaaggggccttagcctttaagaccatttttttattaatttgaggtataagatccgccgatgatttttacagaacaccgttattttggaaaagaaattaggttttaggatt

SEQ ID NO: 35631 - DNA, 569 bp, Oryza sativa
atctcgctaatctccgtggctgtcagcatcctaaacactgcaaaaacagaacgtaacaaaggtcgacatggacaatttcttttagtttcttttgttactcggttagcacttacgtacggttagtcgtccaccccctcctggacggaaacacgtccatgtccagctaacgtcgacgtctctattgcagatttgtaggtctaaccctcctgcttaactaaccaagcgccgtaacgaaaaccggcgagcttcttcctccaccgccgccggcctctgcaccggcggcgacgagccggagagagccagcgtctctcataaaaggagattaaaagttactacctccgttttaaattataagactttttaacattgctcacattcatataaatgttaataaatatctggattcattgacatatataaatgctagaaagttttataatataaaacggaggaagtactatataagacaacgatagtagcagctttaggttcgcgaatatttatatcaaaatctatggagaatttggcttctctagctatcctgttggatagattcgaggccgacttca

SEQ ID NO: 35632 - DNA, 740 bp, Oryza sativa
  unsure (1)..(740): unsure at all n locations
cgtgtcncatganatgcaacncagcttcgnacccataattaagnttgaaaatttaaaatttagcttttttttctgcttaatgggcaatccgatgggagccttaattaccccgactagacccctattaaggatccaaagaacttttaccaataaaggagctcgagcaccagccgctggtgtcaccattctcctcttgcaatttcaccaccaccgccacggcctctgcctctcgctctctctctctaggcggcgcaaatggcagcctgcgtcgataagtggccggcggcgtacccgtgccgcctgccggataagttctactgcgccttgccggactgcaccaccacggaccgtccggtggcgccggcgccggcggctagcgggagcagcggcgactacgtgtgggacgcgctgcgcgccgaggcgcaggacgacgcggacgacgagccgctcctccgcaagttctaccacgacctcgttctgtcgcggacgtcgctggagtccgcgctcggctcgctgttggcggccaagctttgcatccccggcgcgctggcggaggaccagctacgggaccttctcggtggcgcgactcgcaggcaaccccgtatgtccggcacggcgtgcgcaaccgaccttgctgagattatacacagcatccggcgctgaccaaatacggctacgtggtttctgtgctcaacgggttaaactgcttgaattacccatgacggagaacaccttttttt

SEQ ID NO: 35633 - DNA, 1532 bp, Oryza sativa
tgcagttgtaaaaggatctgtaaaagacgtacccgttttttcttccgttggcttgtgcctgtcatcgctttacagtgatttcgtttgctcgtcttcaaaggctcgtaatttggtctcatgttgtattttcgtattttgatgcccacaatctgaagaaaacgaaaataatgattgcgcctggaataatgaatgcgattatctcggcctagctcggtacagaaaaataggggatcgatacgggaaaatagaaaatagattaaaaaatctaccgagatcagtagtattacaaaaaatagaaaccttgtctccaagtacgtgatcacaggggattagaacggaataatatgggatatattatcttcaagtacgtctttttaaaaattgacccgtcctatataatctaggaacgatcgaccaaaaaccatggtttttaaaaatcgacacggtccagactgtcgtggacttaattttttatttgtccaaaataatccgttccgccatattctatgagcgatcgaccagaaaaccacggttttttaaaatcgacccgattcggccggtcatgcatggacttaattttttatttatccaaaataaaccgttccgctatattctatgagtgatcgaccggaagacaactgttttttaaaatcgacttggtccggacggtcgtggacttaattttttatttgtccaaaataaaccattccgctatattctaggagcgatcgaccggaaaccatggtttttaaaatcgacccgatccggactatcctggattccatatatggatttttttttcctgaaattaacataaaaaagagaaaaatgcatcgctcctagtcgggttgcggctgataggacatgtttctgattcactaaaaagaacatatgttttctttaagatcatatattattttttctctgcgctgtaatattcatgcattgtcaatcacttatctaggctcccaggttcctgtgaaccccctatatcaactaggctccaccactgttaagtacaattgcctttcttcaaaccaagagaagttcagaaagcagtttatactttccaatgcatgtatcgcctattgatttcagtgactgataattggcacaagcagacaactcaccatgtggtttatatgatgatcaagtcacatagggcaacaaagtcgtttttacacacaatattttgtgtgctgcctattaatttcagtttgcatcttgcttcaactagcttgatgatttatcatgtgccaataaaaacatgccagccatgtttaatatgctgaagtagaaaaaaatctgcaaggcttgaaaacctagtgttggatagaaattcatttccccagacggtacataacatatatactttgtcattactagtttatgctggaagggtagaaataactgcgaatgatgggagccatcatattgtaagtgtctcattatttgttctctatttctgttgctgcaaatctgtgtactctatagcttaacttgggcaattatatttgttggtatagacccaa

SEQ ID NO: 35634 - DNA, 782 bp, Oryza sativa
  unsure (1)..(782): unsure at all n locations
acggctttganattgttattctagctcggtacccatcaaagttataccattagatttgtaataaaaaaataatttatgaatgagttggacttaaacctttttattttgaagttgcttaaaaataatggtcagtttaagcacgctcggttaaaactaacaactattcgtgacaaaagcaacagaattgaatatatatatatatatatatatatatatatatatatatatatatatatatatatatatatatatatatatatatatatatatctctcacgcgagaaaaatatgtatatgtatagacatatatggtgctgatctctgaacgctgttataattaatttcagtatatatatgcatgcacaaactacatgcctttttttttgtgctgtaaagaaaaaaataatatgggtgagaataactataccccgatggtttttacgagttaaaatttcaacaaaaaactttgaacgatatatattctgttttcagaaaagcgcccagggtgttgtccacaagatctaatttattaaaatagtgatgtcaaaagctatattgtcacacacggggagagaacgggagtgttaagatattagcagagaagatactcggacgcccactgagcttgtagaaagagatggagaaagatgcttttttatgagaagatccacacacaagcaaaagtgtagatatgggtatctatatgtttaacacccacacatcaaattatgcgaagacggggtagttttcacgagtgtttcacacatgcttgcaaaactgtc

SEQ ID NO: 35635 - DNA, 707 bp, Oryza sativa
catcattccttgcattggtactgcattcgcgcggcctggaatgctggatccaagggctttggggcaggcagtattttctcccgatccgggagcaagcactggtccgatcaaatttgagtttctcccacaccccaccacggagaaacccttgaatcccgttgccaagcaatcaattttgttcggtgattggtagaagttgctcaaacggaaagaaagccctccatatgagcttaatataattgcattgttgccgctcatctggtccacccttgacgaccatcattgtccaaggattccgattggccctgtcaaaagaaaaaagaaggacaaccattttattctttcagagttcaggtattttgtaacaaacgtcagataaaagagggcctgaactagtgaaattcatgtcaaaaatatcagagtagtgttgattgcatggcttaaagttatactccacgagcagagtaattatgtgtcttcactgcaccatgggcggattatattactatttcgacatgacagacatttcttgaacgattgcatgacaaattcagataaacaattaactgtacaagactaaacactttttactaagaaaaagaagctaatggcaataatttcaaggaagcatgcattctgtatgacagaatcatgagcccaacaattgcttcctgaaattaagaacacacacgatggttaaaagaaaa

SEQ ID NO: 35636 - DNA, 530 bp, Oryza sativa
caacgtataataatgcacacaagggtattatgatcatttggactcaaatctgtaatcctctcaaatgtttatgttatgcctgcaactaggtttagtaccataatttttattgtacagtgtgcgttgttgcttgattactacacaagattaatataactgtctttttcgtcaataagttagagatagccagacttttgtctagctgagctcttggtatttgtattactgaagtgcatgggtttccatccatcatcctgagcatcttctatgtttcaactttaatgatttgttctattttcttttcatgtacaaaaacttgacaaatgtttctcccccatgtatcaggatgcccactcatcgccaatagatcgtccagccctgtggaaaatgctaacctcagtcatcaggatgtgaagccaattagaagtgacatttctttgatgggaaaggagtttaatggaaccctagggaaacatattggcacttcctgttcttgtagcagtgaaaataccattcatccttacggtgac

SEQ ID NO: 35637 - DNA, 751 bp, Oryza sativa
cgcgctgaaggtacatgagatatcgtggcccaataaacttacttagcttcccgcccacacgcgcattggatttggatcctctgactttacatgggtaaagttagagagctagagtgctgttgctacagtgaaacactacgtattactgtttctgatgtagcacagacacattttactgttagggtgtgtttagttagggaaaaggaaatttttgggtgtcacatcggacgtttgaccggatatcggaaagggttttcagacacgaatgaaaaaactaatttcagaactcgcctggaaaccgcgagacgaatcttttgagactaattaagtcgtcattagcacatgtagattactgtatcacttatggctaatcacggactaattaggcttaaaacattcatatcgcgattttccccataactatgcaattagtttttctttttatctatatttaatgcttcatgtatgtgtccaaagatttgatgtgatgtttttggaaaaaaaaaattatgaactaaacgggcccttattctctgtcttttccatccaaggtcagaggagctggatccacgcgcattgtgctccaaatctgatggtgggtagacaaactcgttacgtgtttgcatgccgttcttgctacgacgatctaatcttgtgaaaaattcaacagtgttatattttcgagaaaaaaatggtgaacaatattttcaattttttttcattagcaataatttcagtcgtcaaggcacgc

SEQ ID NO: 35638 - DNA, 718 bp, Oryza sativa
aatgatttagcatacttgttaatataaatgggcacagaaagcattagaggtaatgattaaaatatacaatcaaatgagtgcttcaatattaaacacttcgaataatcaatgaaattccaaaacacaaggcaatcatgtgagcaacaaatgaacaatagaagctttcaaaacaaaatgaacaatggataaaaaaggcaagtaatttgtgtggatgcagacagccaacattctgcttgttagcttctctttggggagtgaatattgatggcttccaacaaacatggaattgttacagtggcagaatccatagggatgtaatcatcagcacttacttccatttcttttgtttcgataaagcatatattttggaccttttggcttcttctgttgtttcaattgtttatcatttcagatttccatgtccgaagatataggctgtgttcggcactgttcccaaaagaacagtgctcacggaaaacggagcgatccattagcgcgtgattaattaagtattagcttttttttcaaaaatggattaatttgattttttttaaagcaactttcatatagaaactttttgcaaaaaacgcaccgtttagcagtttgaaaagcgtgcgcacggaaaacaagggagatgggttgggaagaaggggtgccgaacacagccatagtcagttgtacttattcggtaacgggtaccgagctgaattcgcctata

SEQ ID NO: 35639 - DNA, 635 bp, Oryza sativa
tttgaaaaattctagtaggctggtccatcatttgcctgacccacagtgattaggttatttgcatacatcagagaatgaagaattgtacctcctgtcgtcgttatccctttaatataacctgattgcctgcatctaaaagagactcagaaagttcattaattacgagaacaaataaataagaagataaaggacatctttgtcatatctttatcgtgttctctcctctactttatcatgcgttatctccgtctaaaatatattcatgtgttctctctgtcttaacatatactcctagatgctttgtggttcgaggcagccgtaatatctcaattccgttatactagtacttcaattccacacgttgagacggagagaacatgggaaattctaggaagcgtcatttgagaccttacagcaggggacagcgagtacagcgagaaaattgatattttaccatggtcaaaaactggatttcgctggaatgccactttcaaaagtggtttcgttaaaaaaccaccctcaaacaggagcaacatattacaatgtcatttcatccatttcttctcaaattaatgattttttaatgtttttttattgctgagtgaccaaaatagcattggatcctatctcatctc

SEQ ID NO: 35640 - DNA, 982 bp, Oryza sativa
cacatagatttatactcctactttttaattttaaaatatactccatccgtttcacaatataagtcattttagcatttctcacgttcatattgatgtgattaacatctagattcattaatatcaatattaatatgagaaatgtgagaatgacttatattgtgaaacaaagaagtagcaattacgattggatacaacatatcctactactatcaatgtggtactgttctgatttctatcaatgtggtactgttctgatttgtagtaatatatatcatgtttgatgctgaggccgagtttagttccaaaatttctctttaaactttcaacttttccatcacatcaaaacttttctacacacaagctttcaacttttccgtcacatcattccaatttcaaccaaatttccagtttttacgtgaactaaacacactctttgttactctctcaatatcaaaatatagcaaatagtataagaataaacattgtactactaggttactatatttaaatataacggagataagatattttaggacagagggagtaatttcagttcggcgagaggcgacgaccatggctatatacggtccatacggagaatgcagcacgcgatggagatcccctcttgctcgtcacaaatctgaatatacggtccatacggagaatgcagcacgcgatggagatcccctcttgcttgtcacaaatctgaatgcacgagggagagagtgagtgtcaacctcaaccggattgatctaggtgaagtccaataaagctttgaacagttcgtcattataaatcccgatacgcaactactgtttggctaatttggtatttggacaactatcttacggtccagaaaaatggcaagtggcattgtggcgacctcatgttggaggatgaaagggatgtttgaacaaatctcttactaggccattccattgtttcgcttattcatacgttgattcgaaatcacttattagca

SEQ ID NO: 35641 - DNA, 700 bp, Oryza sativa
tgagattttaacatgattttagtgagattaggtatatgccgttagttttcgtctcttagagtatgtgttaggggacgttcgtagggggtgtgagtgtagtgttgcatgtgtagtggtgtaatatataatgactcattagtgtacaattaattacttcatccgtcctaaaataagtacaattctctaaatttgaattagaggcgtgcacttatttcgaaacgaatgaagtaaatattagttcaaaatattttaaaatatatattaatatgttttttacactaatttatatgtaaaaagtttatataaaaatatattattattcgataatttgaaaaatatgcccatgaaaagtttggaaaagtgaagttagtaaaagagaagttgggaaaggagcagtactacaattctacaaatgtacaattcaacagaatttttttgagaattaatattatttttatggaaaatcgcaaaagtagtggtcaaccggagaaaatcgcgaaagtaggtccctgtcgaacgggtgcagttcgatagggcgcctatcgaacggccagagcgcgactggcgaggagatcggaaggctgccgttcgacaggacctgtcgaacagcccccgttcgacaggcagggctgtcgaactgcccctgttcgacaggagggctgtcaaactgcccctgttcgacaggatatccgtcgaactg

SEQ ID NO: 35642 - DNA, 514 bp, Oryza sativa
acttggtgccccgaggcttagggaagatgggatgatccgatggatgatggcgtttgtttgaagcaagttagaatgtgacgtgttttacgcgggagtgcaaccgcacccagtcgccagccgcgcaggtatgtccgtatgtccagaaaatttctggtttttgcgagcagtgttattcttctgggacggatgttaaagcagttcaaccaattttggactccggtcaaaagctattttctgtgtgggaagataccattgtgggccaccagtttaagaggatggtctgttttgacatttttcacatggtaaaagtccattatacatccctcaactatagcctttgtctcatacccgtcccttaatcataaaaccagatacctccaactttctaaacctgtttgttttacctctttgagtagtttttataccggttttatcctaagtaacacccacattattaaataccaacgggataccgtagtctaggttttttgagagggctgctacaaaacgggat

SEQ ID NO: 35643 - DNA, 624 bp, Oryza sativa
agaaaaaaaacccatcgttccaccaggatcacagcaaacgcccattagcaatttttgagaaaatgctaccaaatactaatgttaaattatactccctccctctctaaatttgacgccgttgacttttttaaatatatatgaccgtttgttttattaaaaaatctaaatttgacgccgttgacttttttaaatatatatgaccgtttgtcttattaaaaaatttaagtaattattaattctttttctatcatttgattcattgataaatatatttttatgtatacgtatagttttacatatttcataaaagtttttgaataagacgaatggtcaaacatatttaaaaaagttaacggcgtcaaacatttagggaaggaaggagtacaatgcattgattagttggtaaaacctaaaaggcgcgctaattgagtggtatattctcaaaattattgtcttgtgagataatatatagaagactattttaatcttattattgttatacgaaattcactgtaagaattcgcttgaatatatatttttctgaaaaaatcatgagctgcaattaggagttcgatcatctcaagttagcatatgaggtttttttaagaaatttcttatataact

SEQ ID NO: 35644 - DNA, 537 bp, Oryza sativa
ggaatatttttgagggaaaaaaaaggttaatgaatagtatattttcaaagttagttcttaaccttcctgtgtttctaattttatagtttttaaaaatcgtacctattgctacccttactcctatcgctcccttcgttatttgctcgatctaccattgtttttatttatttttatggaacctttaaaaattaaatcttatagtttttaaggtttattatctcattagtttttatttttataatttttataagtcccgtcaaacaacgatacctttgtatactcctctaatgataatacaataatagtgtattgcgagtagagagtatagagaccactgtaaaaggttcccagtgcataaggccaataaccattcacattttagagcttgccacagtaatagtccgccattttcagaagctttctcaccagcgctctggccaaccaattgtcacgcagaaagctgatgaccgcattgctgctctcctgcatgaagccaaccacgtaggctgtcccgatgagctcggcgctcctccaccg

SEQ ID NO: 35645 - DNA, 723 bp, Oryza sativa
cattcgccctcgaattgaagaacttgtctctaaatttagtgttcgagacttggtcgaggagttcatttatcttggtattcgacctctttctgccaactggactttatctcttggtgaaattcctgagggttctagttctttgcttcctcctttcgagatatctgcgaatagtaagtgtttaccttgtatatgtattttttatttcaagcattatatatatatatatatatgtaattcatttttttcttctttttttcttctctttttttcttttttttgcagcaaaattgtgaaggacgtggatgggccaagcaagaaatatattggcccttataccaagaaagagcatggcacatatcttgcggttcagcaaggtagaaaacaaaacaggattctaagtgccctcggccaagatatgatggttcgagttcatcctgatttgaagaagaaaaagaagaaaaactcgaatatcaatccaaaagatgctgcatcttcatcttctgataatgaggagaatagcttggatggggagtctgattcaagtgatgaatcgtctgatgacagcggctcctctgagtcgagcgaacatactcacactgctccttttgtgcaagaaaactcgagtcctgctttgaagcgtaaaaagatgccttcaagttctcctgttgactcgaacttgaaaaaagttcgaattgctctggatagtgatgatgaggatgaaaa

SEQ ID NO: 35646 - DNA, 552 bp, Oryza sativa
gtgccgagctctaccccggcccctactctttttcccctatccgcctacgaaacgccgccgccacgttcaccatctctctccgtcaccattgccgcctccagccgcgccgcatcgcctctctggtccacctcgcgctgcgccgtcgccttccccagcaccgcagccatcgtgcgcagctcggcatccactccatctccctccttcacccccgaagcactgctcccaccgtgaacccgagacgccactgccatttgccacctccagctgccgcttgccgccactccgagacatccccggccgtcgcaccttcctccatcagcttcgcagcgacgaggggaggtccggcgttcgcttctcgtcgtcgggaacccaccggagctccgtcctcctcgcgcgccggtaagctccacctctcacctcctcctccggccggcgattcacaccgtctcgggccacttgtccccatcctaacctctctaccaccctccctaggtcgtcccgcgcctcgggcatcctttccgcaccactggtcgttgcccgaggccgcccccg

SEQ ID NO: 35647 - DNA, 544 bp, Oryza sativa
tacagccattgccatccgccgtgatagtgcgggcgttcggtggcgcgtgcacctcgtcgaacgcatcgacgtgttaacggtaaagtaaggcatcaatcagcaggatgatgagtgttaagtcgagtcaccatcacttgcgacgatgccaaaagaaaagaaacaccgaagcttcggtagttaggagcatcaacaaaagcatgacatctcccttagctcttttccaattccaaagtccaaagatccggaggcaacagggaagagacggataagggcatcgcatcgtgatttaatacacatccaaatacctaattatcacgccgaccggatgggccaaaaggaccagccaactaccaaccccggtcggctagctcgcgagctcgatcgacctgacctccgccggcacgcacgggcggaacagcgcggcaacatggttgatttcaacgattatgcgtagcaataaacatgatgacgtcgcgcgttgttgagggcagtaatggcctatagggccgtacgtaggtggcaacaattaactgagactagagac

SEQ ID NO: 35648 - DNA, 531 bp, Oryza sativa
aataacactgaaaaatggaccatcatcagccaacgaacggttgctcgctttctggaagaagcaaaagcacagacggccaaaaatatcacgtaccacgccaaaatattccgaggatttttcataaaagaaaacgagaaacaaatggtaggagcctgcgttaagggtaaagaaggtgagctaccaagaccaaatctgtacgaacatcacaaggaaaaaagatgaacgacatgacaccaatcacaccatggaactcctgaagttgttgcacgagtggaaggcttcgggtgtgagcttgatttgaagtgttctttacagcgaactacaaacagagtaagagaaaacagggtgaccggcagtaaggaatgcacacgctttactcctaactttggatgcgatttggcgctattggattcaaacagcccgttctcgccgtgttggatgcgattcgcatgggctggcccgagcgcaacgccaccgttgtagttgcgtctatatcctgaaatctaaggctacattaaacatagaaatgtt

SEQ ID NO: 35649 - DNA, 634 bp, Oryza sativa
gtgcttatattttgggacagagggagtatcaaacaacaaaaactttttcagcatcctgaccagcatcaaatgttccactatgaaatataagctctttcacacctctgttcatgaaacatttggatatatgcagcagtacttatggaaacgtgtcatgtcagcaagaaattgaaggggaatgaatccttgaaaagcagtatcacatacattatagcaccaattttgtatctcccatggtggcaccaagctaacaccatagagtagtgtacgtctgtcatgtaatgttggagtatcttattgcataaacaaagcatgccatatttatggatagccgtatctttttagtatttgtgctcgcattcagttcagttgacctgaaattatatccaactgaaacaaattccaagtcgattacaagtaatccagtatgaaatctagcacagtgtgaatcatctcaagaacacgatgtatctcaagctgacaggttataattatgatctgtgcccaatgtgctagtttagaccgaatcatagtaatgtactgaattacttaaattgtgctagttatgaaatgataattacttaaaagatgttgattttagatagaactgcaagttttattatgtattcaccat

SEQ ID NO: 35650 - DNA, 685 bp, Oryza sativa
gttagaagacatgatacctaagtaagatcatgtgtaatatctcacatgtatcaaacttaatgatacttttttgaggagaaccatgtgatgctatagaggtatcacatgatcctacaagataacaagagtaccatgtgatcctacaagagtaccatgtgatcctcaagagtatcacatgatcctaatagagtatcatctttgaaaaccacaagaatcatgtgctacttgtgtgaaaaatttcagcaatcacataagacgccggattgcagaggaaattggctgacgacgtgtgcgccgatggaatcagccgagaaaacaagcatggaggcgcgcgattccgcggatgaatcttcgggatgcggaggagctcgcgccggcgaggaatcacgcacggaggcgcttgattcctaggaggattcatcgggttgtggaggagctcgcgccgacgaggaatcgcgcacggaggtgcgcgattctgaggaggattcgttgggttgcggaggagctcgcgccggcgaggacgcgcgattccgaggctgattcgtcgggatgcggaggagctcacgccggtgaggaatcgcgcttcgtcgggttgcggaggagctcgcgccggcgaggaattgcacacgggcgcgcgattccggaggaggattcgtcgggatgattcaggcggggcggtgagcac

SEQ ID NO: 35651 - DNA, 637 bp, Oryza sativa
tcagggattaaaagaactgcacaaattaattaagagcagaggccatcggaatggataaccttcggatatataagaacaaaatgattattaggatttccatgtgagattagacagtggaagaaaatgatatttaaggataattcaccaggaaggtttcaatcatgaacaggacacgtgtccccatggagagagaccatacccctctgaccctgtagtccaatcccgggactaattgttcgtagtctaaatatgcttaatacggtcatattccaaagctagtgcagtctaatcgctttctttattctcttatcaattgccgcgttcttcaaacatgggcgtgttagtgatttggattgcttcaatggtaggtgaccgtgtggcacgccaaacctgcaaaatgtgggcgaaaaggacgtgggcatttcattccggataacgaagaccttgatgaacattgttgactccctgtctggaacgctgaaatttttgttattttttttcttattcccatgtgaaaattgcacagaacatgtgtagatcacagagctagaattgctgtatacaaatattgccgaggtgatagttctggatttcacaagttgcaggtagatcagaaaatgcagttgttctgaaatgg

SEQ ID NO: 35652 - DNA, 811 bp, Oryza sativa
cccctagcatatgaagctatttgctgtcacgatgtccaagaagcaggatagctaacaagagaacatgctattttatttcaaattaatcaagctgaacaaaaacaccaaagcttcaaattcatggaaatcctaactgtttcacccacccccttacgtgtaagcattgaatggacagctactgcgttaggccatcaatggtcatcatcatactaactcgttatggtatgatatttttccattaacaggtcaccgtttttgcattattaattaaaaacagaaagattcctgagttagttagaagaggtttggggtatggaagaacagctctaacctcatattaaactctcactaagtcactagcacatatatgtgtggataaacaatctcagcacaagaatcagtgattttctctgatctcgcctaaggatcaccacagatagggacagcctaatgtgggcattttaacaacaaagttcaactctacacagcctacgccctacggataaacacttcgttgcattttcatcagtcaggttcctggacattgtccacatgcactgtcaccttcatgttcttttcctattgatgtttttatcctcttatgtttaaatcttttgctacactacatagctgggaaaagaaactttgtgaacgtcgtcctcataacttgatcatgttccttgtacaggaaattgcgaagaggttgcccaggccaacggcgtcttgataattagcttcggtgtttgttgaagtggaacacatacaagctggtaatgtgcatgtaacatctctgtcagggcaaaaactgctg

SEQ ID NO: 35653 - DNA, 751 bp, Oryza sativa
aaagatcatatacatataggatcaattcagagtttgccgcaaggatagattgatatagcacaccaaaccttctgaaattgtcgtggcttactagaataatttcgtgcatatattatttatttattaaaaaaatgcttagcaggagctctttccattcactaaagaaagaatcatatagaatagagctggttacaatcagaacaccaaagagagaataatataggattatttctgggctccgttcgtcatgtatcttaacatttttgtcttgagcataccataacctcaccttttcttttttatggaatttcctgtcttttttgtttactctactgatagattgcatctactgagattacaatacactgaaaagccttttctctattaccatttaccaaagcacatatttatagatgggagttgtctgaataagatccttcttgttttagtatccactataacaatcataacaggaatccaacctaatgcttgtgttttgtcttgcttgagcacgcgtcatattttgtccaatatatggaaatagctaatcatctcctttattttacttctttagattgcacctgccgagcttgaagggttacttctatctcatccagagattctagatgctgttgttatcccgtaagttgaaccacctaaaaatttaagtgtttcttgctccttatgatataaactgttcgcttgttacaacattgttgttttggatcgttctctctctgttgtgccttgt

SEQ ID NO: 35654 - DNA, 599 bp, Oryza sativa
ccctctcaaaaaacctagactacggtatcccgttggtatttaataatgtgggtgttacttaggataaaaccggtataaaaactactcaaagaggtaaaacaaacaggtttagaaagttggaggtatctggttttatgattaagggacgggtatgagacaaaggctatagttgagggatgtataatggacttttaccatgtgaaaaatgtcaaaacagaccatcctcttaaactggtggcccacaatggtatcttcccacacagaaaatagcttttgaccggagtccaaaattggttgaactgctttaacatccgtcccagaagaataacactgctcgcaaaaaccagaaattttctggacatacggacatacctgcgcggctggcgactgggtgcggttgcactcccgcgtaaaacacgtcacattctaacttgcttcaaacaaacgccatcatccatcggatcatcccatcttccctaagcctcggggcaccaagtagcgttcggtacagacccccatcctctcccactagctcatcgcctacgaatccccgtccgattcctgtacgcttcttgcaggcttgcagctctcaacctcct

SEQ ID NO: 35655 - DNA, 515 bp, Oryza sativa
aattcgagctcggtaccctatggatattggaattagtattagtggcgctaagttatggtgacattttggttcgttcataaataaattgtgaaaaatatatatgctcttacgtgagaaaaatataatgctaaccgcatatcctgctattagctgattcagtggtagtaggtgatctaacttgatgacgatattcagagactactagggcctgtgcatctggtgtagtggtatggtattataggtgtgtttagtccctgaaaaaagttgaaagtttaggaaaagttgggagtttggaaaaaatttaaaagtttatgtgtaggaaagtttttgatgtgatatgatgtgatggaaaattagaagtgtggggtagttggggtgaattaaacacggccatagtacccttccacgataccgagtcaggttctattttccggatgcacattttttttcaatgcaactaagtactatcttagcccgcattttcgtttttgcatgtgctatctctgcccacattt

SEQ ID NO: 35656 - DNA, 507 bp, Oryza sativa
tgtcatggtctcaactggagaaaactatccgtgggtctgcgtctgtagtgggcctttgaagtcaacccccgcacaatcaacgataccatttgcccacatcagttgggccaattagtggtctagggggccatcaaccagaccggctatgtttcatagagggattgcagaatttcgtaacatatgctctttagagtaaatatatttttacttatcatacatatttttttatagcatatagatgatttaagccgattcaaataatcattgcgaacatgattaacccctaaaattacgatgtaaatttaacaacaagaacgaagcaaaatcctatcctagttttctaactgaatagatgtgaatgagaagatgatcaacaaaataggagacctcactttatacctttgccatgataaatagtgtggtcgggtgggagtggattgtgaggacggacaatgacatcctcctggcttggttggttagtgatgggttccctaaacccttaaacgg

SEQ ID NO: 35657 - DNA, 693 bp, Oryza sativa
atgttctttcttttagaacttgttacatcaaacattaaaagcacaacacgtgcacaagggatacatttgttagagtacgcagcctgggccaccgaccatgtcacccagatcacattgggcctgctccaatacaggcccaaccggagccacaactttaggtcctgagcctacacaacccaaaagactagctccggtttggaacccggaacaatttccatgggtcacatggtggagagcccgggtaacaagttttcggggtcacatggggttaatgtgacgagggagattgttgggcctgaggccaggtaacaagtcttcgaggtcacatgggttaatgtgacggggagattgttgggcccgatgtgtgacgagggagattgctgggtttagtcccacttaaaaggtggggcggtcctcaccccatcagactagtcttttgggttgtgtaatcctaggacctaaagttatggcttcggttgggtctgtggtggagcagacccaatgtgacctgggtggcccacggttggtgggccgggctgcgcactctaacaacatttcagctgctcaagaggcaaaaagcaggatttgtttggtggaactagtatttgctattacaaacatgattaatatttttgacagcttgctataggcaaaacaacccttgcttctctggccttttcctagataagtaat

SEQ ID NO: 35658 - DNA, 1001 bp, Oryza sativa
atcaggaatgtcacagaattttaagtgaagattggcaacagttggaagagcctttctattaagtctccaaataaaagttttaaatttaggaggaatgcacttagtggaacagattttcaaaagaatattaagctgcaaagaagtaacaattgtgaaaactgaatgtgatagattatatacctgcttgtatgcactctttgaagtacattcacctgaagaattatgaatccagcaaattttgtcttcattgtcccgaggaacgatctgaactttcattatatgttgtaccattggctgatcaaatatttgattgagtttgctcagttcccaacatgtcctgtcatcccaaagctgagaaatagtattaggagatgcatttgcaaaaatcattccaagaccgccaggaaatacctttcttagagccttcattatgcactcttgtccaccaaaaccgcgctaataatagctgtcaacttgttcaataagctcttagaatgtaaaatcgtggacatacagtaaatagggattgaagcgaaaacatatttaattaaagacaagtggctagcatgagagagcatgttagctttaagagaggtaagacgagctttgaatttggaaataataaacttataagcagaagctctagttcttgtgttaataatcaaagggtgaccaagatgtttagtggaattttctatcagagggacatgaaaaatattgagaatttgatgtttttgttgattaggagtgcttgagctaaagaaaatagaaaattcccccagttaggagtttgaacagattgagcacaacaagtttgaacagtttgaaaaattctagtagcttctccatcatttgcctgacccacagtgattaggttatttgcatacatcagagaatgaagaattgtacctcctgtcgtcgttatccctttaatataacctgattgcctgcatctaaaagagactcagaaagttcattaattacgagaacaaataaataag

SEQ ID NO: 35659 - DNA, 657 bp, Oryza sativa
tattaatagtatagtaagaaactattgtatgaattggctatagatgaattggaactagtagtgggctatactattaaacttgctctaaccaaggcagcttatagataatttgtagttagcctgttgtatgagttggcttcttaagttagctctatcttaacatgataaaattttggagcttaccgcttgctgcactattgaccttgcagggatgagacattcattggagaggtaatgtcctatccctaactagattggatttttggaacggaataagttggtacttgtaggctcaatgctagaggatagtggctgtgttcgtttcccccaattaggaactagtgccctacgtacggaaaacggagcaatccattagcgcgtgattaattaagtaactttcgtatagattttttttttacaaaaaaacacaccgtttagcagttggaaaagcgtgcgcgcgaaagggattgggttgggaaccctaaggccgtgtttacttcttgggtgtaaaatttttgaagtatacgtacacacatttgaagtattaaacgtagactaataactaaacaagattatgcctgtaaattacgaaacgaatttattaaacctaattaatccgtcattagcaaatgtttattgtagcacctcattgtcaaa

SEQ ID NO: 35660 - DNA, 756 bp, Oryza sativa
cctggtttgatttggaatgactacgaaattaagtctttctttggctgtgcctttgtggggtctgatcttggttgtgccttccagggcgtaatatagtgttcatatgtgaaagggcatgtagcttagtgattgcagtgacctgagtagcaccccaaggtcctgagttcaaatctgcataggagtgaatttcagattgtgttatttgagggctaagttccttgtttgataggctaagttcctaatttaaaaaggttgcatatatccggttggatgtagaggccgggtaaaaaatctctaaaaaaatattgattcgatagaagctggaaaatgacatttaagtgcgggagactgacaattttgtcctataaatataacctcattgaggcaaaggacatttaatttctttttgtttctatatttatacttaaatccttaaagtgtgttcgcgtgtgtgttggtgataggaaattaagaatgtcaacttgcaatatctgaataataatggatattttgcctaatgcagtgggcattgaactggttcattcgtaaactagtcctatcagatctgtttggatcaatttggtatattgtatgtgctatttcagtctgatgtggtccacaggccaacaccaagacaactcgtcaagatgtaaaaacttgctctaaaagatgtgatttctggtctgtagccaactgttctagactcaaaaggtgtgcaggcatttctagtgtgtcttcaaactgcaacttatgaca

SEQ ID NO: 35661 - DNA, 534 bp, Oryza sativa
cacacattctcccttgctgcattaattgtattccgatgaaatccatgttcatgtggttatatgatgatcaatttgggaaattttgaatttcattatatgatgatcaatttgggaaggagggagtaatgtgcaagaactttaccatatgatggtttagtatacactgagcactctgcatacctagcatatctactatagcaagcctttattgcatggtcatttgttcattcttagttggttaatgtttgaggctgtttttaaatgccacatacttatgcatattgcaacagtatctcaattgtgtctgtgatgactttgctgaatgctgatgtatgcaggcactgaatgctagttcaagagctcttttgatgcagaaattagaccgtagcggcgttaccaccaggtatatatatgtgagcttaatgggttaaactatctttttggtgccctcgtggccatgtcaatctaactacatcagtcatattcaatcttacatataacctttgtcccataaatactccctctgttttttaa

SEQ ID NO: 35662 - DNA, 753 bp, Oryza sativa
atttatttgatagaaatataccgttatctcgtataaccgttggttgaaaataatatgggcatgacggcacggacggcgcgagatcgcgctgtgtcacgcagtgacggtgcaagaccgctcgatctcgcattaccagcgagcgagaccgaacaggttggccgcttcaaattaattaattatcctgattagcaatttattaattaattgctaattaaaataattaatcactaattattattagttagtcattaattgggtaattaatcacaaattaaattggagccgttcgacatggacgtcggtctcgctatttccatatgcgagacagctcggtctcgcaatgtcaccgcacgacactatctgtgtcgtcacacccacgtcatttttcacttaatggttctgcgagatcgatagtatatttgtgtaaaaaaattgcatcccgaatatttctgagagaaaaaacaaatgaatagtacattttcaaatttaattcggggagataaggtttggtttctcaaaatcttaagacaacgagatatctaattaataaactttatgtaaaattattttaaaaatagataattttgtatagatgctagccacacaattgtgtgggtcacgcatctagattttttaaaaaatgcattatttagtagtttggaaaagtgcgcacgaaaaaacagaaaacttttctcttttttttgctattgccgaacctagtgcctcttatactccctttgtcccaacgtataa

SEQ ID NO: 35663 - DNA, 633 bp, Oryza sativa
ctcaatcctacgtactccctccgggttaataatatttatcgttttagacaagaacacggtctccaaaaaataactttgaccattattttctattataatatatataaaagtgttaacaaatatatgattttattaaaatactttttaagactaatctatacatgtaatcaccatatttgaaagataatgattttaaaaatgattcataatcaaagattttaaagttggacctcacccttatctaaaatgacaagtattatcggtccggagagagtattaattagatggcatcaccgtgttatgcatgcttttctggttccgacagtattgatggatgaagtgggagtaaatgatgtttctttacgtaggaggtaaagaggagagaatgcgagagaagatttgagaatttttagaattccaatgaatctgtgatattatttaagtacttttagggacaaatctacgcattacaaatagttttgatcggactatttgtatccgtttcatatatttgttgaatattttcaaacagtacaaaatggtaatgttatagatgtgtggtacgttcaaaatattttcaatttggtctcaacaattcaaaagcaattagttgtcaacgccgaaattatcaat

SEQ ID NO: 35664 - DNA, 541 bp, Oryza sativa
tgcgatatgtagtgcagtctcctaacctcgagttcttttgagcagtctgaacaagacagataacatatgaccgtgttccagagtgcatcggtaatttgtgaaagttttcagaaaacagagaactctatacatactaaaaacacacaaagcctgttgataataagcacgtgaccatcagtgcctgttgctagattaattctatttacatgtgtatccatcagtgcttcacactacagatcaaattggcaagtcgatcgatgccactcacggcgcctagctcggcgcacacttgcacaggcaatagattcacccatcagccatatcagtccatcgcgcagcggcaagttgggcctctttcttgcctgcctcgtaccgtcgcgagagggacaactaaccacacgagcgcgcgcgcacgagcaaaagagagcacaggagataagcacgtagtagctaccagctagcgactgccatcccattgaaaggggccgagatcgatgcgtgcagcatccaaagcatatatgcatgcatccacctgattatt

SEQ ID NO: 35665 - DNA, 615 bp, Oryza sativa
gctgctagagggcccgcttaatataatatcatttcacttttcagatcaaatcagtatataccgggaagaaaaccaccacggtgattctcccacagcattagtgattagtgtttaatccggcccaataattccatgaatgaggtcagagagtttgatcaactaccctgtcctggtctttttagtataatggtgtgtgtcagtgtgtgcgtacgtatataccgcgtaattagaaaaataaaactacgtcccatccttatagtcaggcgtactatatacatatatatatatatatatatatatatatatatatatatatatatatatatatatatataatcattgttgatttgtcaaaaaacgcatctcaaacttctcagaaaaacatataattgacggggactgttcaaatcgaaaatattgtactttgtatgaaagaattacctgcacgcgatcacaactccgatttggacaaaatattttataagcacagattttataatcgaaccaaagctggggccacacgcgctgtgctagaaaccgattaataaaccggtaggctcacaggctcacagtgcagtggcccagtggccgacggtgaggtcattggagacaccc

SEQ ID NO: 35666 - DNA, 3621 bp, Oryza sativa
agtgtgtgaggaggagaaaccctagccgcgagctcatatccttcgtgtcggattagtggatttatttttttactttttttttctcggaggtgatgaaattaccgtattagccttgagcccagcgactatttgctgagctgggttttgggtgacgttagccacgcgggaggttgaaggggtagtttggggatttccttgggtggggtggtctcgagaggtgtgaaggcgctcgtggatttaggaatctggcaatctggaccgatggggttggggaatgcggatcggacggctgagattcgctggtaggagcaaaatgggctcccctgctgccacgctgccggaacaattcgatcatttccaatctcagccgtccgattattcgatcccttcaaaaatggctgccactaatgcatggtacgccacctctccaaaaaagacccagatcggtcgaaccactgctttcgatatctcgatcgaaccttcaaccctttacacctttgcatccatcgtgttacactgtcacttctctaacattcttctcgttgttagtaaatttaaatcacggtttatacgacattctctctctgtcaaaaaaaaacaacctaggttacctttcttttttacggatggagtagtatttagaacctcttttatttgtatgaaaatataagaattttgaaggatttcagttctataaaaaaaatcctataaaaacctttggagcaatgattaaatcatatcttatcttttgaaattcatatggaatgatatagatccaacctcttacaaaaatttcctttgagtatattctctcgttcaatttatgtgtttttcctgtaatacaatctaatggccattcatgtgttttgtaattctctgttttatatttacttgtcagaatcatatatttttcttattcctctatttttttccattcatgcgattcaaatgagtccttactcttctcattattagacactaagagcaaggtcaatagtatagccaactactgactccaaaacatctatagccaatctaatagcctattcatacaatagttaactataaaaatatactacaccattaatacacggtcccatctctcatacacacataacatcttggagttcgtgttgcagccggctacaaatttgtagcccgctttcttctctctcttctcttttcttctcgatatatagttacagccggcttatagcctgctattgtacctgctctaaatcatagtcacaatggctgctacttcagtcaaatcttgaagaaattcctatatagcgccactcatgggaatttccttcagtcaagtcttctcattattagttacactactttgctagacaattctcggatgcctactccctccgttccaaaataactcaactcaaatgatgtgacccaccactcatgaaaagcaacaaaaccatcagctcacaagtgcaaatagcatgaggtcctccaactaccatgatcattcacgtctcaattgatggtcgctgcaatttgaaaaaaggatggacaaattttgcatcagataatgatatatatatcgacccagtttgcatcttccacttctacaagatgaatcacgtgcaagtaacaattgatgttctgtgatgagcatatcaatacctaaacctatgctgtgatcgcccttttgttagcattgaactgtaatatatacttctatagaaatgaaccgcttatgctctctgttacaactcctatgataactagtgaaaccccgcgcattgctgcgggaatttagtatgataacaataaaaaaaataacatgtaagatagctagataacatcagattaattaagtaaattaatatggtttatgataatttaaatttaaatagtatgtagaatggtgatttaaacgtaaaaagtaagatggtatgactttatggaagaagaaaagtagggagatagtttggaccgtagattaatcatctaaaggctaaaaacaattgatgtgatatgacttaattagaggaaaaaaggagaaaaataatttggaccatagattaatcatttaagcactaactaaatgaggatgaactatataaatatataggatatcataaaacataataaaaatatacattgaaacattatgtgaactatgttggatgataatttagcatgcttgtatttgaaaagctcttaaattataaaaactataaagatatagcatgtttacatgatgtttaaatgtgatgattgttagtgaataataatgtggcatcttgttaattattggatgatgatgtaatatttttacatgttaagcttaagtagttagtgagggataactttatagtaagataggattacctttacatctttggtgcttatgctatgtactgaactctcttgtacgtataaaataccatctatgcgtgtaactttcggtaaagaccattaactattagtagacataatataatattaatttcttttacatttatctgcttttcttgctttctgactctatttccaatccaactgcatataggcggcgcgccccaggctctagtgttcatttaggtgcgaactgatcctggctgtggaagcctggattttagcgtagtttgttacaacagttaatatcacatgcggttgcaagccttccgattaaatgattaatggacaagatgttaaatcatccatatgtggaaggagagactgacgagtgtgtcccacaccgattttcacctagaattaccatgttggtatgccacgtagacaaaaatgataaatagttaagatatcacctcttaaaaagggcaaaaaaaaattaagtgcaagtgtaagaggggcatttaaatagtgacgaatagttaaatttccgtttagtaaaagaggacggttttgtgttaaaaagcttatttctatcaaaaaaataaggttagttatctgatctatctcttagattctctgggtactcatggagcatctccagcagtctctccaaatctctccaaatctagctctccaaatatctatttggccaactcttcatttaatttggcaagtcaaactcttatttactccaacagcctctccatctatcatccctattacaagtctatgacaaataggatccatatgtcactcaacaaaccttcttcaatcttgtttttttcccacccatactacatctcccttttctctcccgtgctactgccccttcctcacgcccctacctcggtacggcgccagcggacggcgcccctacctcggtgcggcgacggcgacgacgacttgcgtgccgaccggcggaggcggggtgacaggtggaagcgggccgacgggcggaagcgaggccgcggggcaggcggaggcggggcgacgacggtggcgagcgaaggccggcgcggccttcaacgagcggaggcggcgggctgcggcgagcgaaggccgcggcggggcgggcggaggcgggacgacggctctggcaagcgagggccacgattgcgacgagcggaggaggcggggagaggcggggctgcggctgcggcgagcgaaaggcgcggctgcagcgagcggcggggcagacggaggccgacggctgcagcgggctggggcgagcggcgg

SEQ ID NO: 35667 - DNA, 656 bp, Oryza sativa
ctccgtttcataatgtaagtcattctagcattttctacattaatattgatgtaaacggaggaagtacgtacgtactccgtagtaattagctagggtgatgggcccggctactaccaattctctgaactcaatatataggttctttgtcaaacatatgggccatgtaaatagggttaatttaccatacatctcagtttggattggcctggcccaaactagtagggaaagaaacagccttggttcttgggagaaggtcaggcctgctagctcaggcttgagctcggtgccactaagctcataaaccaaacgagccgagcccaaactttgtgtgctgggctcgttaagcttggtgcgagggccttgcgatggagctcctcccctaggctcctttagtttatccctatctcctctagctcattccttggataccgtaggtttcttttttcgcgagcgcgtaaaaggattgcacgccaatatattagaagaaaagagttatagttacacgacgcaattagccagaccggcttacgccaagggaaggggaaaaaacaaaggaaaaagtacgaattaccccctgaagtattgggtgagtacgaattacccccctaaacctgaagaccagtaatttttcaccctcaactatcgatatcggatga

SEQ ID NO: 35668 - DNA, 548 bp, Oryza sativa
ttttgcgaggttatttatggaagttaacatgtgaaattgatatttcctcgtttcatattgtaagaccttttgttgttttctaagtcatacttttttttagctttgatctaatttatagaaaaacataacaacatcttgaaatccaaaataaatatcgtgttaaaatataattaatgttagatttaataaaactaattaatttagtgttgtagagatgttgctactcttttctaagcatgatcaaacctaagaaaatttgacttaaaaaaatacaaaaacatcatataacattaaaacattataaaaccaaaggaggatcttagttatgatatcggcttttacgtacggtcaatgaattaggggtgaaaacggatcggattcggacggatagtagtcataccatatcctataccatattttttaatcggattcggaggtgatgcggataatgtgcggatgcggagcggattatttcggatgtcggaaatggtgcggagtcggtgcggactcggctcggaaacggataaaaataatcggatgtggcatgt

SEQ ID NO: 35669 - DNA, 610 bp, Oryza sativa
ctgtatttctctgttttacccttcaatccctatcagaatcatgtgttttttctatttctctatttttttcaaccctataatttaaaagggaccctacaactggacgggtccaatatgacgtagtgaagattcgtgcttgagctaacaaattaaagcagctataaagaacagccgatgacagcgtgctcgagccaatagaagcagatataaataaataaccaatgatgacagaattttctgacatataacacctgcaccaactcactgataactcggaaaagcctaagaagctgatcggtcagatcttaattaacccccttttccttgatccaattaaggttcctcaacttgatggtttaattatactatggagtacccacccgattatatgtaacgtagcaattgatcaaccaacttttctgaaccattcagctcgagaactctgaattctttactactaacagatcatccataagctaataactaatcccaactagacccccattcacatgctttgctaaaatctagtagtattacgtatcctggtcaacatactagtccccctttattgaaagagcctatcgaaccttgacagattagcgagagatcg

SEQ ID NO: 35670 - DNA, 651 bp, Oryza sativa
cccgcgacggcgccattgacgtatacgtatacgtacgcggtacgcctccgcctccgtacacacgtataaatacgtaccagagctgcgcttgcgacgccacgtacaagccgatcgatacgccgtcgcatttctcctcccattaattcgacacagcagcttaatttttttttcaattctacgatatcacactatggttgtctttagttccacgttaaaattaaaagtttgaagaaattgaaatgatacgatgaaaaagttgaaagtttatgtgtgtaggaaagttcgacgtgtcgaaaaaattaaaagtttgaagaaaaaaattggaatataaacagtgcgtgcattttgtacagctagttaataatagtccttcgtcttgtactacaaggacctgcacgacaaagctgatgcttttttttttctgttcatcactctttgagaaaattaagctttttcgattcagacgtttaccagaccagtgtactatgctaagcaccaaacatatacttcctctcatcgtcatccatggtaaaatttgattcttaacgaagaataacctagctaaaaaaaaggtggagatgaacgctattgtttctgctatacacaatagacaatataacattttttctctgagtgccacgttatttggtt

SEQ ID NO: 35671 - DNA, 556 bp, Oryza sativa
ataatattaataatttgggatgtcaaaaggaaacatgagtgcactctaaagtcgagcaccagagcacggatggacgagacgcttggccgctgccctgccaactatgcatgtttataattcaccctacgctaagagaacaaattaataaattttgatttgtatgggaaaaaaaaagatatgtgagcgcaatctagagtagagcgcgggcggacgagacgctcaatggttgtccacaccaattgcgcttgtgcaattctcgttgaaatgaaaataaaatgctacatgtatttatgcgctctcgcggagagcatgttatatatagccacttttgattacatttttatgagggaggttgcacaagagtacacgatatatagattaacatgtaaatgggaacagattaaaatgaaacacaaacaaaatgattactcctaattaactaacatatatatattgcccttaattacatcccaacaaacattctagaaaatgggcataattcatagcatctgcataagaaaaacctgatgtgtaccgcaactaattagtacatttc

SEQ ID NO: 35672 - DNA, 696 bp, Oryza sativa
gactgcaatccacaacctttctgatttactactagctagctctctttccatcagtctttactctttgatctcttgtcctggcaggcagtgctgtgctgtcagatacatatgtctccatatccattttacctcagaatatgtaatgcaagtaactctgatgtaactctgcttgcaaagctttgcttcttgttgctgtaagtctgaaacttgctttgtttggactggtaaactgcatgttagacacaaaaaaacagttgtgggaacagcaagaccggttattgctttcctcctttttgtttcacttttcacagttcaggaaccttgtaagctgatatatctgagacaatgttacagatgttaatgccaagggctttacattgttttgccaatgaagttcagcagatgcactttttttttcagaactcacctaacaagttttactgtagtttccaattcagcaaatcaaattactttcctatttaatttgtgtgatatataataactgataactagttgctttattctaccgatcagatcatcagagagtaaaaacaaagcaaatctatatatacagcatagagatgatttaatgtatgatgtatatacaaccatgtgacactccacatacactgtccagtttctgtttgtcacataggatgcagagataatggctaagtactcaccagcagcagcctc

SEQ ID NO: 35673 - DNA, 1396 bp, Oryza sativa
tgaaacatcacggaatacctcctgtgaattagtgttcgaaggctaattttgggacgggcccattacacgatgggctttatttatcactggaggaaatgggcttcaccattttgggccttaatgggcctcaatcttgtgtgtattcgaccagttacatattcatattggacctcattttttgttgggtctagctatacaatcggtgacaaattttctcctaaatatttatgaaatataaatatagcgcattgtagttatattgtaacttacataactacattacaatttgtatgtaatatattatttttgcaaagcgcaggtcggacagattctcctcatctctatgtgtgctatacttttttttcttcccaacttgtacaaatcttgaagtaaatctaacggtttaaaattatacttaagttatatacaagttacattgtagttagatacaagttataatataattacattataatcatactgtatttacatctgacagaaaatttgtccacaaatatataacataatcattttttatgatccaatacattaataagcaaatatttagtagtactacggtgaaacatgcagtcacaaattaagtgagtgctatggattatggatattatggaatttaagggaatatgggtttttagtgttcatgtcaattaattatcgaggaaactcctacagtactattttggaggataaacggctaactttacgttaaaatggaagaaaattaaagagatgttaaatcggattgaatgtatatgaattaattaagatttactaccagctacttgtcctacttgacggatttacagatcaggcagacgtaaagattgatcgagcaaaaacgcataaacaacatttctttaatgcaattacctatgaatcaaaacattacacatatatctccacttgctacagatgagagattaattttgacgactaagcaaagcaacaatctgaattattttggcccgatgatcaaatcctaccgaattcaaacgcaaactgacacgaattaccaacaaaaacaaaaacacaatgcatgcaaaaaaggaaacataatttgcaactagctaggctagaccgttcgaccaacaaatcaaacgagagccattgctccggctgtcgcgacgacgagcagcatcagcaaggcaccacccctcactgatggcgccgacgacggccgcggcggcggcgccgccgtcccgttcgtccccggcgccggcgccgtgaagttcatccctccagccggagacggcgccgtgaagtttcccccagccggaggaggtggcggcggcggcggcgagcctgcaggggccggtgctggaacgggtggcgacggcgccctcgccgtgccgttcgttcccgcggccggcggcgg

SEQ ID NO: 35674 - DNA, 641 bp, Oryza sativa
catgctagcaatactttgaaggtttatttgtctctagcatagcttgtatgtattctagtcttttcataagatttagattttgcttttaagggagatgatgcatgacacttaaattctacttgaataagaaaatatgcaatgttgatgctagcatatggtttgatttataaatgctctatatatatatatgctttattgacttgttattcctcaaatagctttaattgctcattgtgaaaaagagaataaaaaatatgaaaaaaaatgaataccgaatccttggaaacagtcttgacgacaaggacgtattcgatgtgagcaaaataatgggtgccgaatccctggaaacagtcttgacgacagggacgtacccggaataaaagaaaaaaaatatgagcaaaaaggctctagaaaagaaaaagttaaaaaattctcttggttattttgtgctaaaggttatttgagaaagagtgataaatgcaataggtatatatgtttagtgtttattcttcaacctatatgcttgttaagatgttgcattataaatcgtatgaaatcatgaatttcgattgttgattcaagcttaattgtaaaatctttggttcatggttatactaaatgggtttatcttctttttattg

SEQ ID NO: 35675 - DNA, 605 bp, Oryza sativa
ggcgaagcgtgtgtttgaacgcttcggcgcggtgcggcaaggcatgtcgcgggttctgccgcgggcgccaaagtgcggcctcgactcacaggtgacaggccggacgccggacgccacggcggcgccgcggaacgctttcctctgatagtctgattacgccagtttgttgtgtttgcatgaggaagaggcagaagatgactagtagcccagtaccagctttctgaggggttgggacttggaaccgttccggcggaaaaaaaaaagagccatagattaacacatgattaattaagagcaagtttaatagtatagcttactattaactccaaatcatctatacccaatgtaatacccaattcatatcatagttttttgttatactattaatatcccatataacgtcttggagcccgtgctacaactgggtatagatttggaagccggcggttttcttttttctcccttattctttttaaaaaaaattaaaggtgaatatagcctgctattgtactggttttaagtataagtaataaaaagacttgaaaacttgattaatatgatttttaaagcaactttcatatataaacttttcacaaaacgcataa

SEQ ID NO: 35676 - DNA, 685 bp, Oryza sativa
cgtgcgtacatggaattttcctgcgccagtcttgatttctcggccaataaggtctccagttgcacacgaatctgttcaatagcatgttcttcaggcatgtattttaaatatgcagaagacatgttgtactcattacttaacagtgataagtaaaaaataactaaagtctgttgtacacaagcaatgaacctcttctaagtatgaagttagggacaatcgtgttcttgcccttactttaagttgcaattgtgattttgcccctcttttttagggtttgtgattttattttttaaatgaagcttcagtttgcccctgctttagatggcgttaggtgggtccagattttgtaagataataaaatagataaggtaaagaaaagaatgtttacaaaatatagaaagactattgtacccctgtaaaaaacacttaccagttaccaccacctaagccatccaacccattctcctctcccattccaaacaggtggatgcaagcgacggagacggaggtggcggcaccggagcaactcacgagcaggctgcgacggcgcaagtggcagcgctcaccagcgtgagcagcggctgctcggtagagagggagcaggcggcgctgctcggtcaatgcgcgagcaggtggtggctcagcgacgctgtaacaggggaaggggtgccttaacttggctcag

SEQ ID NO: 35677 - DNA, 612 bp, Oryza sativa
cttaatatgccctgagaaggtgaacatatggggatttttaatacccaattaacctaattttatactaacaagccgttcacgtggctaaaagcctagcttgattcaactggttatgactacaagttagagctgatctgaactaagcatgatataagtcgatcccagccactagttgagtttttttttttcaccactactgatggtgaagtgtcgcaggtacgtgacttattcattagacttgaaatattacctagacatgagtgcactttcaataggagtttagtggggggacaaatatgtttttagtctccgtctctttttagcatatgttaagaaacatatttatgggggggcacgtgtgcatcgttattttaatagaaagaaaagagagtgagattagaaacacgtcttttttatttgcaagctcagattaaatcacccaatgaaaattttctatgcccgcaatggcttcgtgaatataggatgatgttttttctatctttcaataatccaaaaagttttcagttcatctgaaataggagaaaagctgggtgaaactctttcacaaaacaaactacctagataggggaagttgggtttaggcaacttcat

SEQ ID NO: 35678 - DNA, 1064 bp, Oryza sativa
tatggactgaagatcaccccttcaccagttcgccaccatttgaggcccagaactccagtcacagttttctaagcattttcttcacacagagatctccttttccatttggccttcataccattctttcaaggcttttttaatcaaaggatttgtggagaaatttcataggattttaaatcctatagaaaatttttctatttaatcatttgataggaaggattggagttttccaaatcctatgaaatttctatgaacctcatcggttacccatattccctaataagccaaaaggtttattagggaataaaaattaatttataagtaaaacttttatatatttgttcataatgatttaaaagcaaatgctaaaaaggaattatgttgaaaatattttagaatcaacttcaaaatcaagttcaaaaattcaaattttaattttttttctttgacttattaggcgaaacgatgggtcattaatatgcgcacttgcaagttgcaactgcatgtatcatctggagtttattttgccgggatgtgattgaagtttcagttttttagtttgaacctcattactactcagtgcttaatactcttttcattctaggctattacaatctaatataggatataatacaattcataatactataagtattatagtgtgtgtttgattgctttattttaaaacggaggtagtactccctccgttttttaataaatgacgccgttgtcttttgaacatatatttgatcattcgtcttattaaaaaaatatgtaaatgtatagatataaatcatgcttaaagtagtttgagtgataaaataactcataacaaataaattataattacgtaaattttttgaataagacgaatggtcatatgtgtgataaaaagtcaacagcgtcatctattttaaaaacggaggtagtaccattttatcatggaccctaatctcttactactcgtttcactactagtatttgtcagtttcaggtgctttggtttgattgctacgtcgtcttaatctacacatgcgtacgacaaatgttgtgggccattttct

SEQ ID NO: 35679 - DNA, 595 bp, Oryza sativa
catctttattgatagataatttctggttacatcatcaggaggtattctacagaaaataagctctactagtttagcccggccaccatgggagaagcacaatttcacaagctggctgctctgattaccaaataatcaagtggtaatttttcttaaaacatactgtacttgaagaaagtaataggtagagatgatgacgggatttgaaccccctcacaggcagtcacagctacttgtgtactgttttggacacagtcggcaggagtggcctcctttgtagtagtataacaccaacaagtacgaggatcttttagctttgtccgagtctgcaactgcaagcaagcgaggttctggtcaaggaaacagtacacaaggaaacgatgaagaacgaaccaaacaccccccataaatcaaccagcaaaccgagagaagaagaaagaaaaaggaaaacagagaggcaagaatcacacatcaactgaacggtgcgacgttgccatcaaacccaaccgtgcgggcatgcctggcgggccaccaccacccacccacccaccccaactcgcacacgcacacgcacacgcacccgcacggttgggtttgt

SEQ ID NO: 35680 - DNA, 525 bp, Oryza sativa
tgttcatcacagaataataatcaaaaacacctttgattttgcaccatctaggtctcatgctaactcaaccgactctattaccgtcaactcgcaatatcagtcaaaaccaggcataatattgttaaggtctcaagtaatccggtttcgtaaattaagaaatctgatattacggttcaaatgacgtgatctaaactcgatattactgtgaggacctgaagtgaacatttctatgtttaatgtagccttagatttcaggatatagacgcaactacaacggtggcgttgcgctcgggccagcccatgcgaatcgcatccaacacggcgagaacgggctgtttgaatccaatagcgccaaatcgcatccaaagttaggagtaaagcgtgtgcattccttactgccggtcaccctgttttctcttactctgtttgtagttcgctgtaaagaacacttcaaatcaagctcacacccgaagccttccactcgtgcaacaacttcaggagttccatggtgtgattggtgtcatg

SEQ ID NO: 35681 - DNA, 708 bp, Oryza sativa
  unsure (1)..(708): unsure at all n locations
tgcagccctttttagggcaattgaaattaatcgcttccgtttaggcgtgctgctgttcgtcgctgctgtctcgaagactatatacattgagcaattttacggttcttgagggtgtaccataaagtaccattttttctattataaatttggtatctcgtgataactagatactgtgaggtaccatgaggtatcaaaatttacactaaaattttggtacctcatggtacctccttaaataccgtagaattgctcatatacatgatagatttctcgaaaacgactgatgctttccagtttccaccatagtttattatccatcttagccgatttttgagtgatcccgtctcgaccccgtcgcactgaagacgccgctgctttcgtcagtgcttcgcttgaatccatacacaactgaaagcagtgctgctttcgtcactgctttgcttgcaaccctgaaggcctgaatggctgaatatatactaagtcaaatggaacctttgttcgatggatcctttctctcaacatactctaatagcgtcgcaacttgcatttttaaagaaataatttttnccnccccccccaaaaaggggggggggggggggggtttttcccctttcatgcttcaccgacaacttaaaggctatccccatcttgatgctcgattgttgtaagctcttggtgacagtcggcatgatcatccttctgttttgg

SEQ ID NO: 35682 - DNA, 737 bp, Oryza sativa
  unsure (1)..(737): unsure at all n locations
gtggtttgatgacagctcgtggaacagnacctcatcaaaaatcacaaaatcactcaattgctatcccaaatcaaaatcaagaatcccctacaaaatcaacatcccaaataaaaaaaaaaccaaaccctaaccctagccacctcccacagcagtcctacccgtggtcgccgccgccgccgccgtcgtcgtctgccgctgtggtcgtcatcgccgtcgtcgttgccattgccgttgtccgcataaccggcttccaccgcgaccagctcccgagcccaccgccgctcctggccgcgtcgccacactaggaatggggccgacaccggcactgtcgtcagatccgccacaggagggaggcgaaaggggtcggatggagccgccaccgtctgatccgtcctcagccgtcaccattgcgggcggatccacctgcggtcgccgtcgccggacccatcacgcgagaggcgtgagagagggcgaggggaatgactgtagggaggaagagagggagataaacttccggtcaccttcgatagaataggattgcattgggccacaactgaaattaattaacaatctcccccttaattctgccgtgggcctagtgaacgaacaccaagaaggtgtctcggcgtcgccagcttttgncgacggcaattctttcgttaatgcattcgcccgctgcttcttaatccggacgaactccacaacaattttgccgtcattcacacacttccgtatga

SEQ ID NO: 35683 - DNA, 787 bp, Oryza sativa
  unsure (1)..(787): unsure at all n locations
ctgcgctttgatgagctactcagtggtacagtcactaatgagcctggttgtgagcatcggttcacatggtaaaagtccattatacatccctcaactatagatcgtgagncttatattcgtgccttaatcataaaaccagatacctccaactttctaaacctgtttgttttacctctttgagtagtttttataccggttttatcctaagtaacacccacattattaaataccaacgggataccgtagtctaggttttttgagagggctcgctccatttgttctccccggcggcaaacatgtgtgtttgtgacttgtacgcctacacatattattgatcaaagttatttgattagctgggatgatcatttgccaagttgctaggccagcgccacagggaactggtaaccattatgtgccaccaattattcctgcctttaaaaaagaacaagcgtaaagagggtaggggtaaggaaaccttccccttgctttttgataatttcacaagcttaggatccgggtaagagcgcaggtaaccaaacttaaccgaataggctaaaataatgcccggttgacaattgaccaatttctttgtaaaccaaaaacgagatttttccttggggcctttactgcctacatgttttattttgaacagagttcttctcaattgttaaggggcccaactttggaaatttaaaaaaaaattgtgcccccaaggaaagaaccacaagtttttgctgtcctatggcgcttcttttaattagaatttaaggaaaatcacatttctcat

SEQ ID NO: 35684 - DNA, 2410 bp, Oryza sativa
tatggttttctatgttgttgtatagatcatttatgggcatatccacgatgacaacttttgtaaggactactatccagtgatgtaataaagcagtcactttcattccacatttattcgatgtgtaccagatgatgcggacatcactaactcggatacacacaacaatcctccaacggtcattcaaggaccgatatcaagagctcgtgcgcgacaattaaatttagaggtgagctcgttcctatgttcttctttgtatgaattcgagaatagattgctacctaatgattatattgtgattaggaacaatggaggggacaaggagacacttggagaaggacttagagccatggaggatcatcgaggacgtccaagtcaaggtggaggcccaaaccaagtcgacgtcgggtgcaattcggagtccaggaccagtctgcactaaaacgggcgcccaggtcgcatacgtactcggattggggcgttctttatatgtatggatagctaagaagataacatttccaatggttttggtcccacatccaaattctttccgagtcaacgggaattgaccgaacaagttgatgtccagaatctgttccggtgttgtgtcaccgtatttgggcctttggcccgtgtatcgtgttggaacccattagggttgcgtcgagagggggttgcacgaccctaaactctatatatcagtatccgccaccatctttaggtttttgggttttgcttagattaatctgtcgagaacagtttcgccgctagatcggtttgtaagaccccaacttgtgagcttaatcattcatctgcaattttggttgtttctatctcgttcttgtttgtgttcttcgattggcaaacagggattagccttctcggcgaggtcatccgcatttcggcacgggtgataaccagaggagatgtggtgctgcgattgcggggctcaagagcgtacgcgttcaagaagccggatcgatttgtgtcgcgactccgcccaaatcgttgtttatcagaacctttcggaagatcgggaaccctagtgcacatcaagtggtatcagagctctagattcaccgtcagattcgctcagtttctttgccctagattagtttttgtttttcgcaattatcctagagtctacagaaaagccaaaaaaaatttagttgttagttaccttaacctagaccgtgtttagcctttgcgtgattctttttcagagtccgtagtgttgagtttgagtcctagtttaagttcatgttgctggtctagtgcgtgttttagtctaatcgtgtgtttgtcctttgtaaccctagccgctacctttcatcgtgtgttagggttcatcctttgagagccgttttcgacatcataaacacccatccagatcaccacgcatcaccagaacaccctacaactccgctgccaccatatcccaattccaccgcataatagactaggttatatcccccctggaaaacctagccggaagcagaaacttcaaacagccataacttttgcatacggactcagaatcaggcaaaatttaactttttggataagagaaaaaaatttgagctcacgacgcgctccgttgagcttatctgccaattcggttttgtagtttttgctgaaactcgccgaagcttgcctgcaagtccttctttgctgcttactagtgtcatttttttttcttgagccataattgttaccactactgtctaggacacgagtaggccagcaactaagggcaagtgacttgggatttttattcagcattactatctgtcattggattgtgtaccactcatatacatatatttggccttcctagctccacatattacttctggacagcacaggttcttgatccctgcaatcgctgactacgccttccaggtatcctttgctttgctggtaagaaccttataagagcttggttaggaactccatattgctgagaatcgttgagaggcaccactacacctgcgtagtagattattagggataaccttcaccgttttgtttctgttttggtgtttcaatgtcaggtaacgaaggtgagaagagtccccaggattttgctgactgtgtcagccaagagcaactacgaactctccaagaaaatactcaaaaggacatcacggaggctgttgcaaagtctgtccaagatgccttcactaaaatcggcttcctgaaccacatggagaggttggacaagcggatatccacgctaactgatcgggtcgccgcgttggagacaccttccaatgaggaagtggtgagtggtgacgacgatgctcatcctgaagacacggtgtatgattccagtggttatattgacgcactggctacaaggcaagcacggttacgacgtcgcctacgcacaaaccgcacaggtatgggtggc

SEQ ID NO: 35685 - DNA, 639 bp, Oryza sativa
agataaaggatcagtattttagcaggatcaaccagcataatctggtgctaagcttaggcatttttctggaagaactgaaaaaaacagatattcttagcattacaccattatctaaaatctggactttgagaaatggcagactgagatgaagaaactgttctacaaagaatgttgagggtcctaacaccctaaagggatattctggtttacagaacagagacaacagtgaggacacatagtttaggataccagaggagaatttctagttcaggaagacctgaattacataagaagagaaaaacacactctattaggctgaggtcattcccttagctagagccaaccaaggaaaagatggatgtcaacgttgttagcaatcctggagtcttcttcttctcagtccttgatttttgtgacctccttggagtacccttatgcattgaagattttggcctctgcttcatctctcacaagtgctccatctgtgaagtcatcaatataaatatctcattctttcagtgcgggacattatcctgtttcaacgtgggaacattatcactgttcaccaacatcctgttcccctttacttttcatgcacacacacaaaattatacctccttgtccccttgaagttatgtg

SEQ ID NO: 35686 - DNA, 628 bp, Oryza sativa
aataaaactatgaggtgggccccccaccaccaaaaaaaaaaaaaaaaaaaaaaaaactgaagaaagaagagaggagaggaaagagagggaaaaggaaagaagaagagaacctcgcggggtggcatcagcccacgcaggccctcagcattcagtgtcattgagcatgtaggctgtgcaccacctgtgctacccatgagacgatcccaggtgcctgtggaacgcagagcaagaacaccactccctccctctccacctgcatttccatcttgatcatatggaggagaaagtcttagtttaaagctagcctgtctttgacactttcctactccctgtcaatctccattttaaacaatgaaaggcccggtctcaggccataactttggcaggtaacagtgtaaggttagaatttaatgatgccatgtaagtttcatatatatgtatgtttagggttgccatctatgtaagacaactgaagattgttttttacttacactggtcataacaacttttaagaatccagttcaagtgagttgataaaaaggtcaagtccataatagtgcaggtggttctcaaacaggaaggtggtgcacatatgaccaagtgaggtcactgtgatgttgttaagcct

SEQ ID NO: 35687 - DNA, 616 bp, Oryza sativa
cagagccgatctggctgaagtagtggagggcagggaaagggacgtgggggaggacagagactggaaggcatcagggaaacctttgacaaagcttctcagccttataaacaattgctagatgctgagcagtgtcatttccacagaagcaattgtccctagcctgaactgttgctataggctcctaactactgtttcaatgcccagccagttacccatcacccacgtgcccttcacaggacaggtcttatcaaagcgtaagtctgtgcctaccacgcctctgcataaaataccacaatggctcccgaagccctcagaatgaacgtctttctgagatctagcctgtaacactatgtacagtctcatcccctgacacccacccctactaccatcttgggccatttttgttctcgtccatactaactggattgtgggtgatctgtcatacatcctactgttctcatctctccaggcctctgctcaggctgtgccctctgcctggaacaccgtctgttcttcggtcactgcgagaactcctgctcatcctccacaggaattcattcattaagtcgctattcactgggctcttattgagtaccaagcactgttccaatttcta

SEQ ID NO: 35688 - DNA, 531 bp, Oryza sativa
aatttctggctccgccattgtatatatcgtgtactaacatgtatatatcgtgtactacgatgaagaatctgttacggactcctctacaaacagcacccaaactcaagtctgactagctcgtaaacaacttttgcacggtcattaatctctgtgatgtctcctcgttgcgaaagtctctcccatctacggcttgctgccttgctgtatgcaagtacgtatcagctcgtgcttgcatgcgtactgcacccaagccacgtaatcaatgcttttgaccaaacacatgcccaatacaccaattaattcgcatgcaccccgtagtttttgtttgtttactctgcatatatacttgcttgattccttgaatgcatctcatgtgcgcgtgtagcacgtacacatacatgcctggtcgtgcctctgcacacaccgcagtaaggagccctcgtgatcaccggccacgaccctatcgtcccggccctccacgttcactgcgccgcaccacgctcgctggcttggccacgtgggtcgggcacg

SEQ ID NO: 35689 - DNA, 3204 bp, Oryza sativa
tgttgctgaaatgatgtgctgttgttgatgctgctggcctactgctagttgtgatctgctgatgattgcttgccatgctgctgctgatcacgctgatccgaattgatactactgatctgctattgttgaaaatgatacgctgctgttggttcttcaggtagtggtgttgcttgattgccgacaggatcagatttgctggtgtgctactgcatggagagggccgatagagaggcggtgcccgcgatcaggagccggtgaggagaaacatccaggggtcttccggctagctctacaagttggtggactagctggcctgggttcgaaaccccatccattctgtttatttgatattatgtcattccttgtttttttatcaggagtcggtgagcgtgatctcgcaggagcgagaggcggaaacagatttcaattggtaatttttgtagttttaggtagtcaattttggccaatctcttagctagattaatatcttaatatcataaattctatttagaattttcataaacaaaattttggaatacttttggtgatgctcaagagtaccgttccatgaatcttgcttggaaataagttggaaatattattcatattcgatcgatcgggccatgttgtcccacttgcacacatgcatggcagattagggtcgatcagatcacatgtacacagaaatatgcgttgattaacatggcatatataatataatgcatgaatggtacgtacccatagcatatcccatagttatatcaacaaggatgttgatcagctgtgatgtggtgatgccttcactcgaggtgtttcatctgtgctctcccatggcaacccctgatggcatcctccgtcgacctggttttgttatgaccagttgcatagccggcaacatcatcggcaatcgcaggagctcgccgcgcgcgccggtaaaatcgagcggaggtgagtcaaatttaactagcttacaaatcttcataggtttgaggttgtagtgaattatactataggaattctgggcttctgtgacgattatagtatgacgataacaacctgcttcctgtcactgcctgctcgcagtgacgaaatggctgtcatcacagaaggtgggtcactaaccatcttctgtgaccacaagaggacatcgtcattgatacagtgacgataattctcctgtcactgataaatgacgagacaaattcgtcataacaaattgaaccgaataacgccacgtgtatgatgacatgtgatgttgcaaatgacaaggcgggtgatgtggcaaatggcgtggcaattcacattcggcccatataacatgggcttttttattttcaattacaattggcccaaatatatttttttgacccagctacaaatttgcttttatggtttttttttcattatagcccaacattacaattctagcctatgggccagcccattaaaaagcaatcacagaatataaatcacagctatttgtataattatattataatcacattcctgccataattaattttctagcccatacaaaatcaagttccaaaatacagtttccaacatgttccatacaaaagcacaaaacatgaatacaaaatgatccatccaccatccaactacacaagtacatgtgcctgtgccttcaatctttcaagctcctcctgaagtactgcagactctagcttctttgcatctagttcaacttgtatctctttcatcacattgttgtcttggcagcgggctgctatattccgacgttgcgcaaaaatgtgtttgacttccgcagcacttaggaaacagcttcaatagaagtcttagcttggtgcccatcttctactgatggtgaagtgaggacttcccgggcatgcatatcctcctagcaatcaaagaaaggtttcagttttgcattattatataaataaaggttcattgcataaggtacttaataaaagaaggaaagaagaggtaatagtttagtacttactatagctttcttcacaggttcactaaaacctttagttttgctgcaatgcaactccttaaagagatcaattgcagtgggctcactgtcaattgaaatgcccatgctcttcccccttggctccacttgtctacttccagtgagggtgcctaacataaaacatttacaagtgtcaataaaaagatcatgcacttgatttgaatgaagcatagcacatataaggacaaaagaacaagaatccaagttacttgccttgttcagtagtgctcaattccattggcttcagttctgtacttaaagtgtggttgctcaatcccattgccgccgcccaatatggccgcccagggcaaaggccccgtctgtggcgcgagaaggaagggttcaggatgatggctggctgcggcacgccctggttagggctccacccgccgatgctcaccagcgccaccggatcttgcagtcccgaggccctcattcctgtaggcacattctgcaacacagatgaagaaaggatcagaagaaaggatcacaaaattgcattagagttgcataagcttctgactagtaaccggttttgctaggcaaatctgtgagttgagtaggattttaaggaacatgtactctttgagcaagtttatagccaatttagtaaaaatctcacatcttatttacattcttaaagggatatttctgtgacagacattatattggattatagaaggagtcagagagatgctagccatgacctttcttctcaggaggtgatgctagccatgacctttcttctcaggaggtgatgcttcccttttaccagtgacattttctgctttatgaactacagactgaggtggagatgcagcagtagcttcccatcctacttcatctactgactgcactaaaggatccaagctagaaaaaatttcttccttggagatatcataatctatatacttggattaaactgagttcagattaatgatctatatacttggattaaactgagttcagattaatgctaccacacctaacattaacaaaaaaaaaggtgtttgtttttcaagaagaatgcatgtggtaagtttggtacatagtagagatcaaagcagtaaacaacagctgtgatcggttgggcaggcataaacatcttcataattataattagttaaccatgcatttttcttgaaagaacttatcaggaagcccattgcaaacagaaagcc

SEQ ID NO: 35690 - DNA, 1007 bp, Oryza sativa
tttaaacaactatttatctaaatcatatagctaatttttttattggtgcactccattagattatttactataaaatattttaaaattgaagatccaagtttgggacatatattattaaaatcatatagctaatattattaagatccaagtattcatattaggttgtgtggagcctctgacccactctaaatgaaaatgttcatggatggatcatctctcaaactacatcaatcatattagtctatataaacacatacatttagtgaagcctcatgtcccacccaatttatcctctaataaaccataataatatatatgcaatttaaaaaaagaaaaacaaattacttttactttcattgacatattttctaaagaaaataagactatattcttttcaagtgatgaagaagattataaataattgcttacatatattacttaaatatgatatagcacaaaatgtaataggttagaaaattatataggcaattaataccgacgaaaataatttacggagaaatcgtgacagttgatctccggttaatatttcgcttttataaatatcttatacttagtgtacgtacgatgcatgcccacgcgaatgcgcgggttaccttcctagttttaaataatttcggtcaaaaacaccaaaattcacgaatttttcaaaattttgacaaacatcgatatttccgaaattaactgcaaaccctgcctgcacccgtgtcggcctggcacctccatgtcccggttatttcgacgtcctccgataatgtgcagacgacatgttcccgaggcgaccatcggagacaccaaagcagccggatcccatcgtccatgacttggccggagttggtttctccttggcttgggattggtctctcgttgatgatggagatcagtttgtctgtcgaagcagtttgcccatcggcgattcattcagcgatgcaagtgaatgatcctgatctttgctcttgaagaattgctcaaacttgtaccatgtttta

SEQ ID NO: 35691 - DNA, 2380 bp, Oryza sativa
gggttagggttagggttagggttttcatcaaattcaaactgatctgagccgtccatcaaaacgaacggctgagatcgatcgagggtttgggccgcaccacttgggccgcacgcggtcctgcagtccactaagtgagaggagtatgggggtattaagtagactttgggcgcttgtgggctgaagaagaaaataggctgaaaaaggcccatagagaaaaaaggatttttatttaaataaatattgaaatgatatttgtattatcaaaattagcaattaagctatgtaaattccaagaaaatttcaatgagtgtaattaatatagaaaatttaataaaaattaaatccaaccataacattttatttctcacacctactttacttataaattaatttaattatatacctacctatttaaaaaatacccaaatatttcagaaaatttgtatttcatttaattagaatttaatatgttttaattcaattttatctttttttcttttcgatgcaacgaacgaccacttttgctataattttaaaaagtgtaattaatattgcagaaaattttatatttcattaaattacaattcattttcttcgtataaatagttcaaatcaaatttcagtcaccatatcattacccggtgcaacgcacgggcattttgctggtaatataaaagaaaaagtatgaattaccccctgaactacagcgatcgattgaattacattcctgaaccacaaaatcatatattcttcatctccaactatgcgaaccagaaaaataaccccgctggctcaatccgcggtggttttggtcctacgtgatagttcagtcagcatttctttttttaaaaaaagtggcccctacttgttattttctcactctatcctctcttctctctctttccccaatcccctatcttttctccatcccctcacatccatcaccggcagcggcgagccgaggacaacagcgcacggggggcgaagccaacaggaggtgtagaggggggccgaggacgacagcgggtgggggcggagccagctggtgcagtgccgacagcggtttcggctttggcagccacacggcggtgggtcttcgtcgccggaggagaggagcagcaggcgacgcgcgagacgagggcgacgagaccgggggtgcagccttaccttccatcgactcgctggagggcggtgggtcggcgcagtagcagggggacatgggcgtcgccccctcctgctaatgtggtggccggcggccgccgttcaagcggcgccgccgcggtgtacaaggaggagattgaagatgacgacgacagaatccctagcaaaactcccaatagttggaactcccaagcctagattcttggttctccataagaggggacaggcgctgctcccaatctccctttcctgacaaaattctcgcgccacgcggaatgttcttgcaagtggtttgtcacgaggttgttcgccgctgcatcgaggtgtccggcacgatccccccccccccccgccaccgcctcgatacgacgcgaatcaacccgtctgatcccatggtttgaaatttcggaccgcaccggtaagcacaaatctccccataagtttttggatttctccaatttatctgtgaacgtggtcaaattttgttcaaattcagtcaaaaatatgttaaaatctatctattatatactaaaagtccattaaacttcctacaaacgctccgaaaccgccacgtggcgtttctacaagcgctcataggctgccatgtggtatactacaatcccaccatcgattttcatttaaattggtggacccattattttacaccgtcagattagatctatttaaaaaaagcatatgttttctgtgtccaatagaatccatttaccggaaatatttacatatgtatacgcatgaaaatagttacgtacgatggaaatacttaaatacatatacatatgaaaatacttacatacgtatatgatggagtatatatctaggtactgtattaagaaataaacaaagaacgtacgtgtgtgtacgataaaaaagcaactgttcgcttggatggaaatatacaaaaggaacatacgtatgtacggttaacgcataataaaaaaaaatactataaagccctaaagtaaaatatacgaagttataaccgtggaaaaaaaatatacggtccttttaaactaggatcttctatactataaaaataaaatttattactccacaaatatagtcatgttgtgcacgtggcactatataatctcactgttgattttcatttaaattaatggatccattttttatacgtttacattagcccgcttcctttttaatatcgtctattatatataaaagttcattaaatatccta

SEQ ID NO: 35692 - DNA, 639 bp, Oryza sativa
taacacagtcagaaatcgaaacgtactctcaacagttcgcttaggcatggaagtttgcggcattctggctacacaataacaagggaagacttactcgtggctgcaaccctactagctcaaaatttattcacacatggttacgctttggggaaattatgaggggatctctcagggcagagtgagtatcaatatacctttctttaagacccatagagggcttaggcagggggaccctttgtcccctctgttattcaatctggtgggtgatgctttggcagctgtccttgaaagtgcaaaaacaaatggggttttagaaggtttggtgtctaatctagtgcctaggggtttaactcattttcaatatgctgatgatactatttttttttatcaagaatgaggagtacaacattagggtgctgaaattttattgttttgttttgagaaaatgtttgggatgaaaattaactatcaaaagagtgaggtttatgttctgggagttagtaaggaggaggaattgagagttgctaatatgctgaattataaagtgggtagtttaccttttacttacttggggcttcctatggtggttgagaagatatgaatgaaagatttgtgttacattactcagaaagttgataa

SEQ ID NO: 35693 - DNA, 1962 bp, Oryza sativa
ttttcatctattagatttatttttgaaggcccactattttcatgtattagatttatttttagaaaaaaaaaacccacaatccacctccctcccttcttccccaccagcccacccttttcccatatgttacgtacgtacgtaggtatcccttcccctatcaattcttctctctctttttttcttttaagttttgttataattaaaaataatattttaaaataattttcgtatagggaaataatcataacctttaaattgcacgtaaatattttttatcattcttcgttatcatatccatggtgcttaattaaccattcgaataaataaaaactactacattctttaactcataacaaatatttgatttttatcatatcctaaccttaggatgcaattgaagctgttaaaaaaatataaaaaatggcaatgtatatcatatgatgatgtatcactttataaaacattcataaataaattaaatatcatagatatgaaaaaaaataaaaacacttaaatcgtgagcaacattacaaaaataatttcctctattatttcaaatcatatcaggacctttcgcatgccattccactaacaaaaaagattgtgcagaaaatagataatgtagatcatatcatcatttatcacttcacaatcatgcataattagattagctctatagtaccacaaaataaattactataattagttctgattagcaatcaaaaaaacaataccaccgttctaaaatattgacatgttaaaataatattatttttcacaaaacaaagtaatgttacttaaatagttcatgaaaaattgacatcaccacaactttaatatttaaaccaatctagaatatcccaaactaaaataatctaattgtgattagcattaaaaatattatctccgctttaaaatatgaattatcacaataatgaaaatctagctacgtccatataaatattttgttataattatatctttagtatttaaaggactataaaaaataattgaaccagaccgatatgtcttagttaagaggaatcggaggtgtatatgttgatcatttcctcttcgatctttggagtttaaacttaagttaatcggagtatatagtatataaggtccagtgtgctcgactcatacatgacttgccttatgtatcaattctatgttacacttaaaccattatatcaattctatgtatataagtactgatatccactaaccattgagggaagaatattattatatactaaaaggccattgaacttcatacaaacgctcctaagccaccacgtgacccattatttttaaacattagattagatgtattaaagtaatccctccatatatattaatctctcatgtacgtaccacatgaaaataattactattcatataaaaaacctggaaaaacatacgtacgcacgtatgattaattttttttaatttttccctcctaatcctcaaatttaaaactaaaactttattatgtttgtacctacctatatacaatcagtccatcgagtcatctgtgactcctttcactctaggcagtagaacccaagcctacttacaaatacattttttataagtgtgtacgtagatagtgagttaggtgttaaatttgtgatcgatgttagtcttgaggggtatagctacgttgatgcaggactcatatttcaaggcattagagaaaaaagctatgaccaacttcacacgttaggtgggtacttatatctaattttaatggttttctcttattaattggtagaagtgttatttaaaaatatttatacatttagatacaagtgaaacatgtgcacttcagtatcaaatggagatgatttttttattacattaatgatatattaagtttttttataagcaattctatctattaaaattctattaagaaggcacctagctctttcaagagaacaaaaatataataagtag

SEQ ID NO: 35694 - DNA, 753 bp, Oryza sativa
ctttatcatctctgtaatgttgtccacacgtggccaaaataagccttataaagtgaagtagagtgagttctattttcttaatttatgccagccattttctccaacactgttggttaacacagtcttatgatttatacatgtattcacttatgttgattttgcagctatattgaagttaaatgagcttatttgattctcttgtttgatattaaggttcacagttgacagcaaccccaggtggtgttgcacatatcttctggatgcatctgatcccttatttgtagaaattgggaagctttttattgaagaacaaatcagaggtataatgcatgatttccactacttaattaatggtgcttcagtatcagacctaaagtcatgttttagttctgaaactaaattcctaactagaaaagttcacagcagatattcctaagtttcactatttttcactggttgtatttctaacttgtgtatttttgtgctgagaataactgaattgtttgtgataattattcgagggtacaaacgaattaattaaatattacaaagttgaaaaatggattttaaacagctttctaagaaattcatatatagaaagtatctgcaaaaatcacacagtttaggagcttgggaagcgtgcgcatttatcccccattctattccttagaggaacacaccgtaaccaatcagttttgtttaatccacaagtgttggtttttcatttaagtagagagtagtagtcatcagcac

SEQ ID NO: 35695 - DNA, 617 bp, Oryza sativa
ttataaggtcattttcaatgagagttttattttcattgaatagggtatcatgtcaatatttttgttaatatgataagtaataataaagaaagagatgaaatgagtttacactgtttttaatgtgacttgtctctacatgtgttgcttataagattaaaaaaataaaaatgtgtcgtatgggctattttagcaatcgattaagtgttttgtttgtgtgggcaacactttttgaaaaataaaaatgaaacctctcattagaaggggatggacgtgcaaatgtgattagaaccagttttataaaaagatataggttgctatgatttttttcagtacaataaatctgggcagtaatatgtccagattcattgtacttagaaacatctcatttaatattagattgggtttttaagtacggagataatattagtttgggttttttttctagaggagagagtatgtgttttaaaaaatagattaagttgaaattaaccccaacccaatccaacctgtccacctcagtggcacctttattaaacgatcccaatacaaattcgaaaccaaaaaaaaaaaatatcctactggtggtcgactagattaatattggaagaaaattgccc

SEQ ID NO: 35696 - DNA, 611 bp, Oryza sativa
attcctgcagcccctgaccaagcaacacacgcaaccaacacgaaggagaaaagaaagcgaaaacgatgggatccaaccacccaccacgcaccatctactgtagcatcgctctcctgccagccatcacaaacccttttaccaaatcaacccccagatatgtcatcaaatccaagatctttttgccggtttggttgttgtgaaaagtgtagtaaattgtgtaaaacctctatttgcattttcctttctctattgatgcaatgatatcatcactgtgttacaaattattgtcccccaaaaaacagtaaaaaaaatatatgtaacaggaaataattaacaagtgagaggagaggagagagagaaaaaattagcagaggagggaagagtaattcttggccaggtttttacttgccggacttctccgacgatgtgcccgccgccgtgctgtcttggccggagcagaaggcgtcgcgccggccgtctgggcggacgacgaagtggccgagcgacggcgtgccgctgccggcgacgcggttctcgtcgcagaggaactccttgctgaggacctgctccagctcgaactggaagtcgtggaccagaacgtcggtggggcc

SEQ ID NO: 35697 - DNA, 550 bp, Oryza sativa
attcctgcagcccatggttagttaaaaatatggagggagtaacagagtttaaacattttttgatctaagaacacacggacattgcatagatcaaaatattcagtatcagtgaacagcaagcttttttaataaaagagcagaacacacacgcacctgaaaaactttctgccatatagcttcttgaccagtgaaagcaagaggcaaattgataccttgaagagccatccagtcaatttccttctcccagcgctcccaatcccaccaagcaaaagaatcttataagagaaaagtagtctttaagaaaatcatttccactttccataaaaagtaacagctgagaaaaattgctcaaagttagcatggtataaaattcaataaaacaaaagatcgacaccgaaggcaccctaaaagtcacaccggacagtacaacacaaagagatacaatcaggaaatatctcattcaaacacaaacatgggtagcaaacaattgaatccaggacatcaatttgggagatggaaatgcagcactattcctgacctgaatattttc

SEQ ID NO: 35698 - DNA, 546 bp, Oryza sativa
attcctgcagccccggcagggcttcgccccttcttctcttctcctcccctctcttctttttttttcactggatttgaggggggaggaatgatggctgggggctaggcggcaggccttttataggcagcgaggcctgccgcccggccagagggcggcaaggggccgcctgcaaaatggccggccccgactggcttttttgcattcgggcccctggcggcaagggttttcctgcaaaaaaaaccctacctccgtcaccgcccgttcctctcccgtttgccacgtcagcttgccgccctagaggtgtgcggcagggtctatttttgtaattttttttgccgatagattatttctgtaaatatttaaaaaaaatctaaaaacgaaaaaaattccagattcatcgagcgcccctgctgaggcgccgaccaccgccgcccaaacccttccctcccaaaccgatcccctccgccgcctgcgccccgcccctctcgcccgcacgaaatcccggccggcgcccgaccaccgcggaatcacgcgcgcgcgactgcc

SEQ ID NO: 35699 - DNA, 541 bp, Oryza sativa
tcggccacccgcgggggcacaacggtggtggcggccgagcacgggggagctcctcgtcccatccactgtcttccgcttcgcctagctcgccttccgctgctttgcccaccgatgcgctcgcccgccgccgctcttccgccgcgctcgccttccgctgcaccccccgcatccgcactcctccgctgcacgtaatggcatatatacatgtgagtgtgctcagccatatacacatgcttggctaatatatacgtctgcatgttatcgggcggcaaaccaacaagaagctagctaggctatagctggtcgtctccatgcatgcatatatatgctcgtacgaagacgcatgtacatgcggccgtctgtacccagcgtatatgcgtatgagctacgacgtcaagtgctaccgcgaagtcggcgaagacggcgagggacaccgcgcccacgccgaccaccgtccacgacgccgatgacacgctgagtgtggacatgctcctgctgcagctgcgcgagctgagcgtccggcaggaccatgggatcaggc

SEQ ID NO: 35700 - DNA, 733 bp, Oryza sativa
tcctgcagcccggtcagtaggagatcccgacgagggcaaccatggtgtaggcgacgagctcctcccgcgacctccgctcgcctggcgacaacgacgacgagcgcccgtagccagacagctgcggcagctgcaccctgcgccgcccgctcaggaacatccgcatctcgccggcgaggaactccgcggccgcggagcgcgacgcagacgcgcggcaggtggcgcgccagcggcagcacgaggttgaacggccacaccaggaacgagtactgcaagaacgcctgcaggaaccctccgcccgccgccgccgccgccggcacggcgagaagcacaacgtgaacagccatctcgatctccaaactccgagcctctccagtttagttagtaatgtacagaggaatgtatttcaacatcatcgaatccgtaaattacttccatttatcatgccttaaaggaaacatgctattacttggaaaataatatgtccttgctccaacaccaacatatcaaataaatcttagtaacaactatatttgagctccaaactttcactaatgtttgtgcgacagcttaacttataagaatacccacattgacaaaagactcgaatttgagcaggccctaaattctacaacaaattggcaacaatcacatttcaagtagctagcattgctatttggtcatatcatagcctttgatgaactaagttcacagaagaaaatacaggtttcctttt

SEQ ID NO: 35701 - DNA, 886 bp, Oryza sativa
tggatgatttctttggcgggccagcatttcttgcatggtctcggatggccaatatgcatgggtaagtcatgcttatgtagttatgtttcacgttggactattccaatgattcacactaccgtattgtgagtcgataaactgttcttttacataatttaacaagaatgcggtctgtttttaatttctttaaatattccttagctgtgagaccaggacaatagaaatttggaactaccaccagcaaaactattttactaaaagatagagctgcgactcaatttatgtagttttgtcttgtggacagtatccccccccccccccccccccgaactaagggggtagttgctggaaacagttagcttatcggttgtaagatgaacttataagtcccttttttatgagagatttatacaagccaccatgttgataatatgacttatattgatgtttcatattagtgttttgctatgagttcaatttttgttgcaaggaactgtagctcaaagaacatgtagtgacaaattgatttatcagatggggcggacctcttcctcaaagctggcttgatgatcagctagctcttcagaagaaaatcctttctaggatgtatgcttttggcatgttcccaggtgatgcaaaacagttgcatttttttagtgcatggtctttatgtggtattgtgattacataagcatgcatatgttttacagtagattatttagcatagttaatattatgtgatctcatgaaaatatagtggttcggatttctctcctgccatttctttcagaacttctctgctaaaatcagataatttatataaacaagtatgcagtctgccccttctagttgttaaacgctgacccctgttcattttacattttaa

SEQ ID NO: 35702 - DNA, 1100 bp, Oryza sativa
gaattatgggtgatgcctttgatggttcatgccataggctatggtgtttgtagatgcaagcagctgtgactgctggtgctaggatcatagcactaataactcattcttaaaatatgtataggagtagcaatcttatattgaataggatatatcttactattgcgaatctgtaaagtacgtgttatatttcctccgtctcatattaagttttttttagttcattttatttgtcctaaaataattttatttttagagtaattattgcattggagtttataaaaagcagtgaataattgtattggagtagataaaaaaatgaatagttgtattaggatttaatagagtatggatattctattttttttcttttgtattggcatgtgtgggatgtgtgaaaaatgctgaatttattttgggatgtaggtagtatatttggagacagaaggagcatgtaaggatcataatttctcgtgtagagcaaaaggacgttcggattgttgtgatccaagccagattattaagcaaatcggtaaccagaaacaaataattttaatttggatttaaaaattgaattcatattcttccggaccaattttgtttattgttagtagttcctagtaaggagtagtaatacgacgttatatagggacctgtccggtttgtcaagccgtttgcttcatgcattgatactgaggtactccgactagataggttgttggcttgttggtcgcagagcagtagatgtcagaatgtcaagtaccgcggcagcgtagtgactaggagttcttgactgagagatcgagagggcatcccggtaacaagaaatgagagaaagatggaaagaggtcctagctatgcacgtactactacgtactctagtctagcaaagatgctgggactactgtggtaaatagtgccactcgtagtgttcaagttttgttcaaagttttaggtataacatttactacttttacaggtggaaataaacacctgatatatcaaatgctcttgtctaaaaacatatatccaacgttgaaaatgatgccaatctaggctgtgggaaaccaatttcttatatgggagaaattataatagtgatg

SEQ ID NO: 35703 - DNA, 546 bp, Oryza sativa
catcgagatcaacaacttttgtttgggttatttttctatatgactttgtttaaatagtttgaatttggatttcaaaatatgacaccttcaaacaacattttcaaatactaaatgatttcaactgaaaaagtcaccaacaacaaagttgtataacttatcaagatctacaacttttatattaataattttttcatccgacataattatctgctcatagatatcataagaagcatctattgtttgaagttcaatttgattacttaatgatacacagacactataaactatggccctattaatagcactgataacacaatgactcgattgaacatagttgcagaacacaataattgcatcttaatgacttactcttgattgaatcgactccctcaaccgataaatcgaatactacgaagttattatcactaaaatttgaaaatgttgatttgttctattagaaaaactagcgagttatgtctattcgttgatttgtgaaagacggttagaggggctatcatgttccgattaacactcgataccgtattc

SEQ ID NO: 35704 - DNA, 680 bp, Oryza sativa
aggcagctgcaactctctccccttcgttgcactcctctttatcaaattcctccattaactcgcgttgtcgttgtgtcacatccctgtacatcgtgaagacgaaagatgtcagtttataggaatgggcaggaaattctttgatcagtgtaattatatagctctagtagtctagtttgagaatgtatcatacgttggaactcggacgttgaagtgaatatactgattcccataggctggggaattccgtgcttttattcctgcagttttttagtgaaaaataaaatatgtttatcacaacagtgtacatagtgagtactttcttccagcagatataatagggcaaaaaccaaatatatcatctaacaaatccaagtatctgtgcataggatttctagcatggctcgaacaaccaacctttgcccctgaggacaaccttttctcctggttgggtaccttggcgaacctgatcaggaaataccacaaacacggtcattggtaagccattgaaataactggattacatggttagtgtcacgcagcaaaaatgaaatcaataccttgactgaaacgttgcccgtaagggttggtactgtgacagttccacctagtacagcctgaaaatcaagcagttttagaactattaatcataaaaggaatatctgcatagacagcagaattgg

SEQ ID NO: 35705 - DNA, 1035 bp, Oryza sativa
tgatacctgtgatagtagtactagatgtagatggttgtactgggcgaaattcagcgaggctaggagttttggaggattttggttgaactagtttctgcgagaattcaataaaatttctgaattatgatggagccacggagaacaagcaatctgaaagaagatacgcaggtactgcgagtgtagtgcagccagaagcaagttatccgtagcttgtgaaagcacagttggcttcttctacccaaaatataagaacctattaaccaaaatataagaacctattaacgaatgagatattttctagtactaagtatattttctagtactaagtccatattcgtagtactaggaaatgccccatccgatttaagttcaaattcgtagtattaggaaatgtcctatccggttctaggttattgtacttaagaacagatggagtaggaaactaggttattgtacttaagaacggatggagtaggaaacaacggtgtactcacacagagctgattgtctgaacaatcttccagaggtcatcaaactgctgatcagatcagaaaaaaagattgaaattttggatctcaataccatttttacctgtcttgaacggattgcaacaatatgcattcagaactttagacatgcatacatactgcattggaaatgcgtggaacaaaaacccatacctgccttatgggaactataagaaatatgttgtacattagcaacaaagtgaatttccaatacaaacataagatcatcaatattatccatgataaataaaaatacagggctggtataagcaacatacaatctccgcttgttcagaacctaaaatttgtttacagttgtaccacatggtatgctctctacaactaatgctactaaggaaatttcacagcatcgcgacagaacaaacaacagatgacatatcagtaactaaaatcatgtgttctgatatgtccagctgatgaggcatgcaaaacttcaggagatcagaaccctctacttcaaagtcagttttcgttgggtttcaagatg

SEQ ID NO: 35706 - DNA, 1235 bp, Oryza sativa
aatgtctaaaaaagaagacaataaaaaatttctaactaaatactccctctgtttcacaatgtaagtcatttagcattttccacattcatatagctgttaatgaatctaacaactatatgaatatgagaaatactagaatgacttacactgtgaaacggaggaagtagtaatgaggagctttcttagaaaaagatcaggttgtttagaataaagcaacactctggttcctagaacactagaagaaacaatggacatttttgttgggtaagaacctgtaaaagatggaaggggagatttggaaagacccaaatatataaaaaagaaacagccaattctaaaataaaaaaaatctaattgatgtttttaatgggggtacttatcctacggtttaatagctggttaagcaacacgtggaacggcatatgaaattgatatatgcattatacttttcagtgatcgtgaaacgccctacttattataatttcctgaaaataaaaatcacatgctctcttggcggtaatttgaagtttggaatatccagcaagagctagtgatatttgacattatagagtctgtcaactccttgcaaaacacgacgccacatgaattaaacactctatttctttgagaagagccagtctattgtacgccctgaatttgatgagtcttaaaaaacacccttgaacttttaaactggataatatttaacactaaattattaaacatccacttctcaactttgatcatatttagagtagttttaagcaatgtggaaacacataacaaggttgtcaccatttttattcttaaattagcaaatggctttcaattattcagggaaaaaaaatacttacacgtatttagagtttgagtattactatagaaatatttgattattaattctattttgtaattgtactactccctccttcccaaaataaaacatagcaacatctagcgtttaaaatttatcttggaacctaccgcttcatctcaacaatcacaatcatgtatattcaaataatttttctacctattttctcatcttaaccgatcacaaccacccctcatttaatttcacgtattttcgtaatcaccttgtacaggtgacgatgccacttttatgctttatagttaaatttatcaaatcccaagtatatggatatattcagaaagctaaatgatactccatcatgtagccttgtcatctactaactagctgggacatcatcact

SEQ ID NO: 35707 - DNA, 1572 bp, Oryza sativa
aagttgtgaacatgtaaagaactagtactttgatgttatagtggttaactagttatcaatgatagccttttatttggaggaccaaacatgatccaacgaactttcaaattcattatctatatttggcaaaaatttctgatctctttccagttctctaagtgtgtactccgtaattacttctgtacaacctctattttataaatgcctgatagttttcattttgccatgtcaaccagatgtttgataatccttttgccatgagaggaggtcgagatgtcaaggttctattgttgttcattaaatgatttgtttaatgacaaagaattgattattggaagcttacttttttctctttttttccccaaatataggttccaatcaaactatcattcatggaagccgtccaaggctgcagaaaaactattgcatatgaggctgatgttttctgcgatacttgcagtatgtgtgccacttgtttattctttccttctttgatgcaggcatgtcggttatctttgtccaccccatttgtttgtttttatggcttaagcttgtcatttgtttgatgcagatggaagtggtgttcctcctggcactgtacctcaaacatgtaaagcctgtcgaggtgctggtgtggtatgtatcctttgacaatcttttccccgagtatgccacatattgatatttatatatttactttaacaaccttcaaaatgttgtcattgagtgcagatattcatgcagcggggtataatgagtatagaaactacttgttctaggtgtggtggaagtgggaaaattgtgaaggtgcatttctgctttaattacatatttttatttatttgtttcttgaagattctatagttcttcatgataaataaagtcccatctgtcatggctgtctttgttcaacaatttcactcagtggcggacccagcacaaaattatagctatggcgaactttctaaatgtacttagtaccgaaacattttttttataaaaaaacacaaacataccaaaacattagtatataatgtatatgataaaaataattagtgtgcatatccaataaaactataagtaaataatttactgttttcaatataggtgaagatttattcatgaaggtgagagcccctagagccatccaaatgttcccattccaaattattctccaaatatttgtggttagcgttaaacaaatagtaattatacttttgctcaattccttaaagaacaattccaaccgatgcagatgcatcatcacttggtcaacatgacaacttgctccaccataccagtattagcttgtactagtactaatactaaaagattagtgcttattgcccccatcatcacggtaaccaccaatgaaacagtcagtagtgttgttgtttagttgatagttactgctggcagataggtatggcagctgccacaccttgccacaagggaaggtccgccactgatttcactgaaaaatggtaaacatcacttctatgagtgtattttgttcgttacaaaaagatctacttcctccgtttcacaatgtaagtcattctagcatttccc

SEQ ID NO: 35708 - DNA, 661 bp, Oryza sativa
cggtaggtttctatgtacccctcagtatgggagtttgtcaaatcaaacatgtgatactcacctaatcaccgtcatagcttcattttcactttaataaaatgctaatcaagaatataatttatctcattgttcttgttggccagccttgcatgtatacacgtgtcccaagatgactaccctacatttttgttctcttcacatgctaatgtcgatgcaacacaatagcacacgtgcaattatagttgggattatacaaaaatagtgaatgcaaaaaaaggaacattataattatttcattgcggctagcaacatgaactaaagtacctaaatttaatttggaaagagtagacaagttcgaaacaacaattaggaatgtctccaaaataacagaccatttgttcatagaaaatatataaaatgttcaccaagaacacaagattgtctcaattaaattaactatatatgcatgctcctataaagtattgataaaattgcctaagtgtggaagggttgaaggcttcaaagtgttgccgacataaacaggacaaaccttcggtttgcttgttctcagattaaagttgatctgctcctgaatcaagctactaccattggagcagtacatgtgtaaagtcagcaagtttttggtcagacaaagtaccaa

SEQ ID NO: 35709 - DNA, 1596 bp, Oryza sativa
atgtgtgtccttttagtatattaaagtaaaatttatttaaggagaaaaataccataaaactcttaattttctgatagagaattaaatgtatatagcacatttacatcgttgtcggcaacagtggcggacacagttttaaaatatagatggggcggagaataaagatgtttactcgataagtaatcgaacacaacacatatcatatttatatatcaatcgtatacttgtctcattattgtttgtggcgtgtatgcgttgtgaagagacagactaatatattggacgttcacaccttgttatacctaattttgatggcctataactattgtaaggggtaggaagggtcttgggggtgtgaggcgacacgggtcatagctgggacggtccacgcaccctacctaataggtagatccgcccctggtcggcaaagtctacaataggaaaatatagcaatgtcgtctttaaggtttttgtccaaccaaagacatactaccacataaccagagagggaaacatgatgagtagtgacacgtgcatgaaagaacctaaagcacacacatgaaaagggtagaaaaggttgacccttttttggacaagatgaatttgtattatagaatttttcacataataaaacatctcaatttatatggctttagtttccccttttataatgttagctagagtagatgatgttaaacctccatagttacatgttaaacctcaatgcagttgatataaacaattttgacttctctgtagtcgatattgctacttgctagtaccgtcagcatggtagaaatgaagacttattacacgtatagcatatttccgtcaacgtagtactccctctgtactcgtaaagtcgttttggacagcgacacagtctccaaaacacaactttgattacttgtttctataaaaatatttattgaaaagtgatatatgtatatttttatgaaaatatttttcaagacaaatctattcatataatttctaaattttcaaacccaacaactcgagagttattcatgatttatattcccaaggtttgactaaaacattgtcctaaacgacttcctttacgagtacggagggagtatttgctaaagaaattataagtctgttgtatttaaagtcaactcaggcataagaaagaagatatgcaaatatgacatttcttttctagatttatgtaattttgacattacgttgtcaatgttccatagcatctttaggtcaactggtatgactacaagaggaataagaatatcattaggcaactaatcccccctcttaaaataagtatttttacatctaaaacttatttcaaaatgaattcattcactactagagaaacgatctttgctgggtcgacccaaaatcacaatagtcccggttccaaaaagaaccgtccctgtttaaaaacccacagctattttataatttttaatcccggttggtaacaccaaccgggactaaaaatcatctttagtcccgattcattccctgtcagtaggatgtcagggggccgaggatctttaatcccggttggtgtcaccaaccgggactaaagatcatctttatagtcccggttgg

SEQ ID NO: 35710 - DNA, 753 bp, Oryza sativa
gctacatatttaaaggtagtatgagaaataaacttacactgtggggaatgcaactgtttaaattataacaaatggttagatatttttatggttagtaactcagtgttgataatggctagatattgttacgtttagtgttgatctctccgaagcaatttaaaccatctgattttctaaatggaagtgtgatttcatatattttaataagactccacgtttaatgatgatagaaaattggtagctttggaatgctatgttctgcatttctgacgatgataaattactagtagtagctttagcgatcagactgcatacctcaatggatatcgctctcctttgtctttccttgaaaccacctatagctgctgtcgtgtacctatgcgtggtaaaattatgtaaacaatcagaaatctggatgatagatactaactactacaagcatccataacattttggttgaattaatggaaggatgaaacatcacgatttgttcccttacagtttttcttaaacaaaaatttctactattcacacaaccaatgtaattccttcatataaaaaaataactatagcaaacagtccagtgctcacccgacaacaaaaccagcacagtgcagcaagaagacagacagcatcacaaccccaatatccccagaaaacaggcctccattcccatatgatgcatcagcaattgttgatctcagccgtacaaagttctcagagaacacgctgtccataagaataaaaaaatgg

SEQ ID NO: 35711 - DNA, 524 bp, Oryza sativa
gaaaagataaagctataatagtttctagaaaagcaacttgaaagcatcacttcctgtgtggctgtgctacacaaaatcctttctataatttacgcatattaactaaatgattcctccatgttagttattttgtaggtaaactttagaaactgtgcacttaattgatccacacttccattcattaatctgcaaagttacttctgagtactgaattgcgtttgtaaaaattgttgtaagagatcaaattgatttaggtaattttatttgtctttgttgcatattactaatcttgtcattgatatacattttttaggttgggaacaagctgaatctgaagttgctgccctaaagaagctacttgaagcttcagcccagaagaatggttccctcgaggttcaagtcagccacttactgaaaaaaatgcttctctcgaggttcaagtcagccgcttagatgaggctctgaaggaatgtgtcaggcagctgcacctagcacaggaagatcaagcggagaaagtccatgat

SEQ ID NO: 35712 - DNA, 717 bp, Oryza sativa
gactatgtcactgtactcctctatgactcgtctgctgcctcccttctttattgtcattgagattttaaaatcaaacatgactatcattagggtttatttttttttactttttagaagccgaaacctttaaaattggacaatatagtttttagagtttattgtctcgttgggtttcattttttataattttttgaaatcccgtcaaatattgccactatactcctctactacatgttcgtcgcctactctttattgtcattgggattataaaatcgaacataactatcattggaattcattttttactttttaaaagtcccaccagccatcggccgctctgccattgtactcatgtatgacctgcccactacctctcatttttattgtcattgagattttaaaaatcaaatataattatcattcaggtttattttttttactttctaaaagtcccgcctaccaccttgaccgattgcttcatgatctgcccgtcgtccttccttttaatcgtcattaggattctatttagtgttttattaatattttttagatgtctcatcaaccaccaccactttactactttatatgcatattacttaattaatctccacatgtgttttatatagtgttttctttcaatagtccttattttttttatcaccaattgtagttatttataaattgtattcctagttgaatttttttctactttcagaa

SEQ ID NO: 35713 - DNA, 720 bp, Oryza sativa
acggccgtagaggagtataatggcagcgtttgacgggacttctagaaattataaaaacaaaacccaacggaacaataaactctaaaaactatatgatccaatttttaaaggtctagaaattataaaaacaaaacccaacggaacaataaactctaaaaactatatgatccaaattttaaaggttctaaggagaatgaatagaaacagtggtaaatcgagcaagcaaataaagaagaaggatatgacagaattaagaggtatcaactggtgtgacttttaaaaactataaaatcaaaaacacgatgatgataaggtttgatctttcaaagccttaagacaacgagatagctatttaataaattttaaatattaaaaaatatataattttgtatgggtgctagccgcgcaattgcgcgggctacccagctagttattattgatatgaaaagacaattatgcccttcattaagactatatatttctcttaaacttgtatcctcccctagacttttaacatatccaagctctaattaataccgttttcaccagataattggaggtgtgggatagtggtctctaaaagaaggaaaagaaaacgtggataataaagaggactaatgaacaccacgcataaacaaagtatttatgggataaatacttcggtctaaaaataaggtgttttagggacagagataagagtaggattattttggatagagc

SEQ ID NO: 35714 - DNA, 1646 bp, Oryza sativa
cctcgagtctcggttcactctgctcgagcagttgagcttgagctagacctctctgattgtgggtgtcgcagcctgatttgcttgccgtctctttggttggcagtaacgcaggtgcttagcacatgggagcacttgtttatatcagcttgattatactatggtttagtggagggtagatcaggcctttgcgtgtgattgtatttgttttcagacggggtcctctccgtagggtttgcaatatcgcacggttacaccacggttattgtgcggtaaccttctttccggttttttaaactttatgattcgtaacctccggttttcgcggtaatcgtgatactattgggtagagataatcctcaccaatatggtagtaaaggaaagtctgcctctccactattatgtggccaccgagaactgatatagaactgaaagaaaaatatgagattatttttaagggcacatttgaaatgcaggattatagaaatatattaacattcatgtacgatagccaatctataggattttgcacagtccatttctttgttttaaatgaccttatacaaatatttcccaagaaatgaaatccttcagattttcttttagggcccctttgaaacgcaggataggaaaaacacaggaataggaaaaacgtaggaattgaagttgtatgtttttccaatcctacagaaattgaaaacacaagaaatggagagaggagccctttgattataccacaggataaactcaacaaaggaaagtttcacaagaggtctaatctcttgcttattttcctatggaattgatcataggaatgcaatcctatggaagttttcttatcctctccctatgaatcaaagggctctataggaataaatccttaggaaaatgaatcctccaaaattcctttgctaatcctccattttaaaggggcccttaaatcctttcaatctcaaggagccctaagatgttggtgtttttgttaccttatttttgttggaaatttagtgaggttcactgatgtatcaatggcctttactaggtttagcacttatatttactttacgccatgctatatattgtacaaagttccagttagcattgttccagttagcatcatgatatacatcatcaaacatatagaaatttcattaaacctcacaaaatcaaaatgaaacttcatgaaacatgatctatatttgttaagtctggtatgtctcgctcatgtttttgtgatatttccctctgattatatgaaataacctagtgcaaaagtaaaacttatttccaaatacactagtataaagtgaaagtatacactagaccccatgcaaagtgaaactagatacactatacccaatgtaaagtgcaatttgatcttaatgtatgttagaagagacacattcgtaggtgtgcgagtaaacagtacatgtgtgtattttgtgcaattgaaaaagaatataaatcattacaacaacagaacagttttgtttatatgtacttatgtttgacatattccttggctgtcaactccacactgagatttatgcaaccttcatggcacaggcaaagtttgcacatgggctggtaggcctatagatgtggggtaaggaagaaagggtgaattgtaagagttagataaaaagaat

SEQ ID NO: 35715 - DNA, 539 bp, Oryza sativa
atttttttatttttaattttttttattaaaagttttacaaaaataatttttcattttgaaaattgacggatgtagtcgcctaccgccctctgggagggcgatttttaaaaatcgccatcccagagggcggcgaaaatgacgtggcagacggccgttcgctctcgggcgacggccgtcaacgaaatttgcaggcggcccccttgccgccctccgctagggcgattttgtactgtggggggggccgcctgcaaatgggcgattttgtactgtggggggccgcctgcaaatgggcggcggggggcctggaattttgcaggcggcccccttgccgccctccgctacggcgattttgtactgtgggggggggccgcctacaaatgggcggcggggggcctggaattttgcaggcggcccccttgccgcccttggggagggcgattttatactgtgctttatatttttgtataaatattaatagttatcaaatctttttatattgaaaactatacaagattaaaatctccaagactggtaaaata

SEQ ID NO: 35716 - DNA, 623 bp, Oryza sativa
ttctgaaataaggaggatgctcgatacccatttaatccattgtgttgcatacgctggtacttcattttttaagtctaaacttctcaaccacaactaacttttttcatttcattttctcagcatgtccttgtaaacgcatggtaacacttaatttgatggagctgtttcctccatgaagaagctgttattttcctatgaatatctcatcaggttaacaggtttcttgcaagttcagaacaagaaagttgcctgagatgatgcaaactgactgcacaaacagaaaggcaaccagttggttacttcatcgatattacaggctagatcgatgtagcctggagactctgcaagtatgcatagaaacagagtggtctttactcttgttcattaatcaggatagccttgctgatgctgaagcagcaaaacggaagccggttagagattgcagcataaattggttccagtaatgctttgcacttcttttgtgggaccggaacttttttttaaaaaaattattcccctttggtgggtgtgtaaaacctcttttaacacaccccttttttttttccgtgtagaaatataagtgattctagcatttcccacatctatctatctattatattatt

SEQ ID NO: 35717 - DNA, 2036 bp, Oryza sativa
aacaccaaccggtactaaagattggaaactaccccctagagctttaaaaccgggactaaagatatttttagtcctggtttttaatataaccgggactattgtgaaatctggtcgaccgaccaaagatggtttctccaccagtggatgtgccctggaaacgaattcgcgaggactgaaacattggtagcttgcgttacctagtgaggcaattccggtggaaattgtgctgcaaggaagaaggttacaggaatgctactccgatgcctgttcttggactcccaattgaacttgagaccagaagtccccctgattatgctcatgcttaaaatgatccatatgtttctttatattatcatgtatttcactttctcagtttatgctttctacagatggttgaagagttggagtgttgtaggtgtaatggtattcagaaatgctgtgagttgtgatcattgtgtaaaaaaatgtggaatggcgcataatattataatgcgattataaaaatagatgcctaagaggttccttttcttttctttttactaaaagaggatctacggtatgccactaggtaaactagatgaaacctgacgcgttgttgcgtgagttttataggataatagtacaaataacatgcagatagctacacggtataactttatatgtttttcatctgtgatcaaccatgggaaaaaatataaacaattaaaataatatggtttctaacaatttaaattatatataaatatattattcgaaagcaaaactaaggtgatatgcctcaatgacagaaggaaaataaaacgaaaaaaaagacgatatagattaatcattcaaagagaaaacaaatatgatgtgacttcgtaggagaaagaaaggagggacataatttcgaccataaatcaatcgttcaagggctagaaacaattaaggtgatgtggctcaaacagataatagagaaatagcattcactacacgtagtggggatgactttatagatttataggatgagccagctggttactttatctggtatgcatagaagaaaaacgataatgcaaaattacccataagaaaaggtaatactctataatcagtaatcacaacaaatcagcggtaggcaggtgatttccgccagtttgggcccaaactggccttgggctggtctgaagctggctacccccatcatgggcctaggctttttttcggttttagattttttttttaatatttacagaaataatctatcgaccaaaaaaattgcagaaatagcccctgccgcccacctctgaggcggcaagctgacgtggcaaacgggggaggaacgggcggtgacggagggagggttttttgcaggaaaacccttgccgccctctggtggggcggcaaggggcccgaatgcaaaaaagccagtcggggccggttattttgcaggcggccccttgccgccctctggccgggcggcaggcctcgctgcctataaaaggcctgctgcccagcccccagccctcattcttctctcctcaattccagtgaaaaaaaaagaagagaggggaggagaagagaagaaggggcgaagccctgccggattcagacgctgatttcaggtaatattcatagatcctatatgtgactattgagttaaatagtgtgtattctttaaaaatttgtttgaataaatgcattatatttttagggttttagttgtactaacctagaagtgcgtattgtagatattggtaactacgtagatctgctagttcggaattaatacattaccgttgcatttggcttacacaagaagatattacgttgtagatgtttattgcatgaaagagtaatatgatctagttatttcgttgacagatatgtcgaacaaacaaatattccaagtttaccatggaccaggaaacgtccgttacgggccaactggggtagatctgtcagattttattgtatcagaaaggggaattgatagaccggctgagaggagtgtaccttatataaaaggatggttaatgaggggcttgagagttggg

SEQ ID NO: 35718 - DNA, 567 bp, Oryza sativa
tcccgcatcacttttgtttgaatggagactgaggctgacatgtgggcccgggtggcattgggaatgaaaatttgggagagtggcatttgagcactggcattttgagagagtggcaaatagtaaattctccccttgagagttgatccacagacaagtgacataacaatcaatgttatagtaagtcgggcaactgagggtttttattgggaactaatgccagttcaaaactctcgagtgtggagatggtatttggaaaatgcattgcaacgcgggtggcctctagctttggttccgtttgttcacccgaaggatctaggtgtgcagacgaacatggatgatggcgagggaccaagtgctgaagtaaacgagacttctgtggaggaggtcaacgcacgagaggacgggggcgtagtagctccagtgggcattcagccaggtggagtggccgacgagggggagactgtcggtgccattgtggatgaaatggagagggaggattctgacaacgagcgtgtagaggaaggtgattctgactacgctttccgttgttgcattaaaatctgcctg

SEQ ID NO: 35719 - DNA, 684 bp, Oryza sativa
cgccgctgtcgtcgcgctgctgcgcagccgttgttcgtgccgccgcgctcgccactttgaagccgccgcgcagtcgccccggagccgccgcgccgtgcgtcgccgccttgcgccgccgtcgccgtcgtcgccgccaccgccgccgccggtgagccgtctcccccccccctcacctcgcgcccaccgccgtcgccgcccggggaagcaaagagctgagagagagagagatagaaagaagctgggagggagcagagaaaaagaaaagagaggaaaggaggaaggagccgggaggagagaaagaaaagaaaagagaaaagagagaaaaagaaagagaggagagaaaaagagggaaaatagaaaagaagaaaaggagaaaatagaagggaaattggggtagaaattaggaggatttaggaaataaaaatggtcggggttaatcgtagattatttttggaaattcctcgagcgtaatagtatttcggtcgaaattccgagttaattataaaaatatgtttcttgatcagattagattaaaattggtagtaatttagatataattaataactaaacaattagatgaattcttatagattattatagattatttttggtaatctctaaaagtcatcggttcacggtagaaattcggatttaattactagggattttagccgtgtattatat

SEQ ID NO: 35720 - DNA, 551 bp, Oryza sativa
tgaaacaacggcggcgcgacggcgcggggcgcgaggcgacgagacggcgcgcggcgcggcagcggcaatgggacgcgcgcggcgatggcgacagcggtggcgcgcggctcggggcgggatgcgatgggcggcgacacgacggcacggcgcgacagcgacgatgggacggcgcggcgcgggcttgacgggacggcgcgcggcgcggcagcggcacagctcgaggcggcgatggaacgcgcacgcggcgacgggatggcgacggcgacggcgcggcagtggtggcgcgcggcgcgaggcgggacgcgacggcgacggcgcggccgcggcgataagatggtgacggcgacaggcggcgatggtgacggtggcgcgaaaacaggcgatgatggcgacggcgcgcggcggctggcgacgatggcgacggcgcgtggtgatggtggcgacaaagagagggggaaagaggaggagctgggttaggggaccccgtcgaacaccttaggtgcaatgaacagtgccgttttctaattaacccgattttagtgtattttcca

SEQ ID NO: 35721 - DNA, 876 bp, Oryza sativa
cctaattttgcatatatgcattttactcaatatttgtgttatcttaactaatgaattcaccctagattaatattactcatattttatttttatgtaatttatttgagttttaattaaggttaattcttattccatcgtatttaaatttaattgatccaaatatggttgcgataatattttatttatttctatccccacctaatctttattttaatttgtatttattttaccaatttgtttttaagttttattcctaattaactattctttactcacgattaataatcttcgagatcaaatccagataaaatagacgaataagattggcatgatgcaattagtttaaaaagtttttttgaaaatccgtatttttagagttttgattttgtcggtcgaattttcagggtattacatcctacgatcattggtggagaagtggttttcactcccggttcgtaacccctatatagtcccggtttttcaaccgggactacgaatccgggactaaagatcgctatctttagtcctgggtgaaataaccgggagcaaaaatcgatttttagtcccggttggtaacaccaaccgggactaaagatactttatctttagtcccggttggtgttagcaactgggactaaagaggcagatccggttgcttctttattcttttcttctcttcattatttttcattatttttaatatattgatttcaccctagccctatcccgtccctaaattcccaaaacaatcatcctcaaattgccttcaaatccacaaatcgatcatctcaaatacatcacaaaatctaaaaaaaaaattacatcacaacttctacaaaattcaaatcacatatccacatctcacacaaatcaaat

SEQ ID NO: 35722 - DNA, 698 bp, Oryza sativa
ccttagaaggccggttttatgtccaaaactgatggaaattaactcttctcataactatgctacagtatcaaacttttaaactttgaccatggtttttaaagtaaattttataaaactccatctagtatagtctaggttacacaaaaatacatgaattttggcatgtgacacatatcctcgcgtattatggtcataaagtttcacacagtcgcaccattaaccattttgacatattcctatattaaaatttgactctctcaaatataacttcaatctaattcatatcctaaattgcaatgccagatatcttgatcttcaactattaaagtcagtgttatttgattccctcagcagttttgaagggttgtttacgttgacgtggcgctttagttggtccaacctgctgagtcatcctatagggcctacctgtcagtgacccttatatttcttctcttcctttggcctcttctccactaccgctggggtggcctcttccaccgagctcatccatggcgcccacgattgaatgcaagagaggtaggggaagaggagagaatagaatgactaacagcttcttggcctactcgatggcgtagggtggtcgaagtgaaagagatcaaagatgttgtcggtcagtcggtgtagacgtggataggacggtcagggtgctccatctccagcagtggcagcagtgtctg

SEQ ID NO: 35723 - DNA, 651 bp, Oryza sativa
tagcttatctgggcaatgatcaatctggccagctattgaccaaaccaaacactggccaatggtcaattagttagcttaccaatgccattaatttgagcaattgtgcctgagctagcatgcaagtgacgtaggttgattaagaaattcatgtctccaggtaatttaccaaatgtacagcctctcaagccaagaacctgaaggtggcacaagctgcatactgaattaggcagtttcgcgatcccagtaaacgagaggtctaaatatctgaggtgtttcgttgagctaataacatttgaaagagcggacgtccgtcccagccatttgtaactccttgaagagaaggccagtaagcgtaggcttttggaattacacaaaaaattactaagagggagatgagtttcattattgctgggttgatgactgccgtcaagcaacataaaagtgcgcaattgttcagttttaaatttatctggtagtgtatctagggcatccatgtcaactgataaatagcggacatcctgtgaaacacctctcaccttattatcgttaccatggtattcatcagaagaaaaagcacttgcaaaatcccagaccaaatcatgcataatgtattcagttttccttgctgatggctgaagaaaggccctattg

SEQ ID NO: 35724 - DNA, 694 bp, Oryza sativa
ctctctctctcctgttccgttttgtctggacatgacagttgtacagtttggcttctgcatagagcatagtttaactggccaaacagatcgatcgatcggctctatcaggaaggatgcgtcttaattgctagcctgattagttttctgatctgagggtgtaatcatcgtgctaaactatactcaccttgtctggcagatagcatcgaacagattacagtgatgatcccaccgtcgctacgaggcaacagaagaagcaaccttttttatgtccattgtaagagactgagtaaatcctaaaactaatggtttcttcaggtaatcggtgacagttcactggaatatgcggaaaatatataccccaaatgctagctatagcatctttggatcaaaggaaacggcatgaaatcaaaatcaaatttaaaaagatttttttcttttttttagcggttaaaaagattttttttattacacagcaaatgtgcatatgcacaacactacactcatatacccacaaatgcgcctggccctaacacaagctaaagagaagcaaacaagcggtgcatcccttatctcactagattcctattgagatttctattgaaagcccacttaaatatgtgtaatattcataaatttaaatttaaaaggatttctaataaagagtgtgagggagctagtaaaaaacagggatcca

SEQ ID NO: 35725 - DNA, 587 bp, Oryza sativa
agagaatacaaaagagaggccaccttcccaaaataacagcaattgaagtttgcacttgcaagaaacccaaccgaaaaccagagcaacctaaagctaacaccctagctcatcaacaaccatatcgttatgcaaacttggaaacgccagagtccacgccggagggcctttttgccacaagcatgtcagctatggattaacggcaaccaaaagactgaggaagtcataaaccacccgcattaagccgtcaaaatccaacttaatcttgttgctgcttggatcagtgcccgccgacaccatttgggggaaggaagcctcagagaagggagggccactaaaggttgcggccatagagaccgcccgcatcgagtcttcttcaatccgactataacaaattgctagctagttccacgccctccaacgcccttttagggaaggaagcctcaaaggaaggagggccgccgaacaatgtggttgaggacaatccaaggaaataaggtggagacgaagagggagctggacaaaagataagtggtgcaggggggaatcccacagctgaaagaacgtcaaccgcgtcaacagggaaggct

SEQ ID NO: 35726 - DNA, 759 bp, Oryza sativa
tggtctctacccacaaatcaaaaacaataatacaaagcattgaagataaaaaaaccataactagtacaatcaccgtggatatcattatatcaacaagaaaaaaagaaatcgctaaagagaaactatcaatctccgtgttaaatctctaaatcccgaaaccgcatcaacaagaagctagctactcctccggctcaagatcgcccccatctacagcagatcaacatgaataaagaatgcaatccccctacaaatcgaccagagcagggtgccgtggactggcacgaggacacacacgcgcatgatcttgccgtcgtgcgacggagagaggcggacggggaggagggagaagcgtaccattttggtggccgcggaggggaaagggggagctagggtttcggaggcgctcccttgtctggtcgagacgctgcggcgagtggcggcggggaggggaaggagaaggtctgcggctttatacggctgagctcctggaggctagggcttactggtgggggagagagcgtgtgctgctttgtgggccagaatgcgcatcccatgggccatgggccgtgatgcgttgccttatagttggaataagttcacctgatgtccctcaactttacaccgagtttgtttgtcatcccttatcctcaataccacaaatcttcacccctaaatatacaaaaccgttcaatttatatcccatggcagtatagatgtcttggtttcgctggcgtgacatcttagtggacaaaataaaaa

SEQ ID NO: 35727 - DNA, 542 bp, Oryza sativa
gtggatcccccttttaatgctgatagataggatgaatcattggtttgcacagcaatctatatatgtgttgtgcatgatcttgatagggggcatgactagtttctttatccaattgtcaggacataaatagcgatgtgcttcaagggaaggcaaaggagaaaaaggtaatctttttttgtgtttgtggtttgtgatcccacttgtgtatacttttgctcctctttaggtagtggtagggctgtcaagcaagttaattaagtatttctgaaaagtggaagataccattcaagtttgttaatttgttcttgttggttatcatcagtttatacttaatagattaaaatactgcagcccatggttagtgcattatagttatgcatgcatgctgctcctgaaagagacttgaagaaaaaagagaggatcaggaaatttatttgtttttaatccttaaaacttgacttctgaccatatcaaatatgcatcgtgatatatagctggtcatttcttgtttcaatatttgtagggaggatatagaaattaaa

SEQ ID NO: 35728 - DNA, 745 bp, Oryza sativa
acgaatgtgaattgtaatgtgttatatagtactagtacttatcattatcctagtaaatagtgggaatgtgggatctcagctgttgctactaatcctcgcttccttggagaatcttaaggatttgatttaatgatgttgtccatgttttaagctcagtggtggcaggcaaagcgcaggaaaaactccagctacagcttcatgctagcctgtctttgggacaaaaatcattggaaatgcaactattactccaactagtcaacagcaagaaaaggctccaaatattcagtgcagataattcaatataagaaagaatatgctgttcaatacaagacagaaacttagcagcatttctatgctgggaatattaatactatgggggttgacacatactaagtatgatcttagaataaaaccagagagatgtatgaagttaatggcaagccagttcataggatagcacggaataataatactatcaagtatgtcctaaattgcaaaatcattaaaaaaaatgcagcggaaaatagctttttgtacctatcagcaaaatgcagggtccagcagtaactggaatattttatgccacagctcatagatattaggtgctatctgggaacaatctaggtggaccattagagagtttagtctttaggtactacaaactagatatatagaaggtagctaatcaatgtgattgctgaggttagctgttgcagccatttaaaaacatggataattttggatg

SEQ ID NO: 35729 - DNA, 746 bp, Oryza sativa
gcatgcttcctaaactaccaaagatgcggcttttattaaaaagatttatatatatgaatctcttagaaaatcgtttcaactttataatagttaattcattcggttgtatccttggataattgtcacgaaccaatcggtcactcagcatttagctcaaaagaatagacacttagattgtcaatatattactggcagaaacctgttaattctcaattcccttgttattaccctcatatctaactacgtaagagaagtttcttttaaaaaaatacagtctctctgtaccttctcaagagccttaaattaatcgtactccctctatttttatcaacatgacgttggttagttcaattttaaacatcaaataaaaacagaaggatttcggtaataatttccacaaaattgagggggaggatatagatgtgtttacctgcaggtagttcaggatggacatacattgtcaagctcgcagcaaactttctgaggaaaaagcatatgcctgcaccaatcgctgcgttgaaattgcaagcaaaggtaggcatgatgaattgatgatgatgaacatggcgacaccggtctctgcagcagttggtctctctctctctgttggtttggtccccggccgttgttaccgttactgacggacgtacgcacgcacgcacacgtacgcacgcaccgaatccatcattagtgcgccgcacgtcgtgagagccatataagtatatagtattccttgcaatacgctg

SEQ ID NO: 35730 - DNA, 616 bp, Oryza sativa
cgcaccccctccaccacgccccatcgtgccaccgcgcacggcattgtcgctctcctccggccaggtccagaagcagggtgccggatccagccacgggggcgccagatcagaagcttcgcgccgcgccgatgtcagcccccacccatcacgcgccacgtcatcatcctcgcgctgagccgtcgtgttgccgaggaatggcctcgccgccgccctcacagctggcagcgcggaactccggtggtgcgctccggcggcggcgaggggagaagaggaagggagggggcggcgggggctagggttcaccccctgtgccgctcgcgcgagagggcgacgcggggttgtgccggcttcgtactcttccaattgaggataagatgaactgatgtgataagtagtatgagattgtacttattttaaaacaaaatttgaatataaaatcatacttattttaggaggatgtagtatttgggacttggcagtaattttactgttcttggtattagaaggtaccatttattttatataaaacttggtatttctcgaggtataaaaaacatacggttaggaccgtaacgaactgtgttagctgtaggtttgcatctgttcccaaggtgat

SEQ ID NO: 35731 - DNA, 668 bp, Oryza sativa
tgttggtctactgtgcttcaatatttcaatgttattaggagcttatttaagcataccatatcaatgtattcaagtatcatcgtctgacatttactctagcaaggattggctttctgctgaatcaagttttgttgcttaatgctcattgaatccaatgtgatgcatgtgtttatattttgcagcaattttatcttacgacagttctatttcccttagtcctcagtatccctttttttttgttatcttaccagctgtctgttgattagtagttagcaaacatagagcgacccactttaatgacttcccgtgacatgaatatgacctcgagagattagtctagtgaacttattcagactgaatgttgtattgttaactgtactggcgtttggtcagtatctttcgaaagagattgaatgtagggacgtaattttattgcaagataattcatttgttcttgtggttcagtatcttggaaggtcttgtgatgttagtgaattcttttcgtagcattgcagtacttgctccgtccttaatgcatgattcaataggctacgcaatctcgtttgtagcaatgaattttaaaaatttggaatcgctaactatcgtttgacagatttatgagccttccataatgggggatccactagggctagattaaaaaccccgcg

SEQ ID NO: 35732 - DNA, 521 bp, Oryza sativa
tagttacgtcctctggaatcgctaatcgagttaaatggagtcgcgcgctagcggcgcgtacgcgcgcgttagctttccgaatctggcctggtgtatggagtcccgaacaggcccataaattggcgttcggagcccaaaacctctcgcatttccagcccatcaagtcgcttcgtcctgggcttagcccaccacgtctctttctcagtttctcggcccgtccgccgttggttggctgcttccgctctcctccaatccaaggctccccgcgtccccgcccttctcctcccgcgccgccgttcgcgcgcgagaaaacgaggcggcggcgatatcggatggatgatgccactgccctctctctctctctctctcgccttcgcgcgcgcgtgctaactcacagcattggtaagtgcgaggtgatggtgccattgctgctcgtgcgggatgcggtctcgtggtcacgaggttccctatgatgcccgcgacgtgttcgacggtttgcgcgagcgagggaggcgcggcgg

SEQ ID NO: 35733 - DNA, 530 bp, Oryza sativa
atatatatatatggtttcatacatttccactaaataagttaggtacggcattgttatttctccgaaataggctctttcaaaatagagcaattttacggtccttaagaagtaccatgatgtaccacttttttctattgtaaatttggtacctcttgatatctatgtactattaggtaccaaattttacactgaatttttttttgtaccttatggtacctcctgaaggaccgtagaattgctcatggtcctcattgctcccatgttacctatttaaagaaagttaatttttgttagaaaaataagttattctaacccaaacatggaataaactttacagttcatatttttttccaaaaaaaatacatgtgaaaatattcaaacttgggtaaaataaaaccaaaccaaatataccattagaactgtagttaaataaacttaaattacaaattaagcaccatggttttaggcttgacattgtgtagttcttggtgaatgaaaatctacaaacctttcaagctccctgaaataca

SEQ ID NO: 35734 - DNA, 545 bp, Oryza sativa
tcacctgatgtccctcaactttacaccgagttttgtttgtcatcccttatcctcaataccacaaatcttcacccctaaatatacaaaaccgttcaatttatatcccatggcagtatagatgtcttggtttcgctggcgtgacatcttagtcaacaaaatagaaataaaataatacgtgagtctcacatgtaagtgaaatagaaagaaaatgtgagacccacccatcggcaacgctgtcgttgggatgccgcagcccgaggacgttgtggaacgactccggtgagggcacgaagacggtgaaggcggggtctcccggtgaaaccccaagcgcatcagcgtcatcctctcccggcctactccgtcctccgcgtcatcgtcccctacagcatccgccgtcggttccatctgccgtcgtcctctacaccccaccgacgccacctcgctctgcccgacacagcacagcgacgcccacaccacaggctctctgaggcgtcgtcgctcgcccgtcgcctgctaccccttgcctgctccgcacaccgctgctg

SEQ ID NO: 35735 - DNA, 563 bp, Oryza sativa
ttataacttcgggatatgcataccacggttctcaaactagaaattttctacatcagcattgcctggctcgctttaagctatttattcggtttataataatttaggagtgtaatatttaattcattactataaacaattgtcaataacctatccaaatcatgcatgaagaatggaacaagtaatacaatgctacgaaaacagttcaataacatcacaagaccaaacattgctacgaaaacagtttcactaacgccacaagaccaaacattagtatcgaccttctaagataacaatcacaagaccaaggcctatctttcaattcacctccatccatagtattccataccttccatctcgttacgaagatattgaacaaaacatagtatagttaaccatatacgaaattcgatctgaaaaacggaagttcatcagactagcctctcagggattcatgtcacaggaattcgtttacgtgggtcgctctaggattgcaaactcgggtaagataacgaaaaacagacactgaggacttagggagataaaactgccataagacaaaagtc

SEQ ID NO: 35736 - DNA, 568 bp, Oryza sativa
tttacttatggatttgaacaatttgctcgtaccattaggaagacaatcccttaaattagccataaataataccccattcgttttaaaatataaatatttttaggatttaaaatttatacctcaataaaaatatttctacggcacttatttcaatacaagaaaagtccacacatttttaattcaaattcaaattcaatcgtaataggtgctaaacaacccttttactcactttgtttcataatatattggatatgtttttcttctgtgcaaaaaattaagaaaatagtataagtaagtcatggtacaaaagttgacaagtgagaaataaataggaaaaaaaactaatataaaagttactaaatgtttaacaaagtttcttatatttcatataaacgaaaaggcacataatctcttatactataagagggatgaagtgttttggagaactagggagggaggtaggcctagtacataactcgaaccctactcctatctccaaaattatggccttgtttagtttcctcttttttaaaaaaaaatcattagacacatgcatggaacattaaat

SEQ ID NO: 35737 - DNA, 512 bp, Oryza sativa
ggaggatgtagctggtgaatggtttgatgaactagtcaataagtgcttcttacaaccgacagtttggaaagcttggtatattatgcatagttgggttagagactttgcaatcgccttatcttctaatgaatatcagggtgttgattgtacaatgggaaatctcccacgaagtgtacgtcacttgtccgtagatatggatgctatgaatataccatggaccgagtatagcattaaacagttgcgatcattaatattattcggtggcttccgtcataacaactctagcaaaggtttcaacaacatttacaacattttggagggcagttatgatgctgctgatagcatttctgagaggtcttataacactactgacaaggacactgctgataacatttctgagtggtcctctttcagttttgatgatggggaagttgatatcgttgctatcattttgaaaaggtattgtgacattattggtagcattctaaataggtcaacaagcttgcgcttgt

SEQ ID NO: 35738 - DNA, 602 bp, Oryza sativa
aaccctttaattggagtatatgaatttttagaggaaatgcattgattcttttatatttttatttgttaattacatgctacatttgttgacaagtttgatcaaattatgttctttacaattctcagtgagtgagacattttaattttaggattaggatgccgctattagcgacatagtacataaattttagaacaaacacaaacatcctttttaattctaacatatttaaccttacaaactagcttagtcacactctttattagaaatccttttaaatttaaatttatgaatattacacatatttaagtgggctttcaatagaaatctcaataggaatctagtgagataagggatgcaccgcttgtttgcttctctttagcttgtgttagggccaggcgcatttgtgggtatatgagtgtagtgttgtgcatatgcacatttgctgtgtaataaaaaaaatctttttaaccgctaaaaaaaagaaaaaaatctttttaaatttgattttgatttcatgccgtttcctttgatccaaagatgctatagctagcatttggggtatatattttccgcatattccagtgaactgtcaccgattacct

SEQ ID NO: 35739 - DNA, 867 bp, Oryza sativa
actcccggttatttcacccgggactacagatagcgatctttagtcccggattggtactcccggtttggaaaccgggactaaagggggttacgaaccgggactacaaagggtttctccaccagtgtatagtgtatgttaaatttgtgtcataaattggaggggtcataaatttctgccatttaacatagagaattttgtccttatataaatatgagacttgcaatagcaatgcgtgtggtttgcgaaatttctaatgggcgattgatcgccccgcgtgatcacccctcctcacgtgatttccttttttggcaccgcattacttttctattttagtaaatttatgcatctaaagtttatacacctcaagtttacacatctaaagtttatacacctaaagtttagagacccaaagtttataagtcaaaatgcccgattcaaatttgaatttaaatttaaatattttatatatatattatttctatatatctaaagtttacacacctaaagtttatagacccaaagtttttaagtaaaagtttatatatccgattcaaatttgaatttaaatatttttatatatagtatttatatgcatctaaagtttatacacgtaaagtttacagacccaaagtttataagtcaaaagttgatatacccgattcaaatttgaatttgaagttaaatattttttatatagtatttctatacatttaaaatttatacacctatagtttatacatccaaaatttataagtcaaaagtttacatacccgattcaaatttgaatttgaattcgaatattagtttatagaatcaaagtttataagttgaaagtttacatacccgttttaaattgaatttgaattc

SEQ ID NO: 35740 - DNA, 569 bp, Oryza sativa
gtgtcaagccacaaactatactgccttcctaacataggtgtagtaaaccaacagatatattttaaatattatactattttgtaacacattttgtaacacgaagtggctgtagtttagtggtgagaattccacgttgtggccgtggagacctgggctcgaatcccagcagccacactatttttttaattttttcttaacactttttattttttatttttacctttcagtcattaacactttttaatttttttcttcagtcattagccaactaataaagccttgatttgattcattagccaccctttgattcataaactttttgaaaaatatattttgccttgattggattcaatcattaacactttttaattttttttcagtcgttagccaactaataaagccttgatttgattcattagccaccctttgattcataaactttttgaaaaatatattttgccttgattggattcataaactatttgtcattaaccacgctaataaatccttgatttattttcagtcattagcattctttcttgatctttttcttcaggcatcagccacac

SEQ ID NO: 35741 - DNA, 1430 bp, Oryza sativa
cttatatgggggccatattctattagcccttcaaacatactagtagggaaaaactcaatgatttggctctgaaatgtcaaaaggaaccccagaagtgctaatttgatttacgccgtcaaaaacgaattcaggtataactttcaacaccataatcattctagctattatgaaaacacaagccatgtgcagaagttgtgaggcacataatctgaacatcaattttcattcagacaatgaacaggcagatgaaaacgagccaacaatgtttctttagagaagaaacaaattacttgtttatcactcgatcggttagatgaaaactcgctattccctacagaagaaactaaatgctttacagtgctgctctatcttttgtttcagtcacaagtcagaatattaatcagtctaggccacttaaaattcgatgtaaacgttgcaaatatagtaccgataaaataagcaaattatgtctatgtgaagtcgttttagcaaccatgacagatccctttcatgtcttatttgtttgcatgcatctctttcaagtttactattgaaatgttctctctttttaggtgcaatttgtacctccatagtccatactccaggacagattctaaatgttgtacatttgccttctcagtactcattcaagggacaggttttgttttctatttctcacttttccttttcttccagaggaatgtctgtttgccagagggcatgcagaaaaccaggagatgtggctgccatgctgccatgcaaagaagaagtttttgtcaaccacaacacatgggcaccaatcaatcatccattagaggtgtggttagtactactctactgctcatcagcatgtcagccatcctgtctctacgattaatcttgtataggtaattaggctacatacttatagcaccctgtgtcatgtggtcttcacccaaaatgccgtagctgatacgttgttgatggggattgggccactgtgttatgctcccatgacctgaaattaattatcagttcgctgaaaatctgaaaccggtgcttgtaatctagttagaccaagcaaaatgcatgccacttgttattataatgaagtggctttgataccatcaattaactacactttcaaagcgaggttactaaactatattgatcttcttcttaatccataggaaattaaaaaggctcaagtttgtgtcaaaagatcaaaacagtggacataaatctatcactcctccccatacacacaacacgttttggtctgcacgttgtcgaccgtggcccgatcaagtactgatcagcaagcaaagattttttgagagctaattaatcatggtgtcttaactagtactgatatccatctttgaaaacctagttaggctgtgatcgaatgcaattaggctttaattaattaagctgtcatatggtacgga

SEQ ID NO: 35742 - DNA, 687 bp, Oryza sativa
tcttgatgctaaaagaatttcattctaaggagataaagtggataaacataaaggcagcatatatgtgcaatgaccatgcttgcagcccatgaacaagtagtggttagggagtagctttcatgaagggagaatagttaagtgcttgactgttgccaagatttgaaagctaaaggacttattaacaaaccaattaaatttttaagggctagatgacctccccctaatttggcacctttagcttgtcccttcatgcatgttaaaacattattttctttcaccatctttcgtagccttatcaatcgatcttaggagttaggtttgcaagcatgaagtcttgagagctacacctatgtatagccttttcgtttgtacgtctcatgcatggttcatcttgttactgtctgaacacttgactactgatccaaataaccaattgcccgctgtctagatcaaagaaaagaacgaattctacgtcgtcaactactgtgcgatgttaattaatctgagatttcgacattgctaataaatgaatgtgggacatcatatcgtgtacttaaaatgaaaaaaaaaaggttttgagaaatatattgacatgcaattcttttgcgcattcgcgaaaaataatgactgaaagtacatgatgttattatggcaaagaatgctctatcctcacacgcttggaggtcc

SEQ ID NO: 35743 - DNA, 1628 bp, Oryza sativa
gcaagtggtgaaattggtgaatggtgatcgatcgcctcgcggcttggagtggagaaggcgctctcgatcagatatccagatcgatcggaactagcaatgggtgatcgtgctgtatgaattaggaaaggctcgtccaagaaaaatggtactgtaatgttactactattcgacgaatatgggcaaagctcccgttttcagggaatcgagaagacagacacatatgctatgctatacaacttgcacgtacgattgatcgattccggatcgtactgacgtatttgtaacctactcgatctctcactctccgtgccgttggaatttcgtgctgtcatttttcttttaagatcggtttaacccgtgccatcgatctacccacacacacacattgccgactgctacccatcgatcgatcagcgctgggaggtttagtgatcgtcgatcgtatatatgttatgtacagcttggtagctgcgctttagtcttactcctagctacgtgccgtgtttcgcttgcttgctactaggacagtacagtacgtactactagctaggatgaggagcaacacacgcacatcatcatgccgtacgttttgtcagctgtcgctgcccacaccaacccggcatccgcgcggaccagcatcgggcggccgcgccgtccgtctgcttccgagcctttccttccgcggccatcggcgcatgtgctatcctgtcacctcgcgagctttgttcgcatccgccccgccccgcccaaccgcagctgcaacctgcagcgcgcgcgcctctgctgcggccggagattttttttttctctgcgcggcgcgcgcgagcgccgtgtgcgggtttttcaccaccaccacgcgatcattcgacgcgccacggcgtttcgatcaaggcgtgcgcgcatgcgcgtcggtttccccgtgcgtgttgctgtttccatcggcgagtcgtacgtacgtacatggccacgcgccacgtacgtctcgccccacgtggaaaagggagagcaaaatgtgtgtgcagattatatatatacgcggatcagaagtgaggtcacggtgcgtgcgtgagcttgagtatatgtagtcacacggaaatcacgtatatatattcagctgtgtactcttgtgtgtgtgtgtgtatgtatggcagtatgggacgggagactgtttggcatgcactttggtttcaagaggctggcggtaggtagatccggccaagtttactcgtggtgctagttacagccacatgattggggtatgtactgttgtcatacagaacgttctagcgagcaagagtagcactactttgctagtgatcttccaaaaagaaaacaataagaaagaatagtaccctctagtagtatattagttgtactaacttgtaagtaataatatgctttatcaggccacgaatataagagataatatgttatttaagagagtttaaagttgagataaaaatactttatattcctaggagattttacttcactagaaaagataactattgcttgagaacaggagtagtatacaaaagcacatataggcacaactaatgtacacatgctcaacttgattatatttctagtcccatttttcatcaaggatgtgagctcatcgtactgat

SEQ ID NO: 35744 - DNA, 559 bp, Oryza sativa
tgaataaagcaaagtgtggacgtatcatgccacctttttgcccatgttatatacgcatgtgagattaacaatgggccaacttgacatatattttcccattaaatcttgtaattacaaaaaaaaaagatggtatacaaattaagtggcaagccacacggttgtagccatgattagtttacataagcataattttcatagatagcggtgctaaacatgatgggctatcaaaacattgtgtatttttatggtggttaattcttaatgctgatagataggatgaatcattggtttgcacagcaatctatatatgtgttgtgcatgatcttgatagggggcatgactagtttctttatccaattgtcaggacataaatagcgatgtgcttcaagggaaggcaaaggagaaaaaggtaatctttttttgtgtttgtggtttgtgatcccacttgtgtatacttttgctcctctttaggtagtggtagggctgtcaagcaagttaattaagtatttctgaaaagtggaagataccattcaagtttgttaatttgttcttgttggtt

SEQ ID NO: 35745 - DNA, 642 bp, Oryza sativa
gtgtgtataactagttggtaaaaaggtagttttatgttagagaatatattatttcctttggtcaaaaatattttactcctagagaaagattcatgcaaacctttaaaattcctaaccatcaataatttctcaaacacttagtttgaaaacgaaagaaatgatatatgtagttctgcgtcaaaaagaaattatatttctcataataatatgaacttatattgattattgggattttaaaatttgactgaaccttatcataaactttttttttactagagggagtaccccggtaactaccaagggcaataaaatttctctaagataaaaatctagcaaccggtgctacaatttgatttcttaactggacggatgcagttgatttttttaataaccgaattcaatcagttcccaacacttgtaggtagtggttgccaagataatcacaatgtatactctacattggactacatcttgcagtgtatacattttgatctctagtgtatagacacgttgggacctaaccttagttggtgatgaaacttgtatagaaaaatctatttttctatgaaatacaagcaatcaaatcaatcaagggttggtgccgactccttttctgaaagagaagtaacctgaatcaagttg

SEQ ID NO: 35746 - DNA, 1113 bp, Oryza sativa
ggcggcgccgttcggggaggggcgcgtaggtggcgccggtgggggagaggcgccggtgggggaggggcgcgggaagacgacgccgatgagggagaggcgtggagaggcggcggtggggagagaccgagagaggcggcctgcggtgagggaatgaaggggaaaaggaaattagggttagggtttgtttggttcggggttttgatggattaagagccgatctgagccgtacatcaaaacgaacggctcagatcggtcacgtcgggccgcacgcttaatggcagtgagaggagaagtagggggaggctagacttcttgctggcgcagacaaatgtgcgggttgaggtggaggagagaagaagggaggaaagtgggtcggctcagctatgggctaaagaataaaatgtactgaaaatggcctagagagaaaggaagattgaaatgatgttcaaaattagcttatgcaaattccaataaaatttcaaagattgtatttaattatggagaatttaataaaattaattccacccagtagatctacccatatcttcagagtccatattgacttgcaccgtgtaaaggtggaaatcaagccggctttgtctttttttttatctccctttcttcgaaattatttgtgaaaaataatttaatatgagctactatatttctctctgtcatttgagactttttctagcaagctaaaagtaccaaagcagtgtgaaaataactttggttaaaaagaaatatttttagttttagtacaccgtagtaaatcacggctattttgctagtatgtactccctccatttcgaaatgtttgatgccgttgactttttagcacatgtttgaccgttcgtcttattaaaaaaattaagtaattattaattcttttcctgtcatttgattcattgttaaatatattttcatgtaggcatataattttacatatttcacaaaagtttttgaataagacgaacagtcaaacatgtgctaaaaaatcaacggtgtcaaatattttgaaacggagggagtattaaaaatataaaaagaaagccttaaacagcccaataggtaaacaaacttctcatttgggcctttcttcacccttctggt

SEQ ID NO: 35747 - DNA, 620 bp, Oryza sativa
tgcttttgctgtttaattgatttagatcctcgatttacactgtgaacttgaattgcagcgctagaagcactatggatagttaaaatccatgactcaaatagttaaaatcttctgactcaaatatctgtttccccaaaatccatgactgtgttgatctatactgtctaatggtagtacaaaataactattcagtttaatttttctatatctgattacttcctaaacggctcggaaaagggctcggaagttctactagagaatatatgcgtgcatgatattggtgttttgtgcttcaacttgataagctaaaatcagccgcagtaccctggtcaagtttttcattgtttgcatattgtcgtccaggaagatgaggtggagaagcgtccagttacaggaattctaaccatcgaaagtgggctgacttcgatctcgaagattgttatggagatgaaatacctgtatgagaaacataagcagtgggattggaaggttaaacaggtggagcagaagaaatatttggtggaatttccatccaaagatgctaggagggagttaacaagactcaagggctttgactttgaattatccaatgctagagctaatgttagggagactgagag

SEQ ID NO: 35748 - DNA, 606 bp, Oryza sativa
  unsure (1)..(606): unsure at all n locations
ctccactatcgcaaacacttgctccttatctttttaatttcctcctaccattccacctctttccccctctcccttatcctcttcttcacttgctctcatcttctcctctcaaatattgcagcagctaggagcgagcgtggcgggggggggggggggggaggggcnnangcngtggcccggatgagggcagcggcggctcaacgcggtggtgggctgctggcgcggcgcggggcgaaggcgctggcccgcagcggctgtctgcggcggcagtagcctggcgcggcgcgggggcggaggaggcggcctacgtgggggcagcggcggcccggcgcggggcggagccgacggcccgctcgggggcagcggcagccgtgtgtggcggcagcctgatgcggcgcgggggcggaggcggcgacccgcgtggggataatttttaaatgtgatatggtttttttggatgatttaggagttcaatttttggatgaatttgtgatgttggatctgggatttgtgatatgtgaatgttggatttgtgaatattagaaaaaaaactcgatctgtgatttttggtatgtgaatgttggcaaaaaacgacgaaaaaaatat

SEQ ID NO: 35749 - DNA, 694 bp, Oryza sativa
gttgcgtgggcttttcttctggttggaggtaacttcatactgttttgtgcaatgctagtttttttttttttttttgatcaagggcttgtcaatttgtgcaatgctagtaattatgatgttggagaacttcatagtgtctagctgctagtattcacatttccatccctgttaagctctcaatatatttgtgtttacttgcacaaactactcccaatcagagcagattatttgtttttggtagagttaaagaaccatattttttagtgtaggtttacagtttgtctagccctgtgatgtatgttacacttggactgctacgtgctaaatatggggctgggactaatttctgggaatgatgccaaatgtcactagtttgcttccttttgcagcattagtgttcgtattatcttcgtactagcatgcagtggcataccatttggctacatgcttgcgcaatagtacgattttttttttgaacatttactctagttctttgtagttttcttgactgtgtattgttttgtagaatattgggcaagatgatcaattcaggccgtggagagacgatcacaaacgctacaaaattatgtctctctgagaacacataacaaagttcttacttgcatgtgattatctgcagcatctcgcccatcattgttgtaaatacgtacccagtaaaaaaccgtagaatgga

SEQ ID NO: 35750 - DNA, 722 bp, Oryza sativa
ctgattaattattcaactgttttactattctcttaaatatttattaaatgctgtttatgcaaatgagctattttatgccatcctttgttatcctgtgcacttgcatatttgctgtgtggcttgttgagtatgtcatatgctcattcttgcaatattcattcatcagaggaggagtacttcagtgaaggtgatgatctggaggattaggcttgttccgggttgagatgcctgtggagtggagttgccatagctgttccgtagtttgctttagtttattttattttccgctgcgtagaatgtattctttgagaggaactatccacctctgtaataatttattatttgcgaatattaaatagttatttatttgtactctattatcaatttgttattgtgtgccttggctgattcctggacgagggtttaacacacatgtaagcgtttggaattttggatagaaattccgggcgtgacaactttgcgcgagggaaagtcgatcgggccgagaagggaggggtcggcccgagagggaggagggaaggagagaggggcgagcgggccaaggagggggaaaatatcttgggccgaaaatggcccaaggaggaaggggagatttaactttggttttcaatttatttaattgattaaatgaactttgtgacttctaaaattatttcttgagttccgaaaattcgcggaaaaatctggagagtattttaggt

SEQ ID NO: 35751 - DNA, 1265 bp, Oryza sativa
ctaaccgtctttatctgtgtttaacaagaagcgcatgcgtgtatatatgcagcgctgctgcaggagcaggcagatcctcaataaggagagagaacaattatgaagagaaagcacaacaggagaggggattatataactgcttgcactgtttgattttattttctgccgttactaattcataatacggattgcttggttcaagtggccacacggtatatttgcgtacacaaatttgaccgataacatgatcttgcttcttgcagccaaaataacagtgatggaaatagaaaagctgctctttgaacatcatgtgccggtaattacaaatatatcattatttttcgtacgtatatattaaatagatctgcagaggtaaccaatcagcaagacaatggcatctgcatcagattcaactgaaagctaattactttgctacttgcaaattactttccagtaaacaatggtacatgcaaatgtttatctttgagttacatattattgtttttagccaagctaattactttgctatgtttcttagagcaaaagtttaatgactataattgttatagctatctttatcatgcatatcatgcagattcatttaaggttagttcttttttttcccacaccttttacgatgtactgctccttttgtatcattccaaaagattggctacgcttcaaccattttgcttggttatttcattactaattttatttgccagacaagatgcaatttaatcgttggaccgacatatatatatggttcacgttcaattttcaagatattattaaatttaactaatctatgttatggggcaatttttaactatgaggatcttatatccattgtgtcatccacaggtaattacgattttacttttcatcaatctttgcccgcagattactcagagacaaagccaataacctactcttcacaacgctggagtacggcatgatggaggccacatcgacctccttcgtcttgcacatgaagatcagcagcgtgccggcgtgtgcatacactgcttaactgacgacgtcaattggatacacacaacctcagactctgtaggttcagactattttctccatccagattttgagttgatctttttttttcatcttggttgttttatttacatgtttctcatctgaaatgagatcagaactcaaccacaccatcataacgtctgatactataaaatttaggtattgatccacaaaatagaacaactttgttgcacatatgatgcaaatataaa

SEQ ID NO: 35752 - DNA, 703 bp, Oryza sativa
ccaattccacgcggtaggagtccgatctcttcaatccaaggctataaataggaccccctagtcgtcctctttcgtttgcccccttccccgagttctctcgtgctccgtagcctcgccgccgccgccggccaaccgccagccgcgccgcgccgccgcatccgccgtcgccgtcgccctccgtcgccgccattaggtgcgcacgggagtgaggaagcccggccgccacttccccgtcgtcgccgtgcgccgtagcccgccgccgccgtaagtccgagccgccgccgccgcgcctcttgtcgccggccgtcgtcggtcgccgtttgtcgcttcggtaagcaccattgggttcgcgtcgtcgtcctgtacgtgtaggtgtcctccaaaaccccggccgaccaccctagcgccggcgaggtcgttgcccgtgccgtggctgccgtcgatgacgtcatcatgacgtcataatcccctctttttcagttttttttaatagattaaatatattaaaacttcggaaaatcataactaattaaccatagctccgattcaagtggttcaagttgctaaatttttctaaaatcgagatctacatgttaaaaatatccacatgtactggttatgcttgtttttgtactgttttgttgaattttgtttggttgctttagtttctgatgttccggaggagagcgtttcagttgaggaa

SEQ ID NO: 35753 - DNA, 589 bp, Oryza sativa
cagcattaagtatgaaaagaagaacaatatctagacaatcaagccgctagaagtttcatagagtggtagatatcttatataatctgaatcaacgtcaaaatctaacctaatcggttgctctattcgatagatgttagccgattgtaagttagatagtgtcacaccctgattttcgtttcaggatttataaattatttaataaattattatcagaatttatattaaatgttcattaatttacaagtgaagttaaatgtgggaaataaaatttcctaaatataaagcatggatggatttaatttttattaaattctccatggttaattatactctctggaactttctcggatttttcggagctcaattcctaattttaatcatacaaagagaagttcagcaattatttaaatattaaattaatcattaaatggtctgattgtaatttttttaagtactttgagtgtccaagtattttcaggttttttttcttgaaattatttgagcattagaagtatttttaacaattcaaagatcatttcagtgattaatttaattggaaaagtaattaaagttcaccttttccttttcg

SEQ ID NO: 35754 - DNA, 720 bp, Oryza sativa
cttagcgtggtgtggatggttaggggagggttatgcgaagggtctcgtcacaatcactcgacatggtgacgtgtgcatcatgggcacatgatgacgcggtgacatgtcggtgggttgtgtcttgtgggtacagttgtgcacctctggccagagtaaaactattcgaatagccatgcctgcggttatgggcgatcaaccagattcaccgtgattagtctcacacttaataaatcgacccaatgcactgtagttcaggtgggttggttgggcctgttcaacgtggtgtagcgttgatcagtggagatttaatattaccttaattactcaactgttttactgttttgcttaataagatgttttacaactgcctttatgcaaatagccacaaaccgtccttgtatccccttgcacgtctgcatcatcggtgtggcttgctgagtacggtggttgtactcagccttgctattattccccttttcagaagtgtagtgcttctgagctgaagacgaagttagaggaccaaggctcagaccccagttgagttttgcctgtggagtggagctgaagccccgctaggatcgcctttttccgctgctgtcgttctctttcggtgtgaggactaagtgcctcttatataagtattttacgctttatttacgtttggaactgtatattacttgtcgttttgtgtaccctggctggtcctggacagggatttaa

SEQ ID NO: 35755 - DNA, 726 bp, Oryza sativa
actttttatttatcacggcgaacttggcaactgacgcggggctgcatgggtcttcgatctccggcgaaggggtaagtccaatgttctgctggcccaggcaattgtactggctacaatagtgtcgttcaaggctgcatcagtacattcgacctctaggattgctctggtttggttgatatatttgcttgcctatttatcatatgtctttgttaatctagtcttagaatctcaatttagctctatcggttgtctctcgctttagggtttctgctgatatcgactaaattgttttactggattagattagctaaggcatctaccaccctaaaaatcagtcaagggcttgatctactaagttgtctagatattatgtttcttttcatacttagtgttgcatcaattaggtttgatctactaagtcgagcttagaaccataatctctagcctgctaattgattgccaataagggtttcatcggggtttcagccgatgagttatctagacgttgcatcagcttataaggattacatacaagttggatttagccgatcgcaacaaagatttcactgtttaatctaatcttgtggattttatgacattgggactccagctgatgtattctttaacattcggatcagtgcttattctatcatatcattggtagctaattgacttctactagattatattattactatattatcatcagctgatcgcctttatacg

SEQ ID NO: 35756 - DNA, 690 bp, Oryza sativa
ttgatgatgtcatcatgtcatcatcggttttttcctttttcccgtttttctaatagattaaatcttctgaaaatcataactaaataaccgtagatccgtttcaggtggttcaagttgctaaatttttctaaaatcaagatctacatgttaaaaatatccacatgtactgtttatgcttgtttttgtactgttttgttgaattttgttttttcgctttagtttccgacgttctggaggagagcgttttcgttgaggaaggttcggaagtgtttgcggaagctcaaggcaagtcacacagatcccaaacaaccctttgagcatgttgaacccatttaaagctaatgttttatttcaacttatgcattattttcgaatgtcatcgggtggtgaacctttcccaattaaataatggccgaagatgactttattttcctatgggttataatttgattagcatgaaccttatatattggattggttcagctaaatgttatatgtattttgcttagccatgcttagaaacataagctaactaaaggggttaaatataaattatattattattattattaattatgggtatatttaatggtcgcacacgatgggaaattgtgtggtgttaattaattgatattaaaacctggttaaggtgggttgtgagcatatgggtttgatggttgtgctcctggc

SEQ ID NO: 35757 - DNA, 928 bp, Oryza sativa
cccaagacatcataacctactctcattcttcagtaaaattagcaaccagaaattaaatgtgaatcccacaaaggaatttaaccttctcacatcacaagaacgtgcatataatttcacattcaaaagttgcaaaatattatatccctatgaattaaattcattcttccaatataacaagcaagatgtacacctcagaacaagtaacaatgagtgtaactcatcaatagaggcagtttattaatagcaccgtattgggttcaggaatgatctcctcaggatcctaaggccattcccaaccaaaatgtactgctacattacctgaaacaaatggagagttggcgatgactgcgaatccaaatcagaaaatcttgatgcctaaggtggacgggactggaggacgacaccggcaactacttggtttcgtggcggggccgcgtaggggtgggtgaaaagggagcggcggcgcggtggagccaaagggaggggcaccgcggccgcgcgagggtggaggggcggcactgcggcgtgagaggggagggacgccgcggccacgcgaaggtggcggggcagcgcgccggcgcactgggacggaggagatggaggcgcaacaacgagacgagtgaaggggcaccttaatcggtctagcgatagagattggaacgcgaaaatacggtaatacccttccaccaaaaaaagagaaggacaaaaatacccccaaaaattaacggtcagatgtgattctactacactactacacgcagaggcgtgagctgtgtgtttcttcggtcccatgtactatcaaactactcctgttaacaaatttctgcaatcatatataagttaatctcctcaactcaatgtaaatttaacgaatcttacaccaagatttcaagaacaacaaagatcatgagaataaactaccgattat

SEQ ID NO: 35758 - DNA, 1577 bp, Oryza sativa
agcttaaagtatactcacaaactggattctcgtggttatacagtttaaataagttataaggatgtttcagatttgctatgatgtttttgcctttccatttctattaaatgtactgagaaagccaattttgtaggtgcttgttttgtattatggaagttataacagaatgatatgaatagcttatgacatacgaatatatacttatgtttcctaaagtttattactgagttagtgttttgtcttttagctgccacaatggaatgaaatgttgctgaaagagaatctcggatatattcaatggaaattaaagtctagagaaaaaaagtagttcatgccctagttggattctcccatatcagtatgtggaaattgaaatgttaacatgcataaaataaaattggctttatttaagaattccaagtttgattttttatgggtatattgggtgctgtgctctgattggatttgctaactgttgtgctgactcactttctatataatttacattattcaataatttccttaaggatttatcttttctagcctgcctgtaactattgaaatggaagggagtcttaatgttatactatatttactgccccaaatatctaatctgttctccacccacaagaccacaactaaacagtaatgcccattgctcatcatgtcggagaatgaggttttcttctatttgaacacccattaactttcactcacccatcatgtcagttgcactacttgaacacccattaaatttcatatcttgatctcaagctacattttatttcattcatgatgatagcaagaatacccaagtatctggtgacttgtttggcattgatttgggtttctacaacacttacagcttcagctttgattatttgcatttaaatgtcttgtgtaatgatccatttctgcatttctgcatgcacgacaccatgacatcgaccgctgccgccaaccaaattaacccttaattacttaatgtcgatcgaccatgcatcagctgacagtgttggtactagttcaatatgatgaaagctaattgattccgtgtccatgtagtggactcatgcggcagggcagattaattagcatgcagctgtatgtatagtgtatagtggtagtagtatacatactgcattcttatgctcactagaccgctgcatgcatatgcatatgcgccggtggatcgatgcgcacatgcatattgttcaattcttcagttgaaaaataaatctgagtattttacttccataaaagtacattttggtagtattaaattacgtggtttgacttattgttgaattttgaaaatatgaattgtagaattttggcatggctggcaatcacattagtttggaggagattgcagagcatgagagtgtgataaccaaggagtttagaagcgaggcagaaggatataagttctataatgattatgcttggtcgaaaggttttagcatcagaaaggacaatgttacgtacaatggagatggtaaggtggtatggaggcattcatgttgctcatatgaaggctataggttgttgaaatactttgaaagaacagaccaaat

SEQ ID NO: 35759 - DNA, 1254 bp, Oryza sativa
aacagagaagataattctaaaaaaattatatttactcattataaatgacctagtatttgaataatttatttaccctatacacttccatgcagttaaacaaagtatggttttagccgattgagaatcataattagtctattatttgactggtttgactgatttatttcaggtaccaaatttagttattaaattgtaccaaaattacagtgagttgcatgagttaagtagagcctacatgaattttcccatgattttatcttgcacaaattattttaggtatttagtaagatttatctttatatatgtttcctcctcataaatgcatctagctatttataaaaattatatttggactctcttgacctaaggtgatattatttaacctcattttcatgtctttataattatttctcaagagtggttataggtttgattagtgaaattttatcttttatttatgctcatgagacctaatatgcaatgccaacaaaaaatccaaatgcacgagaaagactcaagtcaaaacatgtcttatgcaagtatgcatgcttacacttgtgtttgtatttttttcctaggttataaatgaaaaggttttaatttgccctcgaattttattcatgcaagagttagatcaacttcacctaggtttaaaaaggaaatttttggttcacaaaatttgaagaactttcctttcaactagtttggatggaaattccttaatcctagaatttgggtatgttacagggtaggtcttggacgagggaggcgatggtggccagggtcggggatggctggctagagctgggcgtcacgaagagggcaaaaaatgctgccgcgaccagccgagccgcgccttgccgaggtccaccgtcgcgtatagccgcgtcccaccctgcccaaccccggtcgtcttctccaccccttcccagcactgcacacataaacacaaacaccatgagaatgcagccaagaagcagaaaaacatcggcaaggtttgatcgatctagctccatggacgccatcactgaccttgtggatgccctcgggggcgttggcaacttcagcggcgcggatgcgggagcggtaggtaggaatgggcaggaggcgccgggagtggcgacgagaggaagaagaaggcgggggcgagcggcactggcgagcggcgacgagaggaagaagaaggaggcgtgcggcggcgcggcgctgtggacgtacaattagatgggccaaccctatctggaatccatgcgc

SEQ ID NO: 35760 - DNA, 731 bp, Oryza sativa
aaacaattctatttgtggtgctgggtccacatgcaagaatacagaaggtagctatcgttgtgactgcaatttcggccaaagacgtgacaatagttctgataacatgggtaattgtgaacccatattttccagagctgccatagcagtcataggtgaggttcaatacatgaatgcaatgttgattgaaatttgcagcatgccatacattccacatataatatataatgctctaattacatgcagttctgcattccatgtatacaccatatttgcattgcactacattcaacttgaagctcaacattgaagtgtgaaaacataattatttccagatagaccatggctgtgcctaaatgttatcttttcgcatgagcatagaccatgtggttgtgcctaaattatcttttcacgtgagcaatatatatggactacgcaattgcatgaatatgtataagttacctttgcagtattgcatgttctatatattaactattttgtttcctatttgtccacagcaacagtttttatcatcgcacttctagtcgtgttactaatgttcattctattggagcgtaagaaaagaaagctgagagcttatttcaaccgaaatggtggacaattgctgaaaagtatcaagatagatatttacacaaaggagaaacttgaccaaattactaaaaattacagtactattattggaaagggtgggtttggtaaggtgtacatgggaa

SEQ ID NO: 35761 - DNA, 1133 bp, Oryza sativa
gcatttctaggacttagacgcttgtcaatggcatttcttggattatctcaaataaataagtgaataacatgttgatccaaatataacaaagtgtgacaagtctaagttgtgggagtgaaacaaatatctacctaactgatgcatgagttctaaagaaaaactgagacatgattaaaatatttttcacgaacgggcaaaaggattgcacgtcaatgtattagaagaaagtagagtttcagttgtacaatgcaaacggcgagaaagaccattgtcggaggacaaacatgattaaaatatggcttgaggagaggagtaatgaacaaaacaaccccttcctatacacattggtggcttacaggcttaccattaaggtgcagtaacctctcttcccctgctaaggtaaaccgtggtgtaaagtgacggtaaatatttgttttagatttcaatcgctttaatttgtttgggggctagaatagctggatgcaattatcacctttcaaaagtgaaactgataacaagacaatgatatgtcggaggaagatgtaataaggttgacgagaaatagtacaacaagagtgtactacagatatgaacaaaaataatatcagctcgatctgttgggaagtttgctttctattcgaccatttgtacacacatgcattgatgcatatgtgcacatatctctagtcttttccaaatcatggacgagccatcataatatctcttcgacaatttgacgatgatatggcgcaaatcatgcaagatattgctgatcagattgcatggttggctatgtagacccagaggaatgatggaattgtacgtgcagataggtgttttgagacaatgacatgaacagcagctactcgtaacccgttgcatctaattctgcacttaattcctttgccaccttttaggttctcgcagcttttatgtgcgctttctctaaaggcatgagtcccttttcttgaaggaaagaatatactcaacccagtcgtcagtgcacgaatcgtcacgtactacctccgttccattgtaagtgcagttgtgggttttcatatctagtgtttgactgtccatcttatttaaaaattttatgaaaaaataaaaaaaatagtcacacataaagtatt

SEQ ID NO: 35762 - DNA, 3762 bp, Oryza sativa
tggcacacaaaataagatggactattagcatatgattaattgatcattaattattatatacttaaaaatggatataattgatttttttaagaaagttctatataaaatgtatttaacaaaaatatactgtttagcagtttgggaaatgtgaaaaaaaagaggaagttgctcagtccaattcctgaatcaaactcagcctaagccactcctttttcaaagctaaatttttagacctcacaaagattaatctatctattagcaatactacaaacatatcttaaaagttgccaccatgttcactttagaggttagaaactcaaagtaaaagaggtagctaaaaacattctttccaccatgtttgtcttctatactcaatttctccagatcaagttttctttaatttgctggcaaatcagtttgacaattggccatcgtcctcttatatatggttgtgcatagaaaatatgtaccactaccatgatccattgtgatgagaaaggcagtatggcaacaactatttatacctagccgatatcaacttttaatgttagagctggggaaacttaactatagctagtagtatataattgctataaaatttctattataattttgtaattataaagatattaaatgaaccatttcgtcccctctcgactctcgaggtggccacgaagtggatccaccagatcatagaagttctctcagtcatgtttgtgagtctttcttttttcttttccacgcacagttaaaataccggcaagcccaattacttcatccatttttaataattgacattatcagtttaaacatgccgatcctccctctgtcccactcaataagacacgcatgaattttaagattcaactatttaaacattttatcactaattattttattataggttaaattttatttaataaaaaaattatatcattggattgatatttaactttatttttatataattatagttttgtgctataaaagttatagtgctatatgagaaatttaaaatcgaatattagtttggagaccatgtcatgtttgatcgtaacttattcagtgggacagagggaatacttctcactctaaatttaagtagagtaaccaaaatactctcaataggtaaataaaggggaaaaagcgcagtaaacttgcatgttagggtgaattcagagaaaaaaaagacttgaaaagttgaaagacgtgaattgccaagtacctaaaaccaaagataataatcgagaacatcaattattcgaaaatgacgggcaatctcctcgagcaaataagcattaggctcaaaccaaccataatggctaatgatcatccgacatggatcgcgtctaactttccctgcatcgtcttccgagactgaccatgaccatgcccaccatcatgacttgatgagagcaggctgcgacgtcgtttgatgagaggagcgccaggcaagaagggcagaactggcaaaggtagaaaaccgacgaggctgtggctgcaggggcagcgccgtcatttcgtgtggttatctctccgctctaatctgataaacggaaaatccaacagatacattcagaagcatcatattccaacaaatatcatcgatgaaattaatttttaaaatatactactccgtttcataatataacaatataatactagataagatacttcatagtaaaacgaatccggatacgaagatataacaatctagtaccggatgggataattgatagtacaatgaatttagacatgtttcatgttcggattcgttgtattatgaaatgtctcatctggtactaaactgctactccctctatccccacaaatataaggttttttatctggatgtgacatatcgtagtaggatgtgtcacatctaacaaaaaaaacccttgtatttgtagacagaatgaatatattagggatggaagaaatatcatacaaccgagcgaacttatataaaaataccattgttgttagggttcaatctatttatggataagttagtttgtagcatgatatttcttgagagtttggtttgaaggaattttttttgaacaggaaggccccattgtttcctccatgcaacatcacctgtttggccgttgccaaaatttaaattttaagactcaattttgatgttgatttgagaagtttttttatcgaaatttgttttttagctttagtatttaagttgctaagaacacatacatagaacgtttatctgattattcttttgctaataagtcaaatgacgtattatctgtatttggccaaactaagcaagtgatcaactgatgatgaggttcccacgttggcacggacatggtgggtggaaagccaatgcccactggggaagaagaagggtgctgttgaagcaacaagcaaggaaggaagcagtgtgtgagggtgaggagtacacgtggcgcacaatggaggctccgccacgtgggtgccgcatgcggtggcgcgcgacacggacgagacggcgacgcacggggaacgggacggacgggggtgtggagaaacggaacgtgacgcccgtgggcccgtcggctggacctcttctgggttccacacgtgcccgtcttcacgaaagtgctagccgtgtaccgttatcttctctatatgtttttcttttcctttttcgggagttctacgtacagtgacttttaaagaaagcccatccatttcaggaggtagtacttactatgtccaaaaatattcatcattctattttgtttaatatcgattaagatttaagaaaactaaactatattatctattattaaataatgtatagctggaagtaggaaggtattccctccgtttcacaacgtatactttctagcaatgtaagacatatgtatatatgtttagattcattaacatctaatgaatgtgagcaatgttataaagtcttacattattaattatatgaagtaatgagagatgattaatttgataatttccgctactctaaattcaaattttacatctagaaagataagtattatagaatgaaggtagtaactctttcgaaagattaggtgtgtaatatttctttcatttcttaacttatactctcttattttttgcatgcacgtttctcgaaatgctaaataatactttatttttaaaaaatataaaaatgatttaagaattatattaacctattttcaattttgttaatacttaatgaatcatgcgctaatttgtcccgcgttttgcatgacgaggaagagacgttcaaaaagaacatagcctaaggagcctcatttgccccaaaatttgatttctagaacttaattactgagttgaatttatcgtatttttgaatcgttaaaaacacatataaaaagaacttaattatagagttgattttatggtatttttaactcttttaagtcgttaaaaacttatataaaatttttactataattttttattgttaattaatcatttaaaatataaccagttgttggccaatagagagatgacgggctggctggcatgatatttttgcatacggactcttaacatgtatgcctgcagaaatagcctattttcttaagggcatatacgaaagtagagtctaatatgagctttctatattaattaatgtcactaaagattatcctcttacaatagtagagacaataagatttctaaaccattaatacactaaatgatttttggttatacttctttccttttctccaccctcatataacaaattttccgttaataaatgct

SEQ ID NO: 35763 - DNA, 913 bp, Oryza sativa
tcccaccccacgtctcgcatcgtgcacccaccattatcagagtaaataatttacttcgataaaaacaacttctctactggcggtatatattctatttttctcgtacccaaccaactactctcgcccccactctgttttttcctttttttttcggatctgaatcgatccaccatcccagcccacagatcagcgacacaccatggaggaggacgacgacaccgtggcggttgatggtggtggccggcgagcggtggccggcggcggttgaggcgaaggcactatttcgagcctcgctgccggacgctaggcaacaccttaaccagcaaggaggtgttcacctgggctaatagcaacaaccaacgactgctccacgtcgacgacattgatagaacaagcaagtaaggaaataacactctgatttgcatctgcatactttccttcaacttcacacatgaagccctaattttttttgcaaatcaaattaacatgcaatctccaatattacctgatctcaattgatgggctgcacaggttctacatttgcacatcgtgctccatgtggctggccgcagaggatagggtggagtccactggtgatggagattgtttgctatttttcttttgctcatcatctgtattacatgaacgagaatgtttttgcattttttttgtgcttgctagatgatggatagctgctattgcgcaacgtcgagctcatctctataccacaccgctacatccttccatgattccataatggattttcggctgaatcatttattttcttttctagtttgattcacctgtgagtaattttatagtttgtgtgtgattgagcctgtaactttttcattcatacgactattttgtgatacagatcaataatactcttagtactagtttttacatatta

SEQ ID NO: 35764 - DNA, 502 bp, Oryza sativa
caaaaacccaaaatcaccaaaatttcagtaattttggattttttttggctgaatttttttaacttttaacatattttgacagaatttaaacaaattttaaccaaatttacaaatgtttggcaaacaccgaaaatttcaggaagattttgaccttgctgttgggggccgaaatttcgaaaattccaaaccatggcgctctatcgccgttaagccgcggctcgacgtgtagtaaaccggcgactgctgggacatcagtgagaagagcttggagaattgaacgagctggtgctgacgcgcgtccgctacgggaacatcgtcaagctccaagtacggcttctgcgccatgagcgggtacatgtacctggtgtacgagctcggcagctcgccgagagaggcattgttagcgaaagtagccattgtactgtagcgaaacctgcaaactgaacgagctaggacgcgagagagaagaacgaacacgacgaagtactccacaacgctgatc

SEQ ID NO: 35765 - DNA, 703 bp, Oryza sativa
tgcagccctaactaatctcttctttgatttgtagacaacagaatcctcccctcctcgtcaaagcaacagtggcagggacatcacctacaccccaggcttaattcctaatggaggtgggccatctcctcctgtcatcggctatgatgcccccaagacttcagctcttcttcaagagctcatcagagaaccagccgatgccggcaagaaaaggaaaaccagatcatcagctgtagatacttcagccctggctccaaagaagaagatcaaaaagaaagcttaaccagctgatgatctgcctgccctagatccatccattgaacaagctctggataaagaagaaatcggagaagatgttgatcaagccgcagccgaagtaagcgatactgaaagaacaccatccgcttcacctaagcagacccctccaactccttttggtccaactccttttaccagagtaagccaccttctctaaccacttttgtaatcatcttactttatagccgattgctcacatacctggtaattgcacaaaaggaaggctgctgtgaagaagaaatcggctccaatggcatctaaaccagctccaccggtacaatagccttaattctttcattagttaatctcagccgattttatataacacttgtctattttcagcctccttcctctccttctcctcccattcaacaatcatcaagcgatc

SEQ ID NO: 35766 - DNA, 699 bp, Oryza sativa
atttgctaaggggtgctagctaaaatttatgtggtcatgtggtgaaaatttatcctataaattaccatgaatttcgggttgttggaccgccgttgtcgcgggatgaccttcggcaactgcctctgtggctggtgttggggagggcgggtttgcgccgagcgttgacatggtttaactttcgcgaaaaagattataaatttcctaccattagactaaatagcattagagccaatgtaatacggggtatactatgaaagatatggcctcagttttgctcagaaatatgcatcaattatattcatttgcatgaagggataaaaagaggaaatcataacatcaaaagagcaagtgcagaaaatctgttcttatgcataaaaaaagaacaagtgtagatactctattcttatccataaagaacaagagtagaggtatataaccactgagtcaatcatgcaaatttaaaaaacagcccacaataagggtacagataaactgttcttattgagcaattcattacttattgagccacaacaggggcaaaaagaagaatagataaaaaaatgaacaagtgtagataatctgttcttattgagcaattcatcactggccatttaacaaggaacacattgggtagcagaagcaggggcaaagatactccacaggggcagcaacaacataaaacaaggaacaggtgtatta

SEQ ID NO: 35767 - DNA, 647 bp, Oryza sativa
aaaatggaacaatgaactgaaatcagaaattgaatcaaggaaaaaattgcctaaaatctatatgggagaccaccgcctattttggtgcaggctagcaagctgtatatcttacttaggtaccttatttgtcaccttttggttcatatatattttgtttattcgagttacaagttcatagctagtgctttattccattatccactgaattttttggttgagaccggaatttccaaaccatacaggaaagttccaatttgaaccgaaagttctcatttttctaatatgctatgaagtgtgataatttttttaggaacgcctattcaccaccccccctctctaggcgacattaaggtcctttcaccaatacttttcccttccattgaaatcttccaaaggattggcatgttaagtggttctacttctcaaaccccaattcttttcttgaataggacttcccctagttagtacatcgctcattaagcgtccttcagacaaagaaatgtccaaagtcagcacactcatcgctagatttactgccatgagagggcaaggattgattggggtagatgtcacttggcacttcataaaatcaaggttgcaacctacaaaagatggatctcgtgaaataaagaatctttggataattg

SEQ ID NO: 35768 - DNA, 648 bp, Oryza sativa
cgaaaactacaacactccccttcttgcaaaccaatttataactcatttaaacaactagagggactagatagagaattacttatacgcatgcggtcctctagaccacatttcatcatgaaaaggaagtatagtcaaatttgaacaaatatatacttgatgcacattatattgtcatttactatcataattgtcaataatatgaaaaatcacatcagaagggcatggcaattcaaatctagcaaataatttcttctctaaatagttgagtggataaagatcatcaaattgaatatgaccccaagtatttaaagaagatagcaatttaagctcttcattttcgctagcaatgtgaatacatgttaaactcaacacatagtggttctactataaaattaacatgttcattcactagttgtggcatggatataagtgaagcatcgcacaaatcttctttatcactagaaacatcaggcaaaattgttttgtgacaaaagtatttcaacaattgcttccactatgggttgctctaacgtagcataagtagtggacatagttggcacatcataactatgcataccttgagtagtgcagcaccattatcattacctttttcttaagacatgactagatagctactgggaggtggtt

SEQ ID NO: 35769 - DNA, 601 bp, Oryza sativa
agcaaatagcaatcgacatgtacgatatatgacacattttcagttccttcttgcagagagctgatcagagtcccttctccagtgttttgaaaccaaattgcaaaccaatacggttttcagaggtacgtacaactactgtttgaaaactaaggctcagttccactatcatagtacatagtataacactacttttccagactccaatttagcatttagagtctgttttttttttctttttttccagaattgcttgctggaataactcatatactagtacgtaaaaagtacctttggcaacaaaagttaacccatactagagtgcaagtgcactgaaatcaagtcctgataagcaatttggttcaaaggcacggactatccagtctatcaggtttcaggacaaacagacttagtaccatctattctaggttctgcatatggttatcgaaagatggttctttgcacaaagaaagctaagataagccaatcaaactcccagaatcttaccccaaatgttgccaagaaatcaagaaaggatagaacagaattttctagaacagaattttcctaccaacaaatatgaggttggggattagcatgggtc

SEQ ID NO: 35770 - DNA, 714 bp, Oryza sativa
tgagtgttagccgtgcatctcttgtcccctgtttgcataaatctcaaaagtattggcaaaactcactatctatgattcccactggaagtgcagtacccattgtgaaataatatgttctcgtttcagactatatatctcctcatcttttacttatgtatcaggatctggtgagattctaaatgttgttttacatatgttcttttttacataataaattgtgagccttttatggtctttgaggagataccacaaggtacacgcattctatagctattttgtggtatctcttggcaacagtatgaagaaagtggtacccagtatgacccaaaaacctcatatattgtcagctcgacatttgaagatatgggaagtcataatgattgtagatttcataatctacttaagattcataatatgctaagcctaaaagatcacctaatgcggaatattaggggcgctaaccattgtttgaagccattgcacttgttgcgatttcctctcttggaaccggagtgaaagaagaggatggagtctcttgaactgctctggtgttcgttggcggcgtagtagtttaagcagagatgatgtggcaggctggcagcgtcctccggcctccacctgcatcggcctggactgtaccatgtttcccctccagcggtttagcttgatcgggattacgttatttttgtgttggtgagatttgagaccgagaga

SEQ ID NO: 35771 - DNA, 601 bp, Oryza sativa
  unsure (1)..(601): unsure at all n locations
tgtctctcccccccccttctgccgctgttcatgtgggatttcgttgacagatgattaataatataataaatctgtggctaatcttgttctttatccgtgcctttctcccactcatattttctgtccctgttgggggcgtggtgacatcaagtagatccatccatgccttgtttagttagttcttggggggtttatttgttgatttcgtcggtcccaaaatgtgtggcgtcccccgttaacaggacacggtttcttgtaattaatggccataggcgttgcttggggagaaagttgatcattgctagtgatttatatttttttttttttttttctccagttggggaagtaggnaagttgtttgtattatccacctgaggttgggactctgttttgttgtaatctattgaatttctatgcaaattgcagtcttatcatcttgggtttgactgaaatatatcagttggatgtaggtgagaggcatgactgtgtatctattgtgtgtagatgtgcttcaagaagtagccgatgttagatgtttgtctatgtagacatgattatgactttgtgtaacattatgtacgaacgatagtagatatgttgg

SEQ ID NO: 35772 - DNA, 537 bp, Oryza sativa
ggggaaggttgtcgcccgccaccgccaccacgagctcaccaccgtgtgcacgccgctcacggttgccgagcccgccgctcccccccaccagatccgggcggcttgggaggaggggaagaagatgggagatggagatgaagatgggcgaggaagatggaaaaggaaggagtgggcgtgcggccggattaaatggtgggcacctattttcgcgtgcgggccacttaacatgtccgcacgcgaaaataaggctattttcgcgtgcggacgtgttaagtggcctgcacacgaaaattgatttttgtgtgcaggtaactgctcggcgccggtcccctgattatcatgtgtggtttctcttacggggcccgcctgaaaacaaaagtgtcccatgtccaggaaaatgttttgtgtagtagtgacggcatcaattttctaatctattatatgttagtattcagccgaagctctataccctactttaggatacaaggcaatacggcaacgaagtcttactctattacataatacatggattcggtc

SEQ ID NO: 35773 - DNA, 873 bp, Oryza sativa
tgtttattaagagacgaagggaatatgctaaatggagaagtttagagtgtaaatggtggagatttgaatggatttcgggttaaggagttgtagtggcgtctatcaccaacagcaaagacttgctggtgaactcttcctttgatgggagttaacactgttacagagagagaagagaaggtcttcttcttcctttgatttgtgtcgatcactcttgcccagctatgtatgcctagcgccgccgccacgtcgatttgcctcatccaattaattgcaaaaatcgattctccactactttcttttgaattttcttttcagttcagaattttcttttcagttcgtcattttttatcctgagttttatggattgcttcgattttgataaaaaatcgaaaaagaggatcacttcgattttgataaaaaaaatcaaaaaagaggatcgagtggatcaaaatatctcaacaattttggagattgagaaagattcgaccgcatttgatggagaggatcgacttcgtcatggtacggacatgagactgttcgagcagggcctacaacaatacttgtgggttgagctgaaaagaggtaggccagacacgagactgtttgagctgagcctacagcttcacttgtgggctgagccgaagagagatatgccgagcagtgaaggtagcagctgaaaaggaaggaaggaatgaacgttcggtccaaaaacaaggaagcattcggtccaaaatcaagggagcttaatgtacatgataaaaaatgtttttacccgttgcaacgcacaggtattttttttattactacggataatagatttatttattttgagacggagatagtatgctaaatggagaagtttagagtgaaaat

SEQ ID NO: 35774 - DNA, 559 bp, Oryza sativa
tgagtctaattaggccataattagtcataattaagtgctacagtaacccacatgtgctaatgacgaattaattaggctcaaaagattcgtctcgcggtttccaggcgagctgtgaaatcagttttttttaatcgtgtccaaaaatccctttcgacatccggtcaaacgtccgatatgacacccaaagattttcatttcaccaactaaagatgcccttagctatgggaaacctcgggagaaggcgcgtgcacctataaggtaccactttgaacgtacgtgctctccaagaactaataatagagaaaaaaaataagaaaacgcaagagtagactaaaaaggttattgaaatataacaacagaagattaaggagtaaataattaagagcgtatctgatcgtacgcatggcaaaatggatgaaaaacaaatttaataaaaggaaaacaaaaaggaaagaagaggtagcttaattaattagctatagctgtagctcttacaggcgcatatgcagacgatccagatgtagaagaagttgaggtaagggatgccggggtgggcctc

SEQ ID NO: 35775 - DNA, 534 bp, Oryza sativa
ctgcgtgatgcctatgcctcatcaaaactccacaaatttttattgggaaaaatttggagaaagaggacatagcatacacttgcaatgtcgcacgaattgcctcgttaaaaaaccttaattataagggaaaaaaaaccttttggggccctttttggccgccggccccgaaaacttattcaagggaaaaagagtacaatccacccaattctttgttcaatctttctagattgattttgggtacttgattttctatatcaagattctgaaatgagtcggcgaaattcttcccctaaattttgcatttctataattacccctccattggaggtgtgggacacactatttaatgaagatgtcaataatgagttagcggatgaatcttcaagactttacatgactcagttaatcgtttctatgcaaattcatgtacatagaaaagcttgggggttcatatgcttagggagtttgctactcacataactaatttgcatatgtgggatatatgctgctttaatttcataaatggcggggggt

SEQ ID NO: 35776 - DNA, 599 bp, Oryza sativa
agactggtgagtacgttatacgtactgtacatctcacgggatcatcggaacgtgcaaactaatcgaacgtgccacacacctaataagcacgcggccccagcaggtccatcctgccagacgtgcgacctaccaatttcctcacggacctcaccgatgcgtacgtttgtgtttgacgacgtctagggctgtaaaagaaaaaaaaagctgggcactcagtagccactccacaaaaggcccttgggccattttttccccaaaaaaatcgccacgagaggtgcagtataagtggctaatccataaactcacttatatattaaaataaaacaagtttataaataagtttcactagttaatcaattacacctttaaccgactcatcgtaggcttaatagttctagcttggctatagcttctgacaagtcaagtccgagcctataccaaaatctcgtgagctttgtcgagctgagctcaagctattatcgagcctgacaatatatgtattttattttttactttacaaattagtagatcaaaggatatattatattatttatatataagtattcaacacaacgaagtagtttgtatcggtgccacat

SEQ ID NO: 35777 - DNA, 549 bp, Oryza sativa
cgacgtcacattgattttcgtagcaactccgtacgagggcatcggtgctcctgaaaatattggttttatactctgtaaaagacgaaaaatttgcgaaaaagaacatatctccaaattacatggaaatatccacgagtttcaaaaaattcaaattcctataacaacaataagaaatcagcgtcctacaaggtaagttcaataatacatatcactctttgttctctctataatagccggctgaagtctaccatctgcatgtcatataataaaattttaaacaaatataaatcacaaagtgtttgctaaaatgttatcatcacattttatgactgattatagtcaagatctaatggctagttataagttttccattaaatttgcactagcattttctatttacatctatttacgtcaacttaacttacattgtaaatacattaaaattacatatataacttagggacttacgatgtatgtacgtgttaactatattttatgaaaaatacgacggaataaatataggtagtcccaatcacaaaatcaactcat

SEQ ID NO: 35778 - DNA, 557 bp, Oryza sativa
ttattataatccaccttaataatggggatggcaataatgtttagttattaaaaaaaggggtagtacgcactgaaaaaatttgagactcaggggaagttgttgaagaagatcgaaccttagaaaaagaattatgtcgtgatacagtgatttgttctttaatgagaaaaggttagaatctttaatacctgcaatgcacgttcttatctttatcgtggagacgtaaataattactactacaatacattttaattgaaacagaataaaacaagctcgatgatacaaatcaataaaatagtaacctaatgatatgacatgcgattttattgacaaatttattatcaccactcgtaagagtggtaaatagttaattattccaatgagagttgggttcttctttgtatggcagggagaaagaaaaaagataaatgagtaattttacactcaagacatgactaatgggttagggaaataatttcctagctaaaaatacttatatttttaagacggagatagtacctccatttcatctcagtttttcattcatttacatttctcaa

SEQ ID NO: 35779 - DNA, 752 bp, Oryza sativa
tgaaggtttgagaccgctggcaatatatacggcctcatcttttcgcttatgcttatcagtcaaaatttgaattttcaactttaaatttgaagctgattttgagggttttttcatcaaagtttattttttagcctttacttttaggtcgctaataacacgtatataaaagttttattaacgaattacttctcatttacaaatatgctgtttggtttattttacaaataagccaaacaatgagggcgatagtatggcctaagtgttggagcggctacagtctagctagtacgatgggtaggcatgcagcagtgagcaagccatggctgcctcctactggccggccaagccagccatcctgcagcctagtactacttggtagctagttcctcctagtagagtagtactccgtagtacaagtatagtagcaggatgaggcagagaggccgggcgtgcgtgttgcaatgcaatgcattgggtgttttggtgcgtgcgtcgccggggaggggatcgatggtggatgaactggcatggcatcatcgatcacacctgtgccggccggccggagctagcgagcgatcgagcgaagacgaagagagaaagtgagagagattcctcagcatgattgtgtcgtggaaggaaggaacaagcatgcatgcaacccacaacccaagctgcaatattgcatgttcatcgtactacataggagtacagaccagtagtactaccctgctttgcttgctgggctgcaggaa

SEQ ID NO: 35780 - DNA, 1283 bp, Oryza sativa
  unsure (1)..(1283): unsure at all n locations
acttattaataaaacttgaattcaacaatggtttggttacatagtactgagatcttatctgaaagttttctagcaaatctatttctaattatatgagctaggattgggccataacctgggccagcccattacgggttgggccttgatagtcgtcaatccatggtagaaaaaagcagcccacaaggccatgggatgccaggcttcggacaatggcctagggtacccgatgcccggaaaagctaatccccgcgcgcgcgttgccggcgcatactccggcccacacggtccatgcacgcacgcgcgcacgcctntntctcttttttctttttcttttggcgcaccgccgtctcttcttttttccttttttttttcttttttctgccacacgggagaaaaaatcgtaattagtttactactccctccgtcctagaatataagagattttaagttttttcttgcaacgtttgaccactcgtcttattcaatttttttaaaaattattatttattttatttgtgacttactttattatccacagtattttaagcacaacttttcattttttatatttgcaaaaaaaatttgaataatacgagtggtcaaatgttgcaagcaaaaactcaaaaccccttatattgtgggacggagggagtaatgattagtctcctatttttactactgattagtttactagtaatttttaaatcttaacttaaaaattttcaaatttggacttgaaagttttcaaatctcgagctaaaaattttcaaatctggacttgaaagtttttaaatctgagctcaaagttttcaaatctcgagttgaaagttttcaaaattttcaaatctggacttgaaagtttttaaatctgagctcaaagttttcaaatctcgagttgaaagttttcaaaattttcaaatctggacttgaaaattttcgaatctcgagttgaaagtttttcaaatgtgagatgaaaagttaaaagtttttaaaatttgacttaaaaaaaaattcaaatttcgagttaaaattttcaaatctggatttaaaattttgaaaatttgacttcagaaatagatttcttttcaatttgttagttaaaaaatcttgtgaaaaaaagaaaatcctaactactactgtcattatcttaagctataattatctaaaactaattaattgattagttaactatacctcctatctttagtcccgaaacgcgcgtggggggcgcgcacgccccaactaggccccccccaatgcctgaatcgcactaaacatgcgtg

SEQ ID NO: 35781 - DNA, 1068 bp, Oryza sativa
catggcgattggagggaggcagagagagcagtggtcctggaaggtgataccgtagctggcggtggtcgaccagaaaccatgatgtttttttgtccataggattgttgttttgttttgataggataagatgggctacataattttaggtatcgctaggatttaatttacactgtagacaaaacataaggccttttgtgtctaatagaagaaagaaagatggagagcatttgcccctgttggaacaattaatgtgctgcaggcaataacaatccagttggttggccattacgattcctgactcctgtgctgagtgatgagaattcagtgcctcctccctcactagaagggctgttaatccgtgaagcatgcgtgaatactggtgttgcaattggccgtctgcaactatctgtccacgcaagtaagcatccatcgatggaaaggccggcgaaatactagtaaatgcatatccatgtcagtcagattcagatcacatgaggttaggtccgcaatgcaaatgctactactgggtgaaatatctgagcaattagtaagtgaatgtcgctactgcattggcgttgcatggcctggcctgcctccatgtatctttgtcgcgcacttgcctgcgctttttcccaatattttaatccaaaattatctatcttaattagcttctttatctctgtctcagtagtgcaggtgctcccaacttaataaccttttaacacctgaaaaagaagatctcttttcagtcgagagagagagcagggcccaggcgaggctatatatacacggcattgcatgcaccatatgcatctcaatatctcttgcgacctcactccaattgcacaaacatacatacatacatacatactcgatcagtcggcaattgattaagcagctagctcaagctggtaaaattaaacgaccaatatatatgatgatgatgatgaccatggatgtgaagctcctgctgctgctgctgctgtccgtcctcctcctgtctgctgcctccatggccaaggacgacgatgagcagcagcagaaggtgcaatgccatgaggacgacga

SEQ ID NO: 35782 - DNA, 774 bp, Oryza sativa
cttaagataaaaagaaaggcaggatcagcctatgtactggggaagccactaagttgggggggatttgacagtggtgtttcatgtagcagtgggatacccaggtaataagttcccctctggtttgaagcgaaagcttagttgaactaaacaaaccccggccccggccctaaaaggctagatcaatctatgtattggaatctggtaaagcaaaatactccgtacaagatgagcaaataagttgggatttggtagtggtattccctagaagtgggagggattggtttggtaatctatctatgactgcgccatggttgcaagtggcatctactcctatctatctatcaatctccaagtcgaaagtcaaccggctgggctgggcgacgagaagctagctagggctgcgggtggacctcaggagggagcagacggcggaaagtgactcaccggagccgacgaggatggcgacgttgccaagcaccatggcggcgcgcgaggagaagcccctcctgcctgtagctctgcttcaatctaacggcggcggcggcggcggggacgagggcggcgaccggcgagagggaggacagattaaacctctcgatcgatcgatcgactactttttttttttccctagactagtagaataaagaaagaggaaaattactcctacttgtttgctagagagagaatagaatactgtaattattaacggggcagggaggccaaggggagatctcaatctgagacggtcacctgttgaagttagacagtatatta

SEQ ID NO: 35783 - DNA, 580 bp, Oryza sativa
ttccattagccgtatgatcctaaaaggattttaagaagatagcattaggagcatgtcgatgagtttgttggtaatatgtagtggtaacatgagcttctacttttcctaaaaaaaaaaacatgagctttctactcacctgggtgtattccagactcacaagctttgattcctgcatgatacaagatacaaaaaatgtacacgagtaatattcagtaaataaggtagaaatctggatattcagtaaataaggtagaatctgttccggtacgaggcacataccagactccgaactacaaggttaactgattgtaaatcctcttggaaagcactcagatccccatggatgactgtgacctacaagtcagtcatgaaatgccattaggtcgccgaaaatgcatcaaaaactataaaagtaaacacaaaaaataaaaggaaaaacagttccaacctcatcccttgtcccttcaataatttcttgtgtttcatctaaactgatatccacacgatcaatccttccagcgagatgtttccttgcagactgaatagtgaaaatcaaaggccagtaagatgttttggttgg

SEQ ID NO: 35784 - DNA, 651 bp, Oryza sativa
gggactattatcacgttagattccccctcttgtatgatgtatcaatcacctttttattgagtagcccaacgacatatagcagttcacatgttcacatttatttcttaaaggatgaaataatatatttgtaaccggacacaaaagaatgggttgtttggttcatgtgctatgagaggacaagcgtatactaatatcctcttctggaaggaggaagaagaagatgacaaggtccttctcctccaagaagctgtagtattattcaggtttaaggtactgatctaatgaagacaatctatcatcaaattgagctttgatctggtattgccaatgccatattattattccgaggactttgtagtttgacctacaatatgctttacaataatccaatgtactactccatttaaaaaaaaaacctaatatagtattcagattcatggtactctagtactatatttgttttcctttcgaatgaagggagtattattatttgcccttatcaaattaccaaaatgcctctaaacttatcctaaggccttctttggttaatcccatcgggattaaggtgcggaattaatcctactcaatcccttctaatccctgtctcacgcggaataatagaacagtctagagtgagtaaccaaaggtgct

SEQ ID NO: 35785 - DNA, 536 bp, Oryza sativa
tatatttaaagagggtatgcaggatatcagtttttgagttataatagagagaaatgcacaatacttttttgaaacaggttcaatccctggaaggaatatgctattattaatataatcaaatttatctctactattgcctccaaagaacagggaaaaacatatatcaaaagggcccaaagaatgactcagatgcaaagcagttattaagtcacctgctctttagtaggtgctgcagatgtctcctctggtggtgattcatcagcaggtgcggcttttatgctaatgtcatcttggctttcaggatcatgctgacatacaaacccaatatatatatggaaaaatccctcaatgtgatactccctccttccaaaagtctaagacctatttcattctttggtttttccaaaagtctaactcctatttgtagtcattatgtgctaaattaaattgttgaggaacccaagaagccattttaatgcttattggttgcatgttcattggttttgtcatatggtgaatgaattaattgcttcttg

SEQ ID NO: 35786 - DNA, 529 bp, Oryza sativa
cggactccaagacgcagtgtgtgtatgacaggtggaaccagatattaatagtgtagtatgtaactattgtatgaattggctattaaattgattgtatgtgatatggagctagtagttggctatactattaacttgctcttagagcaaggtcaatagtgtagctagcagtaggctctaaaattttgtcatgtctcaggtagagctaacttaaagagcaatttatataataaactaactacaagttagttataagctacattggttcaaacgaattaacaagcggtaggacccacaaacgaattttttttattgtatctcctagccgatacagcgtgaggcgctgtgcaagcaccggcttctttctcaatatgtgattttctttccttaatctcgttttaggatgattgataagttttagagccttcctaatagcactattgtacttgctcttatctccttaaaatatatttatagctgacttatagcttgctattgtatacctactgtaataaggtaataaggttgttca

SEQ ID NO: 35787 - DNA, 699 bp, Oryza sativa
acgattcaatcagtggagtcacattatgggtggagggccagggtttatcgatgatggccaaatatggtgctagggtcatttggtggctaagtatagcatgatgatttgttggcttcagcttgcagctaaattgtgggggcttatcggaagttggtgcaggctgaccttgatcaattcttacaacgatagtaaacaaagtgacatgcatccagataagacatagtgtgaccaaaccgacaatttgggctagaaagaatgtggaatctttggcttggctataggtaggggtggtaatgggtcaaggcccgtgggttctttcacaacccatctcaacccttaaatatttttagcacaaaaaaactactaaatttcagcccaacccttttttggacccaaccctcacattttctaggccaaaatgttgggcccattaccacccctagctataggacattgcacaacaatgtgcactagctagttatggaagactctaaattcctcgttggtggttgtgtagaagattgtggagtgtatgtgaagctcggggaggttaggccatggtggtgagcatgatttcactcactactacaaaaatctattaaaaccttcataaggactggccttataggtgccgattcatttaaaactggcacctatgggcattttcccacctccgcacaatgaaagggctgcaggaat

SEQ ID NO: 35788 - DNA, 567 bp, Oryza sativa
ggtggcgaagatgaagtgcgtggtggtggactacaacgccacggcgaacatctacgcgcggccggtggaaggcgtggtgatggtggtggacctcgaccggatggccatcatcgggtacagggacagggcggtgttcacggtgcccaaggcggaagggacggactaccgggcggacaaggtcgggccgccgttcacgggaccggcggcgccgcccggcgtggtgatgcagccggagggcagggggttccacgtccacggccatcttgtcaagtaagcaaccgtatccctcatccgtttcatattgtaatcgttttgattttatttttctacttaatagaacttcttttaagtttgatagaatttattgaaaaaattagcaaaactctaaagtaccaaattagttttattaaatgtagtattaatatattttaataatatgtttattttatattgaaaatattactatatttttctataaacattaattaatttgattagaaaaaagtcagaacaacttgtaatatgaaacggagggtgtatatcatatatatatatatatatatatat

SEQ ID NO: 35789 - DNA, 3997 bp, Oryza sativa
agaatttagggataaaatctttgtaaacgcaaaataacctagctatattaataataatatggtttttcaagggtattatatcataactaatggaacggtaacgcaagagaattcagtagatgcaaaagttagttgaacgagagttaaggtggcaagtagtagtcacacgataaaacgatagttgtcggtgtcaaacacggtagatgtgaggaatcatatattcggggatctaccaggggctccgaatgcaaacggcatgttcgattgtgctagggagtaagagagaacatgatcacgtatacaggtttagcctctcgaataatactcctctcctggtcactatcgaagaagttcgtataagttttgggaggctctcgagctagcttagcaagccagatgctcttgccaatttctagtgtttaaccctcctacagggtttaagatgggcatttataacctacaattaatagtcatctctttctctctgacgagatacaaaacattgtgcacactcataagcttgagctacctccttcgactctccattagatctactatagtagtcgacctcctgttggaatccatgctaggcccacttacagtctcctcgatattttacgcgtcttaaaagccacgcctgatgacctgagagtgattgaatcttggatactttgtatctctttgtatcttggtttggtcttttattttgttgggtgtgtttaatttcattatgaactacactcttcgtttgagtgatacattgtaataattggctgtagctttgatgagcaaaggccggaatgttcattccattatcttaaaaaaaatacaatggacgagctctatagcttgtgcatgctcccaagggtggcatagtgccctattgaacacacatcaacatgtcatcagcacgcgagaatgccactctacccttgacgaggtgccaaggttgattgcaatatgacacatggagtgcagggttcaccctcgggtgcaattatatggtggaccgcgagaaggggtgacctgcctactccacttgatctcactagccaagatacacctagtagtcctcaggcaacccaaagtcatgtacccctagcatgacttggttcctaggtggctagccagcatgcctcatgctccaacgcaaaaggatacgtgattgttttcgagcagctctgggaacgaattcaacttaggttagttgacccaaccagagtctcgaatgtctagcttttcttggcatgtctttagacagatgatggacacgtggaccttctcgaaagaccttgattttggtttaagctatggaggtgttggcccataatccacacagtttcgatggcttgccttctgaactaagcaagatggtcaagtcgggactccctctggcaacaatattcacttgatgaagcaataggtatgggtctacatacggtaatttagtgtcattgatcagggcatgtccatcccaagtgttaaagagtgacgaccgtgcatatattaattattcataacttttatggtcattttcatgctaaatggaaaaaaaaccacctaataagagataacttttaatcctaccgatatactattcctatcttattttatcctaacttttttcactcagttttgttcatatttttttatattgcaaatggcaagaagagtaaaacgttaaccaatgtttaccgcatttttatccttacaagtttgtttcgacatgtttttacataaaaatattcttaaatatgtatcaaagagctttcaacatttaaattcggtgactattgatctatgtatagatggcgttcctctcaaaggttgctaattggaacatactcatcaatgggaacatgatacatgtggtcaaaagagataaatggggcctgataagtcagagggtcgagagtccctgataagtgaggcccacacctatgggcccataagtcagagagacacgtccctttgacgtacgtgagaggagccccaccgggacataacataataatagcactcaaaatcttttttcttcacttggaaaaatatcaattgtagtttgatcaaattatattttgaatgttatgtacttatgaccaaatcaccgaaggaagggaggatgacatttcacattttgttttgatagcacgtgtttgttactttatatcaaactagatttataaaggctaataaatcttaattgattatgaaagtttctttaagacaaatatactaataatatttttattattttaactaaaatgtatcattcatcaaagttttaaaattttgattgatcttacccaaacattgaaattttgtgatagaaaggaggaactagctcacacattggtttatcttagaaacgtgcattttttatcctcaagacgagaaacattttgtagggtgtttaagatgctagaaggatagggagttgccaattagtcacaatctgaaaaagctaaatttcttagcttgctgctactagtttgttttttacactatataaatacttatttcaaaaccaggaataaaaatcaaggtcgagaatgggtagctgacggatgttccttaaatataacatatttggcgtgtttccgaagataatgccagcgcattgcgaaaaaaaaattcaaaatgctaaggaatatatttacagtttggttaattatatcaatgccattataaatttatcaattttgaaaaataccactactatcacataattaaaatcatgtgctgcaaaacatcaaaattccacattatacgtctaaaacacattatgaatcgttttgtgactactctattttttattttttatggactaaaataaaatcgtctcttacaactcaaagaacaacaacactatccttcctcctgccaactccacaattggatgctttagttctaatcaaaattttcaatctaacatttgacatcgctaccacaacaaactgctaccacttcaccattcataattcgtgtacaaaataattgaatgaatatcatataaaaaactacataggaaaaaaagagaaaaataattgggtggtggaggagccaggtcgccgttcacgaccattggcatcgctcgtcggcatggaggggtcgccgtccacgaccgctcaagtcggctagctggcactcattgccagcaccagcaccattagcttggtgctcatcggcgcctagactgcgtatcgtagctgtcgaacgtgtcgtcctagaccttactgcctccaccagtgctaggtctgctcatgttgagctcgccgtcgccagaaccgactttgcgcaacctagatcgaaacttcatcgttaccgtgcgccgccactgcatatgcttgtgtcgagagcaagctttgtatttagctagtcgtcacttgccgccggcgtcgtcgctgctgattggcgctccccacgttggcaagattaggtgatcgatttggctatggtcgttggatttgaggttagggttaaaaggagacataaaaatacagtaggaaagaaaaattcaaaacgcgtatatggatcaaattatataaattgtaaagatattttttaaaacagatgattttttcaatttgcaatggcaatgatcccattaaccccctcccccgctttgaggaagaagcgaacacactccatgcgcccccgcagcacacgtatgcatggtacgtgtccgccggcgtcacacgcggcgtgcagcgcgacgcccgcggcgcatctcggcggccgcccgcgccgccgcctcatccatctccagaggattcctccgatcctctcgccgccctcctttttatcccccacccccctcctcctcttcatcctccaagaagcagagagcgaagcaagctcgaatcgatttccaacccagaggatttgattagctttgacgcataccaagatcatctgatcaatggcgtccatgcagaaaaaccgcgaggagcgcgcggaggcggcggcgcacaaggcggccgactagctccacgcc

SEQ ID NO: 35790 - DNA, 610 bp, Oryza sativa
gagatttgttcccaacctaccgtaacgaacacaacgtagttgtcctaaaataaaacatgtagtagttgtggacttatataatataatattggctactattccctttgttttatattataatccaatttaactttttttttcaaagtcaatcttttaaagtttgatcaaatttataaataaaatataataatatccctaacacaaaacaaacatgtttatcaaactataaccaatgtcacatttaataaaactaatctcctattatagatgttactaatatttctctattaacttaaaccaaatttagaggagtttttttttgcggttatatagttctaatggaacatatattatttgttgaatattactactagtagtacatgattaacaatgtaaccagcgtggcatggcttgggccgcaagaagagttgactgcccagttgaccgacacatgccacagttgtactcccaccttgtgttgtgtgctcaggtaaaaataaataaaacggcgtggcttcctgtgcaaggagaggaggaggagagcacagggcacatgcggatgcggcgatgtggcagccaagagggaggatagctgggtcccacggtagta

SEQ ID NO: 35791 - DNA, 512 bp, Oryza sativa
tgaacaaccttattaccttattacagtaggtatacaatagcaagctataagtcagctataaatatattttaaggagataagagcaagtacaatagtgctattaggaaggctctaaaacttatcaatcatcctaaaacgagattaaggaaagaaaatcacatattgagaaagaagccggtgcttgcacagcgcctcacgctgtatcggctaggagatacaataaaaaaaattcgtttgtgggtcctaccgcttgttaattcgtttgaaccaatgtagcttataactaacttgtagttagtttattatataaattgctctttaagttagctctacctgagacatgacaaaattttagagcctactgctagctacactattgaccttgctctaagagcaagttaatagtatagccaactactagctccatatcacatacaatcaatttaatagccaattcatacaatagttacatactacactattaatatctggttccacctgtcatacacaca

SEQ ID NO: 35792 - DNA, 583 bp, Oryza sativa
actcgtttgatcttcctgggaattagttcattctgctgcgtctcgagaattttcatggctgtcagcagcactcaaatctatgtaatgttttgatgaataacctgatgcgtaacggatggcaaataaatagattcaaaacaaaaaatacaaatgcataatcgtcctcaaaattactagttgtacaagaccatgtgcgatcagttaattacatgtaagggaaccatggtttaaaagaatatattacacactcataaataggctttcaataaaattttagtgagatagatgtgatgttagtttcgtctctttgagcgttggtgggtgcatgggcaggtgtggtgttgcgtgtgtgtaccgtgtaatcgaaaaatacatacatgttcatgccacttttttttcaattctccgaaatctacaatacatacatgttccaagtgtatgtcaacgatggttttatctgtagcttactgccagcagcactgaaagtctgaaaccgtgaagcttttttttaactggatcaactatggtcattgatttgtgctttttgtagaattagaggtgctcccatgattatgatatgctt

SEQ ID NO: 35793 - DNA, 689 bp, Oryza sativa
aatttatctctcttaaaattaaaatagttggcaaattagttttatttgttattaagaactaatatattttttacttttagctgattattaatttttttaaaagtcacatagtaatttttacaacaaagcgcgaagaatcacgtagtgaactaaatgtgccagtttgttctttaattattgacataaacaaatagctcttcttgtacaataaaatgtactgctaattattactacctatattttgtaagctaatcgatctcttgaacaccggtgacataattttgaatgtctcattttttataattaccctttctaactaactgttacgaaaatttaaaaccataagacaatgttttgacgatatatctaccaacatcatcttcacttcacagttcaaattatatatatatatatatatatatatatatatatatatattttacatctatcaataatctagggattctaaatttttttaatatttgattagacaagtgttgggacattatctattttgcagatcaatccatgttttcaggatagataatggttagctataggaagggtaattacagaaaatgtaaaaaaataaagacaatgcggatgaaaacagataaacaaaagttatgacgtatagatgcaacggatagaccagatgaagccaacggtaaaatttgcctttagcctca

SEQ ID NO: 35794 - DNA, 530 bp, Oryza sativa
tgacggtttaccctgatatagtgtgtaagactgtaaatgtactacttgttttaataatcatccctcaaattgtgcaagtgtttaaataatgagtagccactagactccattgcatggatgataagttaaaaccaggtatcttctacctttcaataaaattcattactattactaacttgattatttcattatcctagacatgtacacatctagtgcagccttatatattatgatgggaatatcgtttctcatgttgcccaacaaacaaattttctgatttttgaggtgtgcacatgtctgtctgaactatttacccccatacccagccgatttttgcaagtgattccccatagaattttggcaaaacttttccattttccatgaatctgcaagtgatatagaagttcccaatgcaacgcatgctatcttctagtagaaatgatagtggaatcctaatacaagaatacagtttaataatgcctagtaacagaatgaaaaaaatagaacatggtataaaccatcagggtacc

SEQ ID NO: 35795 - DNA, 573 bp, Oryza sativa
tgttcattctacaattcgattacatctttatattccttataattaaacctttataacaagatatcacacgattatattttgataaaaaattgaacgttgtttcaccccttgaaaaaaattgttttagtttaccgcataaagtgtttcagagaaatggtattaaaaaataccaactacaacaccagtaaccacctagtatatgaaaacactaagtcccaacaagcaaaacaagaaaagtcatatgaaagatacaatatatttgaaaaaacatgatattgttaaaatatttttatatcacatatgaatattaagttgtaactatcgaaacactacaaaatacttggtgaaacattccaagaatatcatgtgtaacatttgcaaataaactagtaaaacatcatacaatactagttgagactgtcacatctataaaacatgtgcaacatttaaaaaatccatgaaaaaaatctaaatattctttttatcgaaatataaccatgtagtcgtgtcctaaagatttaattgcaacgaatttagcgatgcaatcggatagatatggagaagtaatttagg

SEQ ID NO: 35796 - DNA, 668 bp, Oryza sativa
tacataacccaatcagaattgaagatattaacgaacactatataattcataagcagaagacagcatgcaaaaagtatgaagccaagtacatactgagaaagcttaatggtccaaatcaactattcattgaaagaattgttaccggaaaaaaagagaaacagttcatagaagatatttgtagaactagaaccctttcttgtactaagcaagcaatctgtgttatttcatgttaaataaaatgaaactcaacattacaagaaatacagtgacacacaatcatattcaagaaactataccagaaaaagttaagacaaagaaggaaggcataaaaagaagtgacaggctaacagaaaggtgggacagtaaaaaggctgaaatgtgcatcacagctccaagcaggtaaaaaggaatgctaccaacactaccccaacacaatttagtaaggtgccacatactccctccatctcaaaatatttgacgccgttgacttttttaaaaatgtttgaccgttcgtcttattcaaaaaatttaagtaactattaattcttttcctatcatttgatttattgttaaatatacttttatgtatacatatagttttacacatttcacaaaagtttttaaataagacgaacggtcaaacatgtctaaaaaagtcaacggcgtca

SEQ ID NO: 35797 - DNA, 582 bp, Oryza sativa
ggtgtcacaagtcatattactacataaatgaacttggcagctgattgcatggtttctacgcccaaaccctttttttctggaacatctaataatgtttgtccccactattcatgaaagagttactggaatacttttgatactttatgcatcactttctttcatgtcaccttttcaattggttgtttcgacatatgtaatatttttagtagtttcggcatacttcgtatgtttaatggctcatttatgtgcttaatttcacatgtaagcctgtccttttacaggttttcatcttattcagcgatggttcaatttttgtgctctgccccattgttccatttggaaggtaagtattgcatttatttctgccctcccccacccctcttttctctctattgggaagaaggcttacaacaatttgacagcatgatggtcctaatttgttaaaacaaaaaaaatactgtactaattttgtttatgggaaataaattatggtccctgcagtttcacactttcactttgtagtcttgtatttatgaaatgcgaccttaatgatatgatcatatggtgccctttctttatctg

SEQ ID NO: 35798 - DNA, 568 bp, Oryza sativa
gaattcgagctcggtaccctttttgggtattacatcagacgtttgaccagatgtcggaaggggttttgcagtttagaaccttttgcctcaggaatgtacgtttgcttatgtttgtatgaactttcatacttgttgttttgttgtgtgaatgatcaatatgtattctggtggatataattaccttgtgtctgcaagaaatatatgatttaacactgtgcccatgtgggttaatggcttagtgctgaacagcatcacaagcatttttggtggccaaattttgccgttgatttctgcatatgctggagtggatatattacttttgatgattataacagttggaaaattatgcgctacgcctacgctacggtcggacctttgatcgaatttgaccgggaaacctattttcacttatgggtgggtcggagtttggacatttttcccaaagcaggccacccgagccaacgccaggtcttaaaagagagggcaagccacccggtagggtttcagattgtgcagcgttttgggatttgggaattttggtgatcatcggacatgtctaagcgaccgc

SEQ ID NO: 35799 - DNA, 545 bp, Oryza sativa
agttaggatgctggagcatgctgaggtggtgatcctgagcacagtccgcaaggcccgatttcggtgctgcatctcccaaccgatgacaactgattgaatgagacaacagagagttgcgaagaccttgatggaaggaagcataatcgagtgtatttatcacatgttagactctgcgccgctgaagtagaaatccaacttgagtgtacgactgagttatatactcaggtgtaaggcagttctatattcaaaatatttctctcttagagtggtgttttcagactgctttggtgtgttaggctctatccttttgtcgaaacatcatgcagatttccttttgttgtaactgacgcatgttcctgctgctttatgcctgtgttatataatccccctgctggaacatgcacaaactttgctgcgttcagagtatatagtatgtacaatttgaaatgttcccgtggcagagttctgctaatgccaagctttcggttaatcttccttacccgtttcctagattcagctcctagttactggctgagtttgtagtg

SEQ ID NO: 35800 - DNA, 581 bp, Oryza sativa
ggcgaattcgagctcggtaccccccacgagcgagacgaacacctcgccgccgaggagcatcaggacggtgagcaccacgagctggccgttggagaacacctccatctcgacggtggacatgctcgacaccgtggcggccgacacggcggtgaagaagcggtcgatgcggcgcggcgcggcgccgggctcccgcaccttgagcaccccgaggaggccgtagccgaggcaggagatggcgaggaagtaggcgacgtgcatggacaaagcgccgccggcgagcgcgcgccgcgacgtgggcatattggagcacgcacgcggccgccgtgtgctcgctccggcgcggccggtgcaacggctggctcggcgagcttgtggatgagctccggcgatcgatcgtgctgccgcgctatatatagtcgtgcggacgtgggaggctgggagctatggctgagcaacaaaataggccacgcgtcctacgtaccactaaccatttgatgtcatccaatttcgaatagagtaatactccctcaattctacattgattattatataatcaaaaccagaatttctaaactgattat

SEQ ID NO: 35801 - DNA, 566 bp, Oryza sativa
tctacgagagcgaccaatgccactggggcggggcaccttacctccccctccgacggcaaagacgccgcccctcctcctccgccgccgggcgccaccattgctccgccgtcggcgatccacccgcgccgcgccgccgctgcacgtgcggcccgcgaatgagtgtgccttttgcctgccttctgccccagcgtgccgcttgcacctcctgtatttattcctccgcgccgcacgatatgacgtggcacgtttgtttacaggctttgtacgtgtcagggtaacaagtactctgttttttttcgcgggcacccagcaaacgcatatgcggatattgcgcaccactacaccactgcacacgtaacaccgaacttatattcgtggatattaaaaatttgtatcctgttgaatagggtcatgcatccatgactccggtactacactaagttgtaatctttatattttgatttgaggcatattgtatatggtgaacgtagttttttctcatgtctcttactagtgtattaactactttatattacatatgggtaccgagctcgaattcgccctat

SEQ ID NO: 35802 - DNA, 516 bp, Oryza sativa
tctaagtcccatctcggcaccgtaacttgggaataaggggagtcgagaggtacaagcccctcctaggcactgccctcctcatcggcaagcgcatgcaatggaaaagctgtgatgcgatgcatgcgctagcatgcttgtgatgctgaggaggaggcggcgtgactctttgtgctaaggtgatctttgtgttgatttgtcacgcccagaaattcactgatattttccgaacttatttgtgcataaaatcctcgtccaggaattagctgaggtacacaaactgacaatttaatatacatattcatcaaaataactaaagagattaacacttactgaagaggcacttagtccacacaacaaagaaaactgcagcggaaaataaaatctagcgaagctccggctccactcccacaggcagctcaactggggtataagctaaacgtcttttccctctggatcctttttcttcaactgaggtttaattgattattgcaaggtgagcatatgacatactccgca

SEQ ID NO: 35803 - DNA, 1735 bp, Oryza sativa
aaccggtgagcaatagatcgatcacttgcgcatgtttttctaaccttcttcctagccgatggccctaactcgccaacgccgtccgtgcgaaaccaccgccgccgtacgttgagccgttcccggagtagacttcactgtccaagcttcgtcaatccccggttaaccatcggtgagtctcattgtgcacatcagcaacccatgcattgatgcatgcactgatttggctcgattaatttgagccggagatcgattaatccacggtatgtaccgacgtaccgtacgccgtcggctagggcaaaacacggccactagggctgaggtgaaaattttataaacaatattactattggatgaagaaatgatcaaaataaaagttacagatattttgttgttgatgactttttcacttgaaatcatttagtatttgaaaatgttgtttgaagttgtcataatttgaaattcaaattgaaattattgaaacagagtcatatagcaaaatgaccaaaacaaaagttgtagatcttgatattcataattttgaagtatttaatattatatttgtaaatcgcgacgaaattgatataacgtcacagtttttgggccggtttacgatgaaatcgataaactgtcacggtattatgggccttgtatcaatagttgcatatccatgacgatttctgaaaatatcacggaaattttgtgacagattaaatatattcttgtagtataagccgccacgtggcattcctataaacactcctaagtcgccacataggcactatataatctcaccgttgattttcattaaaatttgttgatctattattttacaccattagattgcatctattattgaaagtaataacttcattctgtttagatacaaacgctactatgtactaccgttctccagtacttacgacgtacgagtagtacatgcgattttaacgggaaaaaaccatacgtacgaacatagatagaaaagacaaccaataaacatagatatataaaaatggacggttttttctacaatataaatatgaaatatattacttcagaaatataatataaatatatatagttaaactaatatctataataaaatataaaatacccaataaatattctttaaaccatcttctaaattattttgaaattatatatatccaatttgcgatcatgttgtatttctttaattaaattataaaagttatattatggtcctaaatacaccacggcacatgaggccaacatatgtatgataacttttcaaaaaaatcacaacatattttagggagggcaatatcacttcacaatttaaatcaacatatgtaaaaattctattatatactaaaagtccattaaacctcctatggatgctcttaagtcgctacgtggcactcacttctaagccaccacatgggcactatataatctcaccgtgattttcacttaaattggtggactcattattttacactattagattggatctattattagaaaataataacttcaacacttgtgtttttcaagtagttctgattaaattataatttgtttgagattaagattctcaaaatgtttttatatttttagaactatttcactatacatatttgccaaaatataaataataaaatgatgatatggatattatcgtggtggtatgtctcatgagctataattttttaaaatatcatcgaacgattaccctcggtcattttcaaaagag

SEQ ID NO: 35804 - DNA, 684 bp, Oryza sativa
ttcctgcaccccttcatttaaagagcatataaacttcaaatggccataacttggccatttgaactcagaattggaccattcaagtctctaatttttccttaagaagtcaagaacccatttttgtgctttgttcttgctggttatatggagtttattagagtaaaagccttttcttttccattggtcgtgtagacgctgcagcttcggaagatccgctcttcgtggaggttgaagccgacgtttgggaaagcgagcaaggcaagtcacatcatccttgaacatattgaatcccagtttataaaatattttgatttaaattattgcattatcgctttatttaaattcccgcgttatcactgttttatctagccatgcctatttacctttgttatgaccttattattgctattgttattatttccttgttcaccctagaataaacaaaaccccaactagtggacactctactcatggtaccactagtatgatttaggcagatgcttcgctggttaattaggcaacattatgtggttttacaactctagactttgggatattcatatcacctggacactacggaatggttggattattgtggaattggattcacacctccccctctattcaaaatcctcaaaatggttttaggctgggctcggggtgcatggttttgatagtagcaca

SEQ ID NO: 35805 - DNA, 672 bp, Oryza sativa
tgacgatgcgaaaaatagcgaaaaggaaataaagcacgtttctttattaacttcgaaaaaaataattgaagaatagaaggttcacaacacgatacaactcactttacaagtaaattacatcttcgcccctgtaatcattatccctccctaaggaatggtcagacgaactaggttcgtcatcactactaatatcatacacaaccttaagaggagtagggggcgaaacacagaccaaactgttgcgacgctgaaagatcatttcctgacgtttcgtcttctgatgatttcgccaaaagcgagccatatcctccaaacgtcttgaatgaacaaggtcgtaatcttctaagattcgcccggggtgcgcccgcagccagtcggcaaccttgaaaaccttatagctatgaccgtttatctccatttcgcgataaacaggacgaaatggacatcgcaccttcggcaggtccttcaatgccacaaatttctcgttttgacttcgccagctcccggaaggggaccgaatgcacaacttccggtgaacgccctgatagacagcgcagagaaagcaaaacacagcttacatagtaagaataggcggaaggagggggaggtatggcataatgcgagatgagcgaaataataatatgccaaagacctcgaccatcaaaaagcaat

SEQ ID NO: 35806 - DNA, 3988 bp, Oryza sativa
atattttaataatataatgagaaaaatatgtgctattatatgagagaaaatataatgatgctagccgcgcaatctgcgcgggccaccatgctagtttattatatatgttagctttaagatgagctaatagtaagaaatgatctatactattatccttgctctcatcactgaagtcaaaagctacatgcacgcactgatctgcgagcaatgtccaggaatcatgccactgatccatcgggttaatcgtacttaagtcttatctaaaattccaggtcgtactgtactactactactactttgctgttctgtggacagtaatacctggagcagtcagcagatcaccatgggaaaaaaaacagttcatccaactaatttaaccaattggcaagttgggagacttgataatcataaatttatcttgaaaaagaaatgatgttttctagcttagatcagcagcctaagctgatgtagtagaaggctgcggcgtgttcttaccggcgagcacagcctcgccgttgaaatcaacggccgggcaattctcaggtagagccacaccgatctattatactccttccgtcccaaaaaaatcaacctgaacgaaaatatgatctctttacaatgaatctacacagaagtcacatgttagttttttttttacgaaggaagtaagtttttaattgtcacgcaaggttagttccacctcgcgcgaccgcaagcgagtcgtcccgtgagccgccgtcgccatcgtcctggtaagtcgtcggcgacggcaagtctctgccgctgatggtgcttgtcgcgcagtgcgacgcgacacgaagttagcatcagctgcagcgaaattgagaaacgggaacatgttttacataaccaaaccgatcagttcaacccatattgcgttatgggctggtccaagtgaagctcgtagtgatttcctttttttgggccaagaactcgacggctcgacaaatggatagttgggcccatctggtgaacgggctggtgctagagtactagtggaaatcttttttcgaaacttgtgagctaagaatcaaattcgtgtagtaaaggtctaacctcacaattgtccatggcagcataatgcataaccttacaagttattatccatagcacatcagttacattacatacagattttaggcctgttcactttgatgcaaaaaaaaaccttactaaattttagcaattgctaaaattttggcaacttgctaaaattttgataggattttttatatagttaccaaaatttgctagcaaaataaatgtagccacttttttttttgacaactttaccaaaatttagtaaggttgaaaatggcaccaaagtaaacaggccctttaaaccatatgttttaaggagtttaacgagatgaatcttatttctaactcgtgatgttaataggttgaaccaagctagctcgttaacttaacgactcttacgagttggctcgttagctatcgcgaccctggcagataacaacgccagcctggctggtcgtctacttgacgagtgatgatgagttgatggctgatgagggtaccacactaccacagtccaaatcagggccgtggaatgcactctccattttggccgctctagccagaagaaaatcggaaatcggccgggacagacaaactccatcaccaagtgccgctcgtggcggccgtgggttccgcacttccgctgcatgcctgtatgtcacgggtagcatgattcggctcacatcttctgtcattatgatattatcattatagctactgacacgtaaaacaatagaatattgagatccgcatatcagtgactataacgataataatattatggtaaatagtcatcaacctagctagtgtgtctctgtagcatttgaaacataattcatcacattattaatacaaatcatctacttagttatatataaaagtaattattttgaaaaaaaaataaaagttaacttaatagcttaaattaagcttagcttaatcgtctaaacaatggcaaacaatgtcacagagggaagctctctgataccgtatttctataaatacggagattctgcagtaacaatgtaatgagtaagttgaaaaaaagaacatgacacaaaacatggctaattagtatcctttcgttctagaatacaataactgatgaatatagataaatgcatatttaaattcgtaaataaaagcaagtaaaatagcaggttgtaattaagctaatgtcacgcccagaaattcacgaaccagaatttctaagctgaatgtgtattaaacccctgtccagaaccagccagggtacacaaacgacaattgttgacatacagatccacgtcttacaaaaatataaaagattacaaagcagcggaaaagataaaagcgagctaaaccgggaagcttgacttgagcagcggggcgactccattccacaggcaatccttgacggcagcgacggaaccaacctctctgagacggctccaactgagaagaacttcaactctgttgtgggggaaaagagagcaagactgagtactacccactgtactcagcaagtcataccggaagaggaggtatgatgcaggatataaccaaaggaggctacgaggttcatttgcataaagcaggcatttaaaaccagtagttgaaaacagtaaaaacagttgtagtaattaagtaatattaaccagtcactgtccaacgctacatcacgttgtaacaggcccaaccaaccacctgaactacaccagctcattaagctaaactagggggtgagactaatcacggtgaatctggtcgaccgcccataaccgcgggcacggctattcgaatagttttactctgatcagaggtgtacaactgtacccacaagacacagccccacgacacgttcccgtgcgccgacatgctaccacgacataccggaaagaggccgtgacaggacccttcgcataaccccctctaaccgatcgcaccacaccttagggttcgcccccgcccccagcaggcaacgggcagcccccctttcgtgccgcagtgaattcggaagccgatcaaccggacaccccggccgacccaactctatcacgcccaccctcgcctgggtacgtcggctagagaaaagctacactacaagtccagccgttgcccacgctggcttgtggtaagtacgataaattcttccagggtttcccgtgaaccggtccttaatcgccatgggcacaactagcaaaccatgcacccacagcccaccgtgcagtgtattttaataagccaacaccattacggtgccactaatccaaagctattgccaataatcaaagtctatgctttaatgagattccctttttgtgtactagtagaactaagcatggctaagcatttcctaaaccaacatctaatcattttgatacccaagttatcaatggcataaggtaaacaatgtatggctgagtaataggacccatcccacatgacattgtaaaagagtgcaacatttgatagaaatgcagggtgtttgtaaattgggtacaatatgatcaaatgtaaagcatgacttaccttgctctcgcactgatgagaccacaacaacttcttcgagaaaccgcggatcgacgaaacgaccgaaatctacgcgacaaacaaagcacacaagcaaagcaggctataagactactgaaacaggaaacaaaaccatttttaatggattctatgcatttttatgaatttaatgagacttgaatggacttaatcggagctcggatgaattagatataatttttagaagattatctgtgtttattactataacaaaaagtccttaaataatttatcgcgcaataaatcccagggctggcgtcatctaaggggggggcggctgcgccgacaggtgggccccgcttgtcagcggctcaagagagagagggggcgccggcacgtgggccccactggctgtggcacaatgcgggagggggtg

SEQ ID NO: 35807 - DNA, 1232 bp, Oryza sativa
ggagaagcaggtggctgatagtaaggacttgacagagggcagtgcaaagggtaatatggttggctgtctcccatggttggcacaggggaataaaaactgtacatcacctgaacatttgcatatcaaggagattacattagtaactgacccttcttgtaaaatcatggtagcagaacaagatggtgaaagcattaagaaagaggggaggtgtataataaccatgtacttacaggagatgcagcatcagttccatctgcactggcaacatgcggatattcttcccattgacccagatggttcaagtatcctgtcgaaagaacattcttcattcaaatcaagcagttgtaattcatgaacagggtaatgtgctatcatctcaaaacaatagagcaaacatgttctacagaatcaacaatggggaaccaaatgactacagtttcctgactatagtgccaagacagaaattagtcaatcaatttcctcaaaatgtgtgaagtaaatgtgcaacgtagagcagcacattagcaaatgccccctcagatagaacctgtgcagctaattaaaatctaaatctatttcagtctagaaacaaatgctacagtttttagtatcttcaatgcatgacaatgtgttggtgggtgtaagcatcaagacagagaaacaaaaaaaatgtgctctaacctccagaaaagactgtatgtggctgaggggtatacacattgggctggtagatgaaatgttgttctccacctttacccaaaaagcttcccttctcttgagcacttttggttgattttaaggaacttgcgccgtgcaaagcagtactagataaattatgatcttcactagagagaatctgacataacaccaatcaactgttagtagtaccgaaacatttgcgaagaaaaaaaaaagctacaaggattatgactgtaataacctgctttttcacactcacacttgtagaaggacttttctcaaccacaaggcgtgactctagaggctccatgtgatctattcaagagggacatccatgtataagtctcagcacagtaaattaagccttttatgacaaaatagtaaactaagttgcatccgggcaaattagaaatggaagttaacaaaagggaactattgcgtataggcgcataaactaagtaaccaactttcatgtacaatcgtacagacgaaatgatgaataatgctgctaacatgttaaaacaaacaaagaa

SEQ ID NO: 35808 - DNA, 652 bp, Oryza sativa
tactatagaatgccttttttcgagacggagggggtatattttaagatgaagaaaatatatgagaagcattgaaaaaatatgcaaaataagataaactattagtgcctaattaattaaatattaattattataaattttaaaaagaattaatttaactttttatattttttaaaatacatcagtcagcagtttgagatgcgtactagcgaaaaacgacgttctttttcttctcttcaactctcaaacgcagcccccaccaccgctgacgccatcacgtcgtcagtgataacggcgacggcggaagcgaacaaggcgacaccctttctgtgccccgttttgtcgtctttggaagcgacgccgccgtagagagagaaactagagagagagtgtagtgtgtgagttggtccaggccagcacgcaacaaagcaatcaaatactactacgcgatatgagagagagggatgcgtcgtcgccattagcggggagaggagcgggagaaaactcctccggattattccgagctccatatccattgaaccgaaccaactcttaatgagaaaaagaaagagagatccgagctggtggttcttctcggttctttgattgggggcggcgttgaattggattgaattgatccatcgattgtttcttg

SEQ ID NO: 35809 - DNA, 634 bp, Oryza sativa
agggcgaattcgagctcggtaccctttctatttagaagaacaacaattgttattatattagttctatcattaccatatatggttgagcaaaactaaattttggtttagccaatagcatgtttggctgatgaatgctacttgattgattaaacactcatcactttcctatttctagtacgacaattcatcatctttgcatgctaactatatgaattacccaggtttatatattgagacgtaggaagtatttatttattattactcctctgacttagagtcaggctgatcagaaacacaacgggaagttttcctggttagacgggctccactaatgcattgattacgcacccgcattacaaccatacgtgcaaaggacgatgaaagagttactttggatgtactactttgtaaatttaataatacctatagcacaacactactagaggatttaactttttccactcttcaccacacatccattttacccctctcacatgagtagcaaatcttttaccactccactcctctagagtggtaaaaagtaaatattcgaaacacttggtggtgcacatgatattcagctcttcctctcccctctctaagggatttaacgttttgacactctttatcatat

SEQ ID NO: 35810 - DNA, 1137 bp, Oryza sativa
tgacaaattcataaaatttaaattcaaaaatcattttggccagtttattccagtaccagtcactggcttcagaccggttaccaccggtgcttggaaccttgttaatataaaatggtaggattgtgatatcgacgagcaagcccaaccaattggataaagttatgcaaaatgaactgcagttctctaaaactgctgctttaaggctgtgtagctttactggtagtatatgattgtgaggtttactcatttgttttggtgatttataagtactgtttgtattagcaattatacgtttctataaaaccagcataatttagtgttaacaacagagaaattcgaagtaaaatacagattatgaaaagtaatgcgtctgagagacttaacatagtaaatttgtgtgtttgtaaacagatacaaagaaaacatacaaccatgccaagaggtatataccttgagcactttattttttctcccacgatcccggtttgtaatgatctttataatcttagtaggatttgccatattactcatttgtgaagcagcaggagataccattgggccaactggtgtaagtgcttctaatgaaacatctggtgcttggttcatcaatttaggcttcttggcagcatgctgaccatttatcactgttgacaagtcacaagtgtgaaaaattattcccatgtcctcttaaatagagcaagaactatttattatagatataaattatgcaatctgaagtagagaaagaaaataccaatatttccatttgaatcgaattgatggacctctgatctcttcttcaaataatccttctggtatagaaaggagaaaacatttatcagatattaatgaaacgacaagcttttgctttccaaaagcatgtggtggttggaattttttgagtgggagaaggtttgtacacctcctgttcttttttacttggtatttacgaccaaataacgaccaatgcacatgtttggtaactaatatttttaatcatatattcatcaaaaacattgtcatatataggtatggaagtatttcatgacggttctgcattttcacatataaataggtctgcatacattagaaggttaagatttcgagggcttagctgcacatattttaaaacatagt

SEQ ID NO: 35811 - DNA, 670 bp, Oryza sativa
ccatgatattctcagggtttagaattcacccctaccactaattgagatcattgatgacacaacccacatgcctcttgcagtgtcttatgtggggtctatccaacaatatgttcaccaccatgtgtccacattattaatttggtatctctataccatgatccatgagatatgatcatcaattaatacatgtgctgatcatataaacatatttattccacacatgatatttgatcagggatcctttagaaatagcgacacataacataaagagtctcatgaaataatcacatatttattaaccaataatgagtttatctatttcaaggaacaaagtcggataaatatgtaaacatagtatgtgatacaatcatctttatgattgcctctagggcatatcactaacagtatcccctcgtatacctttttcttccaaattcgatgctaataattatgaaaaattctaaaaaaaattgacaatgtagagtataatgatacctactagtccaccaaaattcatgttcaaattcgatctatacatcgagaaaaaaaaagacaaatttagatataaacaatacgctactattcatacgctgaatttgtcttttttatatctcgacgtgtgagttgagtttggacttaagattttgtgaaattgtatatatgtgatata

SEQ ID NO: 35812 - DNA, 625 bp, Oryza sativa
gtaggagatttttttaaaaaaaaatcgaaacaatgtatgtagacacttatatacccacgtatatattcatccctataaaaataaaagaattattactcataaatatgatcatcagtgctaagtaaaatacataggtgaacaggttccaccccccaaaaaaaataaccagtatctacgctcagttcgtggagatttcaagattttgaaagcaggtgactgcttagatgttgggagtgaatcaacaggctttagaccccacaaataggcttttgtcatcaatttgatcaatttttcgaagtgtcctaaatagttctccaaaaaagaaaagagtcataaattccaaagctaaagtactctgtgacgcaaaatatctccctccatgaactcccacttagtcactactccctccgtccaaaaaaaaaaaggcaaactctggatttccgtgtccaactttgactgtccgttttatatgaaatttttttataatttgtatttttatggttgttagattataaaacatgattaatattttatgcgtgacttgtctttttatttttttcataactttttcaaataagacggacagtgaacgttggacacagaaaccagggtttatctttttttt

SEQ ID NO: 35813 - DNA, 673 bp, Oryza sativa
agaaccatgttaaatcatcatccgatgtaagttacataatatttcaacatatatttctccatcattttctacaatatcctagttcttcttcatttagttaatgttttctatcttctcattagaccatatatcacctaaattatttctagcctttagatgattaatctatagtccaaattttatccctcatttgcttcccacatgaagccacaccacctttcttttacttttaaattatcaatcaatattctactttaattattctaaaccaaatcaattctatggttcatagtcttttccaattatcgatcaaaaatataaattctataagcttaaggcatctcgctatgttacacgttatttctactactatcatactaaactcccgcagcaacgtgcggagtttcatctagttaactaggggatcgagaacgtcatccgacaagtctaaatgaagtttttctcaaaaggacaaaaatcattacaattaataaatattaactaagtagaattttctacagtacattgaagttttgtagaatttgttgtacatcactcaattacaaaacacctcataggtaccggctcatatgtaccaatttatttaaaaccgacaactattacctttttcacctctataggacgaaaaatttggataaaaaccggacatata

SEQ ID NO: 35814 - DNA, 564 bp, Oryza sativa
tctatacactaaattatagagttggtgctaatagttctttagcagatcaagtggactatttacaaaaacaacaaagtgaggtcaggtccaccacagtattggggctgtgcccttcttttggaatcttcatctagtggtacaacatggctacatgggagtccatagagagggagatttttttcgacatgtgtacgtgtatgctcgtccttggagattcaccttacctttgaaatctacactttgaaaaattgattgaactaaaaacaaagacccattcgtggaggtctaaatagttgattcgccctaatattgaaggtcttctaggtcgtcaacttctttcaaaatccataatctcccacaaaacagatagcgcggcacctaatatcttataacaaaacagttaaaccaaggtgaacacttgattactttaagagactaaaagtaggagtcaacactcaacttgcatgacaattacttctgaacaacacatcaactattacgttaaaatagagatgatgataaatcaagggatatagtttcctccaataaaatgtcgaactacat

SEQ ID NO: 35815 - DNA, 608 bp, Oryza sativa
taatctacaacatcgaggggcccagagatatctctccataggaggggcaaatcccatcttgattattcatatcccactacatgtttcatagcatacccgaaaactacttttataactacccaattacggagcagcgtttagcagtccctaagtaagctactacacatgttgggaaccatgataatctcaggtctaaggattcaacactaacactaaatgagatcattgatgacacaacacacatggctcttgcagtgtcttatgttgggtctatccaacaatatgttcaccaacatgtgtccacattattaatttggtatctctataccatgatccatgagatatgatcatcaattaatacatgtgctgatcatataaacatatttattccacacatgatatttgatcagggatcctttagaaatagcgacacataacataaagagtctcatgaaataatcacatatttattaaccaataatgagtttatctatttcaaggaacaaagtcggataaatatgtaaacatagtatgtgatacaatcatctttatgattgcctttagggcatatcactaacagtatcccctcgtatacctttttcttccaa

SEQ ID NO: 35816 - DNA, 613 bp, Oryza sativa
ttgtctgaattccattttctgcttctcatcagggacaagattaaggtacaattctttttaaaaaatctatactgttttcactgtgattcattttgctttctgtcactattttgtcttacctgttgttttatgtattcctttacaaagcaaaagcataacctgtgatttttaggtcgtgaacagaatcagccagcacatagtggaggaacttatagtcgatagttcaccagaagttacaaaaggaataattggactttgtagtgatgcatcaactgggcttttctatgcatacgatgaaaattctatattccaggttagagactatctgattcttgctttgatgtaataattgccttcagagtccaaaattgtgttgctgatgaagctatatatttagatttcatcatctgatgagggtcgtgatatgtggcaagtatacctggacatgaaagaatatgctaccgcactgtcacattgtcgtaactccttccagagggaccaagtctatctagtgcaggtgatgtttatttgcacttcgatcccatgccctacttttttctcctttaataatttcccccctatgataagctggacccttttttgtttgtgatga

SEQ ID NO: 35817 - DNA, 504 bp, Oryza sativa
tatttatgccttcggtttgctattgctgcatatagtatcacaacaaaaatgatgtataatgttgaagagagccttagtttagctaaagaagatggaaatctcttatattctaaggagctttcagctgatactaacgagataattgctccagttataaatagaacttcctttctattttttcttttcctttttcctcccttcctttcttcttctcctgtggttctgtttctgtcgatccaatcaattcctctcggtgtgcatgggcaggagcctagaaaaaccccaatcagatgagcaggccaaacccagcccaacccaagccgccatcctccccactgcccacgcacggccacgccgtttctgcttcgtcttcaatctgacgtttttttctccatgaaagcagcaacgtatcctccaattcccatcacagatctatcatctccctcatcaatcttactgtttaatgccaaaaaatgaaactgggtaccgagctcgaattcgccc

SEQ ID NO: 35818 - DNA, 778 bp, Oryza sativa
gagtagcaactttacaattgacacttcctaattccttaatattctttcataatgaataagtctgaaattaagctccgctcaatcctttaaacattgattccagtgttctgtatgataccacatataaccagcattccacttgcattcattcagaatttcagcaacaccaatatgtgcatgtggagaggatttggccctactagaagcttaccgccttctcttccagttttttactttcaatctgtatgctcacagataccagattctgtgattgcatatttttgaattacaccttgtattctgtttgtagctaacctcatctagatagtgaaggcactctcatggttggctatcctgataactatatgatgacttttcacctttattttttttcttttttcagtatcattttacggacagagtggtaaaatatcatatgctaactgtatattgaaatagaaactccgtcaagcagatgagcggccccttatgtaatatcttaagttttgacattgtttatagtagttgcaaggaggttagccattagcattgatattaagataaagattgaaaatagactaaaaaatgacagtagaactgtttcaatatctagaactatatcaagctaggctataataaaatatgttttacctaatgacaccggtgactgaaaatcctggatccgcccctggtcgagacacgtatgattgttgcatccttcttgtgtacgcatggtgagcacatcacaagaacccaaaggaaccctgggtaccgagct

SEQ ID NO: 35819 - DNA, 548 bp, Oryza sativa
aagcatggcagctcactcctccttccatttaaccttcaccactctaattcaatcatcgtcgctacctcgctcctccttcgtgagcttcattgctgctgcagctcgcctcatgcctagggagggcgacgaggcgatggaaaagcagtggtgcgcctgaggggagtgtcactgtcgacacagctccgtgcataacctcttagactgtggtagtggagacagaggagatctacaagttcgtgccccatcggtcccgtcctctgagattgccacagatccactgtataacaacctgtcctccaaaattaaaccgcactgcctaacccatctgatgagtggccccacttacacagcacaaactaatatggttgaagcgacaaactcttataaactcgttataccctgctaaactagcaacacggtactaaacatgtgcatacagctcttaagttgattctacccttgctaaacgcggtactaaagttgtgctactcgtcattgtatcaacaacaaatcaagaaaaactcttgattcagtaattcagaaaccaa

SEQ ID NO: 35820 - DNA, 2123 bp, Oryza sativa
atggcaaccttcttaaattcaaataaatttaaaaaataatttgaaattttgataaattttacacggtttcatatggtttgccacgattaccgcgtggtaacctcggacccggtggtttaggaaccctgctaagcactggtccggtttttcttacaccacgggttcggttcgatttttacaactagactattgagatgccactggagagaataattctttgcaaatgccaattttgcatatgtagaaggacatgtcacattaccaacatggaggtggcaagaaaatgacccatttgcccttgtttgatcttagtgtacattgagtatgcggataatatacacctacaatacttgagcaactatatacaaacatatatgctagtagatccaatagatttattgtacttcaaaatattttcgttacaaatttatcctctcatatcttgttcacattactaaaatttttgcacgagataagtccataaaataactgaacacatgaaaatctatttatattgtcgagggggcagtccctcggatagaggggagtggagacccctctccgggtgtgaagattcgactagggggttagtaggagagcagtgcgaggtatctgcgatcacggcaattttgcggcgcccatccaccccgtgaggagaagaaggcaagaggttatacaggtttagggcatccggaggtgtaataccctactcatgtgttggtattcgttatcttctctagatcagctaagtacaagagaggctttgcaagctacaaagcggaagtactgacctagcaaaaagcaacccttcatccgtatctagtctccttccttttatagtccaatgaggggctcacattattacaaatctttcctttggtcttgtctcatcaaccttcttcttgttgtcggctggtgtcataatgcagccctcaagaaacccttcaagtcttacggttcatattaccctaggctcctaggcttcgtctgagaatgttgggcgggcctccgccaatgtgctcaccacgtggtgcgtggtgggcctgacgaggcccgaccttcccgaaacagcgccacggttacttctctgcccctttggttgaatcaagtggcacgaggcatgtgcgacgcgtgtcctaggcgccaccgtccaaagtgacttagcgttggcgtcttgtccatgtcctttcaactcagactgcccagggatcccccaataaacctgtttcatttatggtggggcgtgctgccttacagttggctgtggagcacgtccaacttcccggaagtttctaaggtcacaccgtgctgcgcttaaagaaggttcattattccttgatgagcttctcgaaggcgttcttgatgaaagaatatcttgagattgtgcgtcttgtatcttctggcgcccctctaaggccctatttgattcagcttaggattattataatctaacttattaggagtaagctgaaacaaacaaatagattattataatctataagccagattgttataatctaataagctgctctaaaggagcttttttcagattattgagtggctaaagacccactacccctacatacttgagaaaaattacccacctatgccatcaaccaaacagatagctgagggtattatagactttagtctttcaaacccaataatccatgcctccaataatccagacaaacaaacaactcacaactttattttatatcagcttattataatccagcttatagcaatctggtttaataatctagattataataatcataagctgaaacaaacagggcctaagccgagggacgcgagctatacaaggtccaaggtgagcccaaggcctgaggcaaggctaggccaaagcacaccttggatcacgcttttatgcttagcaagcctcatcaccattcttccttgtgcaacgtgtgacttgtacgcgctaaggcaagcccagggcccagagctaggctgggcccgaggcagatcttagctcatcttcttaagatatagctcttgcatgtttctatgcctctcttgccgaggatcatagaacctgcaaggggcccagggccgagcccaaggctaaccttaaactatactcttaaggcacgttgggg

SEQ ID NO: 35821 - DNA, 1899 bp, Oryza sativa
ctccatccatagttccatctcccgcttgccacccacatgaattccctcagcatcgcctgccactccggaggtgcatgcagtcaccatcactctgaggggaacggggttgacacgagtgccagagccagtagcaccaaccctcggcgctgatgacgccggcatcatggcagtggacctcagcaccaaggtagggggcccaaatctggaataagtttttggagggtttattcataaaataagtttttagaaaggcctaaaatgtgtaactggaccaattaccggctagaaaccatcgataaccaattgctaagtggcccaaagaaatgggacattcttgcaattgcatacataaaaatgaacatcatatgtgaatccatgagaaataaacgttatgacaacagcacaagcacaactattaggagtggcacggaaattaaatacacatgttgacatgaagatttatagttataacgagtaaatggccttcatggtgcacgaacttgcgtgttgggtacaagtaggtatcacaacttgcaattgtttgcttcaattcaacaacttgcctagtccgtgcaaacccgggccaaatcagtccacgtaacggaaaatgatatgatgcggaaagtacacacatatcccaaccccagttggccgataggtgaatattgtgtaattaataatgggagaacattatgttgttgtttataggatgttaatttgcagggagcagagatgcagcagctttgtgcaaaaatgaagtagaaggatcagattactgtgatggtctctttatattgtgttggtttcaatctttggagctattttatggtggaattaacatcaagcgatagctttagtaccggttcaatgtccaaactcagtagcatcgaagggaatttttttgttcctgattgctctagtttggtttgctatagtacagaacacaagcacatagttcaatgtctaaactaagtagctacagcacaacttactatataagcaactgatgcgtgtactacagggctacatgtcatcaatgagtgccacctcagatgatttccacctgcatggactgttttggccctggttcgaacagactaaggcaagttgttgcaccagaacgaatgatttgcaagctgttgcaactatttgcacttactacacaagtttatgcacagtgagcgtaatttactctataacaactgaacatgatatttgagtacatcacatattaattcattagagtccatagtacaaataaatcacatacaaccagacatgggtagagactctcatataacacaaataataggagtaggaacattttgcacatatgatggcatgaggatgatgcggaaattgtgacaaattcataaaatttaaattcaaaaatcattttggccagtttattccagtaccagtcactggcttcagaccggttaccaccggtgcttggaaccttgttaatataaaatggtaggattgtgatatcgacgagcaagcccaaccaattggataaagttatgcaaaatgaactgcagttctctaaaactgctgctttaaggctgtgtagctttactggtagtatatgattgtgaggtttactcatttgttttggtgatttataagtactgtttgtattagcaattatacgtttctataaaaccagcataatttagtgttaacaacagagaaattcgaagtaaaatacagattatgaaaagtaatgcgtctgagagacttaacatagtaaatttgtgtgtttgtaaacagatacaaagaaaacattcagccatgccaagaggtatataccttgagcactttattttttctcccacgatcccggtttgtaatgatctttataatcttagtaggatttgccatattactcatttgtga

SEQ ID NO: 35822 - DNA, 548 bp, Oryza sativa
attaataaaattaatcaactccatatatgacttgatatgtggcaaagtggtagcgtagcggcggtcgtaatcaccttagatgccttagacacgacgctttgtcacgcgtgcaaaaggcaaaaagtgcagacgtgcattgtgtagcgggccaaaaaagagaacttcgaacgctttatttataagaaaacaatagatccgatgatttaaataatgggtccaccggttctagtgtaagtataaattagttattatagattttaaatttttaatttaatgggtacataatataatagtgtagactttattttgaaacaatgcattattggagaataatagtccaatgtaataaaaaataaatccagtgatttaaataatgagtccatcagcttaaatgcacgtataaattagttaatatagatcttaaattgtttatttgataggtacacaatataattgtgtaaactttatttttaaatagtgcattattggaaaataatagcacaaagtaatgagtacaccggtttaagtggaaattatcttacattatt

SEQ ID NO: 35823 - DNA, 571 bp, Oryza sativa
catgcagttgtatctgcagaacatgggttgaaattattttaggggaaaggcgaaatggcaaaaattaaaattgtttgcttcattaacatcaaatcaaacatttaatcttaagcagaatgctcaagtggcaagccggtaaattctattgtaatctgaattgctgtacacatggatcattcgcataatgtacagttagttaattagccaccagaatttgattgattatgctgtactctaattttactgccataatgaagagaaaaatgcagttggatttcaattttagctccacgggccaaattcaatcacaacagtggcagtattaacatggctgtttttccagactcacagcatatgcagctaaaccctataaaaaaaatgtccaggcatgaggcgtccagaaccatcaaaagagagagtccacattcaaacttttctcactgctcacaactcaaataatgagctctattaaattgtaacatgcacggcatacacataaatgcaataacagttaatttctgatctgaaggttctggttgccgattcggttatactgtcctaatgtgacaaa

SEQ ID NO: 35824 - DNA, 646 bp, Oryza sativa
gcctgaaaaatttgcaaattgagctcaaacactccgtgtatagttcttcaaattgatttgcgctggcacgtaagatgtttatattccccagcccgcttccgtcgttcatttgacgtattccttgctcccgcctccgacgccaccgtacatcgcacggttgttgatgtaccggatgcatgaatggcttggtcgctctccctctctccatttcaacccaactgcgtgaactaaacttaatttgagcgcgtcagatatcaagctcctacttgatatcgagccggttagcggcaaggcgttggcgtggtggccgcgcgttgaaggtgtacagttagtggtggccactgttttcagaatgcaacggcaacacgagaaggcagattacaggcacaagtccaaccttgttgggccagcaacggcgatgcctacatacactgctttcccattggggcgtttttacgtgaactttctcaaccatgccacctggatacaagaacttctccgaggaattacttgcatgtttcctcgtcgatcggctggatgactacttcgctagaaagaacaagatacatgacaagcgcgtgaaaccaatcctggagttggtaaaaaaaaccaatcctggagttggtaaaaaaaaccaatcctggag

SEQ ID NO: 35825 - DNA, 703 bp, Oryza sativa
ccaacggcaatgaactttgaaaccacctaatgaagtgaaccactgcctccctgatgagttctcagttactctctcagtatatgttatatatacagatgaagctacacacatgttgcatgcaatttaactgcaatgtagttatatatgtgcatgagtaacctatactcccatgtcctgacgtgtagttttctagtacaaagtacagaatcactgcctgcactacgccggaccaggtcatctctgacgggcccaaaccctcacttttgatgggtttggtcttggtcagtgattagtggtcactgatgacaaaatcacctgtgacggatgaaacacccgtcacagataacccatctctgaccggtatataactcatctctgacgggttaaaacttgtcacccgtcacagatgagtcatcagtgacgtggcgtaactacctgaccgtcactgatgactcatctctgacgggttgtaacttacgacccgtcactgatgacaaagcaagaaatacaatttttgaattttaaacgccacaaaaaacctcaaaaaaatatttgaattttactagccatactatacatggttacacatcactacctacaaattcacaatttttcacgcaatataacttggatgctacaagtgagatacgaactccagacctcaacctccatatagagatcccttaccaactcacctactcaa

SEQ ID NO: 35826 - DNA, 864 bp, Oryza sativa
cagtgggaggaggggctctgcctccatcccttgaagcttgcgcggaggtggcggggctgggtcgtgacgacggcgatgacggcgggggcggtgtggagcggagcggcgacacgggcggcaggcgcggcaggcgctaacggcggcggcgaccaggcggtcggccaccacggcgcgcgcgcgtgggaagcaacggtgcgtggcgatttgagcggtggtgacgggaagcggcaacgagagcggagagggagggcgctcggctcggcgcggctcacgcgcacgcgcgcgcggcgcacgggcagagcgagggagagagagagagaaagagaaagatgggccgagagggaatcggcccatcgaacccgggggaggcaaattagacttttgcggaggaattgatttgggaaggatttggattcgggattgaactcggcgatagatcggggatttgagatctgagatggcacggacactagagaacaagcaaagaaacaaatttcgcaattagggtttttaagagataaatttcccgctaggcgccacgacggaacgggcgctacactaggccattgaatgaagagtaccctgagctaaatcttagcaagagggaaatatattaggtacgaataaaggttttatcctaatgaaattatgttgctaggctatcgagaaaaataaattgtatttaactatttaccattagcttccaggtgttgataatccatcaatatatgcatatttccatccaaatagttccttttttaatatcttctgttgtttattgatatcttccactaaattgatgcaagaggaaatactaatagtgattctcataggtaaattaaaaacatcttattacaggggtgc

SEQ ID NO: 35827 - DNA, 641 bp, Oryza sativa
attttaaagaaccatcaggtatgtcatcagtgctctgttcatggaaagccatgtttctgattttcattgagctattcttaaagcaattgaatagctttgatagattaaataaacaattagttatccttgctatttctttttgatgttcaagtgaatgaactcatgttcagttattaatacatatcctcttgagttgaattggcacgatatgaagttgtttctttcaacacttgtgacttattattgtgtgaaaaacagctgcacgagggcaaacgaatagtcgtcatggaagattagttttacattagttcagcgatttaagggaaggccaattttccaccgctgatcttaaaacattggtcaagacaaaaacagtggtgaactggtgatcagaagcagagatttcatgatcaacctgttgatctgtttctgcaactggagattatttttaaaattgaactagatttctcattgtggatgtggttagaagagaggaatagtaaatgggaactcatgaatttaatgcttgtgaagtgtaacttgtgaaattctcaagctactgtatcttcagaaatgcatgagaataagaatgatttaggtagcaatttagaaactatcaatttgctcctctgaaattccca

SEQ ID NO: 35828 - DNA, 703 bp, Oryza sativa
ctgcaccccgattgcatactgcttaccaagccataatggaacttctattcaaacacaaatggtgttcgaaaagacttaactttgcctgacaatttgcttcgtgaagctcatattctctattggacatctcctgccatgggtcataacaaggtaagctcatttcaatgcttaatttagagcagctttcagatatggttttcaagtgtgatgagcttctctgcattcagcaacttaagcatccaaacttcacttaaatgtttataactgataacttagtactgattagaaagtgcatcctatataattgttactgtcttacaactgtaatttctctgcattctttatttttagtgtagactacattccgttaccatcttactgataattatatgcttttgtgtgcaaaatactaggcttgaaagagaaagtgctccgcaaagtcatgatatgctaagatgcctcatctaatcaatatcactattgtgctattatccactggtatgcaggaagcgcatccagaaactaacaaaagagttcctgcaatagttgatgctctcgaaaaactggagcttacttcgaaggtatatataagtaaaataacactgccctttcgtaagttttaaaatgttctatataactgaggccttactgtctgtaccttctaaaatgactgcacatcagttaagaaaacatgttctttcat

SEQ ID NO: 35829 - DNA, 1703 bp, Oryza sativa
tgacacatgctatgctattaaacaacgggccttttgctgcaagtactactattgctgagcttaaaattcaaattaagaaccgggccaaaaataatcacaacataattcaaacaactgtgttagcaatggcccggcatgtgtccccactaaaattatttttcggtgtaaaatttgagtgaaactaacaaaattttcagtcaaaagattgatggataggcactcctttatttctaaggactgaaatctaacgtgtttttctctgcataaaaatggtgtcctttgtgtttatattaccttttatatcttagtattttcaattagtatggagggtagctggttattactccatcagttctaaaatatagctgaactaatctagatagtgaacggagcgagtaatatatagtagacgagtaaactactgctccctccgtttcaggttataaaacgttttgactttggtcaaagtcaaactattttaaatttaactaaaattatagataaatatagtaatatttataatattaaattagtttcatcaaatcaataattgaatatatttttataataaatttgtcttgggttaaaaatattactactttttttccaataaatttaatcaaacttaaagcagtttaacattgactaaagttaaaacgtcttgtaacatgaaacggaggtagtacttatgacctgtgcggctgtgtccagttcacgctaaaattagaagttttgttgaaattagaatgatgtgacggaaaagttggaagtttgtgtgtgtaggaaagttttgatgtgatggaaaagttaaaagtttaaagaaaaagttggaaactaaagtaggcctacgtacaatagggatttggggcagcataatgtttgtgatttctactcgatgctctacagtgcctagctcaagcactactgcacatgcaccatatatatatatatagagggaccgcctattctgcagttgattgcaatttttgcgtttgatcagtcaactttgtgcaccattagatatgtatctaacggtaaagctcaaaaaatcaaaacgtgatgtgcaaaaaagatcacaatctggtgcagatgtttgggcccaaaaactaacaaaaagcccaaagcccaaagttggttaaaacacacttttgggtccaaaaacttacaaaagcccaatgtttgggccccagttttttgtgctgtgttatgggccatcgaaggtatgggcccatgtctttttggattgtagttcagtgagtctggattttcagttttttagctgtgacttgggcttttttcaacaaaacaaataggctctcacatgatacccgttttgggctttttagctccgatttgggttctgtcacaaaaatggtccactccctggttcccttaaaaaaatgtcttgtgctccaagatagaaactcagatcaaaacttagatccaaaagaaaaatgagaggagagatcaaaactcagattggaaaagcaaaaaggagaaagggagataaagaacacgaagaagaagaaagaacgtgtgctcgggggggacaggaagaacctgagaaatttttacttcatggaggttgttctttttgttctctgttcccacctccctccttttcacctcttcctcccatcttttgatttttatttgctttctcttccctttccaccactcccttcctctgaagaacaacgtgt

SEQ ID NO: 35830 - DNA, 638 bp, Oryza sativa
cgatgtcctgataggctgctaagccacatgttaaactgtgacaaaaaaaagaagtagtgccaaattcaaacaataccatttgcatcttgttgctttttgagaattcgtgcaaaggttgaaatcatgtgcaaactgcatatgcaggtataacattattaattcacaaaatttaatgtgttgcacagaaaatttgattactatctcatatgagtaaatgtcaactacaacatcttggtattgcgaaaaattgtgttaactattagcatgattatagttgcacaaaatcataattaaagttgcacgaattaataaccaaagttgcacaacattaaaaaatggcgactgtaggaataggaaggtgcaatttttgcaaataaaagtaacaaactggatagatatgacattatattattcgaccgcccacatttccaagctcaccagcaaaatcaaaaaacttagcagaaggaaatgtactcttcttcgcctgcaacaagctcctcccccgtagatccaacgctccctgaaaacaaaatcgtagtgagctattacatctgagcatacaatcaatctgaagttgtgcttgtttataaccaaaattaggaaaaaaaatcatatagtagtcagctaaaaaagaatta

SEQ ID NO: 35831 - DNA, 675 bp, Oryza sativa
tccgctcacccgagctcggagatcgccaccatggtggggagaaagggtggggttggagagagagagagagagcgcaagaggggtggaaatgattaggtttgtggcatttaagcgagagagagagagagagagaaagagaggggttcgcgtggttcgagtagtgcgagtgcgtgtgtgcgtgtgcgcgacgagggggggcgcagcgcagggggccgtacagtagcgtgagctcccgcacagtgtctgaagagtttttaaaaagttgggaagcgagggggttttgaaaaagccgtattttatgggctcatgtaagcggctgtcgggtcggtgtaaccacggccgtaagagcaagtttaatagtataatagtatagttcactactagctttaattcatctataaccaatttaatagctaattcgtacaataattatttaatatattattaatatatggtctcacatattacatatattgtgtcttgaagttcgtgctgcagctggctacatatctatagcccgcgatcacttatcttattaaaatatgtttatatctggctaatagtctgctattatatatgctctaatggtgacgagacagatccatccaccatcccggcatatgcagctctccatcgcacgcagcgcagactggtgttcccgtggggctgcaggaa

SEQ ID NO: 35832 - DNA, 700 bp, Oryza sativa
atcccatttcataatcaatacagcacaagtacctcaagcatgtgtactatcaacatttatgttaagacaacatttttttagttattgtgatcaatacaaagtacattctgtgtcagaaaacacactaacaataagttcaaccctgcagaaagatgggaattcaaggcatacaaaaagaagcctacaccgagaattatactgtccagtacagtgattgctcattgtgcaattttgtaagacctgcgaactctagtaaatatttcagtacgcctctgaaagtatcatgtattcatatgtcaattgtaacttgatccactgctaactatcctaacatattaaaatttgatattttttatgtgcttatccaattaatgatctcgtaacttcatttctatgcataaccctaattcaatcaagtatctcttgctccatcacaccaactgatttttaagtgaaaaagacgcttacatcacattgtgtgagaatggttgaagtttttctcagaacacttgaaaacgtttttattaggaaggttttaagccatgattacaaagggtgaacttatcgaatggaaaaggggcagagatgattattaggaaattccctttaagaatatcataattcaccgttatgaagaattcaagactgccataagctctacagatttttaagaagttacctcgaaagatgtgcctgaact

SEQ ID NO: 35833 - DNA, 695 bp, Oryza sativa
gttaaccagataataatgttttcttgtatgtccccaattattatcattccttctcacacaaaaattgtgccttttgtatttctgtaattttgtcataaaatgctaccactttgtatattacaaggaaataaccattatcatggtttcttattagtcaatggcatgtttccgagaacaagaaaggattaatcaatactctttctgagaacaggaaaggattaatcaataccaacttctttttgtaattttatagaaattgttggttttccttagcagtggctggtgatgaatttcactgcatcatattttatttgctttcagacaagatatgatggcaattgttccacatgaaatctgctaacacatgcatatttggtatgtacttctatcctgattatatggctttacctgcccttttcaatgccttctacggagtgtcgcctattaaaatcagtaattgacaagccacatggcatgctcatagtttttttgggttaaataacttgaagcatttcagcgtagaagctgggtaaagtatgggacaagtatgtcgctgatcatctccacttaaggcgagaaacatttttcttcatttgtttcaggaattgtaaatgttcttaggtttagaggtgagatccatgtgcatgctatctaactgatgctctctggtttaccaaatttgtggggctgcagga

SEQ ID NO: 35834 - DNA, 675 bp, Oryza sativa
ccttcgccacgtccctctatcttctgctcttgcgatacacgagccgctgccgtcgtcgagcattgcctccctccccaacatcttccggggcgttcgaggtggtaaggtgctcgatccggtgatgatacgatcgacctcaacggggagaagctcggttaactggcgctacgatcgatctagatggcttactcacaaggcaagcctgtcatcacactgtcctagaatcgggtcgccccagtgacgcccttgtctggtgctgcatgcctcctcatcctctccctcacgcgactgcaagatttgaatcactccggtgagtctctggttcgttctcggcttctcaatcctctgccttccttgattttttcccctttttctttgttctttactttgctgatgtgcataggtgaattctttgttctttactttgctgatgtgcataggtgaacgagaaaagcgtccagccaaccacttctcctcgttgactgtctttatcttccctccagccctggcagcaatagagcaagctcatgtcaccatagtcccatgctcttggggaaggagatactagcatcccgcctacggaaattgccatcgccgctgcttcctcaaggtttgcattatttttcacggccgtatttgttgccacatgaaaaaaaatgttagctgatattgttt

SEQ ID NO: 35835 - DNA, 711 bp, Oryza sativa
gctaaagcctagggtgtggtcacctctctatcaacaagtttacctttgttctccatcaatcaactgtgcataaacgagtaaatgagagcggacaacataatttgcactaatttcatgagttctattatatttaaagttgtattaggggaatttgataaagtttagtggaggcagttttgttcaccgagccaaacactaaaacacactcatcgtcatcgtgactaaattttggtaaggtttggttgtggtaactgtggtcaccaacttaaacacgctcatctcgctttgctaccatttggtcgtgtaattagtatccagtagtttagccaaacattcccaacgaaatgaaacagggggccaaatagaagggcttaaaatgggataaaacaaaactttctgtccaaaaatgggaaatgtaaagccacgtgaacatcacaaaaatttggcaaaatgagacaataatgattgccatcgatccaaacaatcaacaattctagaaagcatccaagggtgtttagggtaaaacttatagtatagttctatttatccaaaagatataaaatcaactaaaaaaataaaaaaatcgaatgaaaaaacacacactaaaatcaacaaaaaataacttctaaaattcaaattccgacgatagcctataagccaacaagcacaatttttcattatcacgcttggtttgggcgtactgatgttaca

SEQ ID NO: 35836 - DNA, 636 bp, Oryza sativa
ttccaatcggccgtcaccgcccgtcgagccgttgtctgccacgtcagcttgccgccctgcactagggcagcaggatctatttttataaatttttccgacgatagattatttctgtaaatatttttaaaaaatttaaaaaaagaaaataattcgtatctattaaccccaattatgctaccggacgttggatttttcttggcttccacctggcttgggatgcttaatcgcaacggttttccccttccactaggggggaacctttcattataccggaaattccatctcggtttcaatctggtttatggtccggcatttaaagcgccagaccggtcggctttgaaaaatattaaagatagaactatttggtcttcggcctgggttagaccgaaatttcagaaatattcagaagaatcgcccagatccacattaatttccaattaaaaaaccttcacctggaggaaaattcttaaaaatcccagatcggctttcttcattatcatatacctatccccaaacgggttcggcacctttgttcgcttggggggtaaaaggaggcccatcagatgtgccccccggggtggagccacggaggatcgcggttgggcctggccgttggggggttgaggcctccgggct

SEQ ID NO: 35837 - DNA, 510 bp, Oryza sativa
cccatgtttcagagtgtgaagttttggcagcggaggccaccctgcttttctacgaaaggctgtagcaacctgttgagtagtaaattaacttcttttctggacaatggaagtataacttccagcctctgcaacaactaagaacacatacaaccatgtctatgaacactaggatttgaaccttggtgggtggatccacgactccaccaccacatcaacgggaagcacgcttccctagtaaatttacttagggacaacacattttttagggagatctccaaaaaagtttatgaataattgatactcttttgtttgagaacttaatcttgaataaagaatcatcaactcattcttttttttcctgacctcgtggagtttgttctagtagagatgaaatacgagaatcaattgatcaactttgtttcagttgtaatattattgttgtgtgctggtgaaaggatacaatggatagcccgtgatagcctagcctgactttgttattttcccctttgg

SEQ ID NO: 35838 - DNA, 645 bp, Oryza sativa
ggaaagaaatgtgtccctgcaatcaaagacgacctatatagtttagagtgtggagtgatataaagcaacagtatttattacacatgttacgtgcgcttaccccacgcttaacaaattcaccatctagaccaacagaagcgcgtagcaaatgaatgcacaagatctggaagaggatactaaatcaggtttagcaacatattgtacgacataattccacttatgttacaaaaaggtactttggttgtacctttgggaaatgagtgatagccagctgctttgttgcctgagaagatatcgaacatgtcatttcctccggggtaaatatatgcctgcaactgcaagtgccatagtcgacacaggtgtgtagtttgttaattttttcctgccaaagataacaatacagggtatcatatcaagcttagttaaacaactaagatacatcaaaagataaaactactacctcatcaacttcggatttaagagacaaatatttggcagcaacattgtgccaacaatgatcacaacgatagttgtcaagatgctccaacgccgtaaagtgctcactgcaatccaccaaactacatccattgatctaaatgtcacacgataagagaaacataagggaaacaagcattatgaatagcg

SEQ ID NO: 35839 - DNA, 617 bp, Oryza sativa
atagccgagccctcggttatgggcaagccgagcaatgtacccaagttagtgttttaattcttaaaacttgctcaacaactaaaatgtggaatggttggcctgggttggcttgggacgagctgggacccagggtcgggttgccagttcggtctgaatcatcataggccttgggttaaggcaggttcgtgtgggttcacggccttgattaataacattgtgtaactctaggatcgtccttataaaatggctttgggcaactaagtgacttttaaatgctgtttactgcaaaacttaacccctatattattaccccttgtacccccttgcattaatcatgcatctgccggtgtggcttgctgagtactgtggttgtactcattcttgctcaatctttcccctcttcagtaagagaagcgttggagaagatgtcttaagtggagtcctggcttataccccagttgagcgcctgtgaagatggagccgtaggcccgctagtccgctgctgtttatttttgattgtcaggccttaagtgcctttgtaataatgtaaatattatcgatataataaagatgtgtcttttatatcatgttgtatggtgtaccccggcttttcctgg

SEQ ID NO: 35840 - DNA, 724 bp, Oryza sativa
aaaattcctggtcgataaaattagaaaagagagaagaagaggtatgtaccattagggaagattgtgatattcaaacaaatcaaccttgatttgtgtgagggctattgtttcttaaaatggatagctttatggttcaatgtactccctccgtcccaaaaaaaacggctatgtatctggacatgacgcatgtccaaatacataaccaggagttggcttttttgggacggagggagtaaaattctagtctatgacaattctaataatgatatcattatgattttgcaacatatcaataaatatgggcacaactaaatgaattaagtttcacttttggacccgcggaaggcctacgcccatcgaacaactagataacaagaaaagcttagggagaaacatatatataagttggcttcaatttccacgtgaaacatacatatttccaatttataaataactttcaatacacactgctattcgaaattatcaatagttaatacaattattttgctactaaagtataagacattcccttcgagccaagtaccaacataaaaaatatttgggatgctgctatgtaatccaactagaattaacatgcaaccaagtgagcatacctcaattggttggatttattgtggtggaatctgttcgcctgggtttaaattcttggtacagatgctcacatttacaactaattattttttcagtggtaagcgatataact

SEQ ID NO: 35841 - DNA, 598 bp, Oryza sativa
cacggtgacgattgaccctagcatcctcctatcaaataaagacacccctcactcacatagcgatcacaaggagggaacaatagtgaggagaaagtatgtgcggtcaaccgtcaccgccgatgtattgccgtaattattgtgtacacgatgtaaactattttggatgtattgattatccatataaatcaattgatgtatggcatatgttaattacgcacgattattagaggttttaacaagtttaaatcatgtgtatgctagttatatgcgatacttacaatttttaaaagttttaaatcacgcaggtggcaatttcatatgttaattagagtttttaacatttaatttactatcattctgtagcgcccgttccgttgtggcgcctagcgggaaaactatctcctaaaaaccctatttgcgaaatctgtttctttgcttgctgtctagtgtccgtgccatctcagatctcaaatccacaatctatcgtcgagttcaatcctgaatccaaatccttcccaaatcaatccctccgcaaaagtctattttgcctccctcgggttcgatgggccgaatccctctcggcccatcttccccctcc

SEQ ID NO: 35842 - DNA, 656 bp, Oryza sativa
cccacccagccgagtactagtagggagctgccatccgctgcactagtgaaaaactgcttttccgctgggtgcaaagcaaagcagtcgccattgactagcccctccctgtctgccacttgcaacagctaagcactctcattatctatgtttggatgatgaatctatccatggccattgggtatttgggtgtgtgctgagcctgagcctgggcgtcaacacatgtgctggggcgagggagtagggctggggccaggcatctctgagccgtagctaggggttgggccctgcagccttttgtttgggtcgcagcggtggttgggttcggggacgcggtctcctctgcttggggacgcgaccaccgctgcattccatggttgggtaatgcgccagtccggatttggatgcggcacgcactgtactctacggtggcacgccaccagccacggtgtgtctcccgattaggggtggcaattggagttagaacaaaatggagagtgatatcactcgcttgttttaatatacttttgattaaatttagactgatataagtgtctgaatttagattgaggggtgcatacatgctaaaggaacccccctcctacctagctccatcgtttagtggggaggataagaacatccctgctcacttttccctt

SEQ ID NO: 35843 - DNA, 769 bp, Oryza sativa
cagcgatattttttgagatcactaaaccacaaaaccagaaatgtgtaccccaatactcaatcaaaccgtgcactcaaggtcctatggtagtatatatgggtgatttcgctgacgtggcatcctagtcagcaaaaaaaaattaaaaagtatatggggcccacatgtcagctgcacattttattttcttctccttctcctctctcttctcatcttcagtgaaggaggccagcggtgggcggagcggcggcggtcgagcacagcgacgggtagagcagcggtgggcaagcgcgtcagcggagcggcggggggctacgggcgtgcacgacggctagtagagcagcggggggcgagcgcggcggcggtgaactacatctccaagagggggggtggaggaggccaccggtgccgtgtggtgcacggtcaccccgaccgcaacccgtccttgtcatggtcctccccttcatcgacaagcctcctgaagtcgaggtccatctcgaggagctcccccgtgctcagccaccaccaccgcccgtgcccccgcgagtggctcatgatgctaggagcggcaccaccagcgggagaaggggaagaggcagaggaggagatgatttcttggtcactgattgcctccctcgcatgcaagctaggcgagctcggacgggctcgccggccgcctccccttccctcccaatctgcttcgcccgcggcctgcatccacgctcgcccatcgccggcctccctcattgaagatgagaagagataagagaga

SEQ ID NO: 35844 - DNA, 798 bp, Oryza sativa
gtgaacacgctcacatatgtgtggtacaaatgttcaccaatgtgtagtaggtaatccctccgtcctattttaagtgcaaatataagtttctgtatccaactttgatcgctcattttatttgaaaaaaatttataattagtatttttgttgttatgagatgataaaatatgaatagtactttatacgtgtcttatgttttgaactttttttaaaaaaaatttaaataaaacagataattaaagttggaaacgtaaaataatagcgacactgaaaatgggacggagggagtacgataattatagtttatgtatagtgtactaggttctgaacatgttttctactgctagctgaccgcacgatcgtgtcgctatcttgtcaccggatcagcttttgttgtacaggctagtaccaaaatttgtacaagatgggaagtgagctccattggttaggaatttttggttgaaccagtgaatccatctgcttcaaccgttggagtgctaaacaggccctaagctcgacacgagtattcgagtatttatatttacagttaattatttttttaatagtagatgacgtatccatcaatagcttttcagaaggtgttcatcagttgtatgtgccgtgtgcgtttgcatttatgttgtgttttgtcttggtcaatagtgatggtatttgccgaaggagatactactagtataacacgaataggtactgctagtattgttacactacaaataattgacacatcttgattattatgtaatcgtactcgatcaatgtccatgaataatccaataa

SEQ ID NO: 35845 - DNA, 2034 bp, Oryza sativa
ctccgtcccattttcagtgtcgctattattttacgtttccaactttaattatctgttttatttaaattttttttaaaaaaagttcaaaacataagacacgtataaagtactattcatattttatcatctcataacaacaaaaatactaattataaatttttttcaaataaaatgagcgatcaaagttggatacagaaacttatatttgcacttaaaataggacggagggattacctactacacattggtgaacatttgtaccacacatatgtgagcgtgttcacgagaaagtttgtgtacgccgctgactttggtgtgccaacgtgacagcatccatccccgtacctgaaaccctgttcctggtcagagtcagccgccgattgacggtctctgcaccacgtggacgacgtgcgccgtcgacgtcgtacgcgacacccccctcgacggcgacacggccacccacaaccacctccaccaccgtagtccgtagtcatcatcatgccgtcacatacgcggccacgccgccgtgtggcgcctttcccctcgcggcgagagcggccgggcgcccgggccggcacgtttgctgtgcgcgcgcgggcaccgccacggcgcacccgaaaccgaaagcaacccacgcctcgccacggtttcgtcgataaaattaattctgtttattttccaaacaaaaaatttttcaccccgtcatatcgaatgtttaaacacatatataaataaagtaattagatatgaaaaaaaactgcttcctccgtttcacaatgtaagactttctagcattgctcacatttatatagatactactacctccgtcccataaaaaatgaatttctagctttaaacctttgtcccataaaaattgtatttctactaatgtgggacccaataaactgattgcatttccttgtaatcttctttccttccatcttatttctaacccattgtcatgacattccttttaatcaagtttatatatggaatgtgtgcatgtactgtgttcattaaatagggatattttagtcatttgcctatccgaataatatgtccttaattctctagaaattcatttttatgggacgaaggtagtaatgaatctgtatatgaatgtattatatatatagattcattagcatctatatgaatgtgggcaatactagaaattcttacattgtgaaacgaaggaagtaattacacatattgtgtgtaaattgtgagacaaatcttttaaacctaattgcgccatgatttgataatgtggtactaccgtaaacatttactaacgactgattaattaggcttaataaattcatctcgtagtttccagacggaatctataaattgttttgttattagtctacgtttaatacttcaaatgtgtgtttgtatatccgatgtggtacgccaaaaattttcgtttgcgaactaaacatgcccttaggctatttccccaactttcttttttttgcgcatgcttttcaaactactaaacattgtgttttttttaaaaaaaattctatacaaaagttgctttaaaaatcgtattaatccattttttagaaaaaacaaatacttaattaatcatgtgttaatgagtagctccgatttacgtgcgggaggtattggttcccaacatcaaagaacaaacacgaccttaaatccaaatactatactttcatataaatataagtataatttatatataaattttaatataattctaagcagttagatttacttcaagttttatacaaacggggaagaaaaaaaactaacacgtaaggggatttggtcctccgaacttcacttcgcgaaaggttacatacaaattatgtactccctgtctagatacacggtgcttctaattctctctcatattgctatatttttaaaactaataagaactttataataacattataattatattatagtagtatttttttttaaaattatggatatagagagtcccatagagagtccgacttggttctctctctttttgggcaagtcgcaatcatt

SEQ ID NO: 35846 - DNA, 1600 bp, Oryza sativa
  unsure (1)..(1600): unsure at all n locations
cattgtgcattcgctacacaacgcagcagcagcctaacttcggttcagaggagtttgtccacaagaacaccattttatttttatttttctgtatttgaactcagcagagcaccaaacttatgcagtgacactgaactgcacccccctttttttgtcgtttggaatctttggatgttagtttccatatgtttaagcgtttctgcaaattaaggaaaatttcctggaactattatcaccctagctcccagaattatcttgtcatatctgcttgtgttgcacgagatgttgagagtggatgctgacttgttcttttacctttttttcagttcattcactctgttagtgccacacttcagttatgtcagttaggatttttaccacaattcttatgcctgtttttttacctgagtttgacacgtttgtacaatgtacagtacaggtgactgaagtaaaatttgagctgtacacgttcaacacgttggtacaagggagtaataaaaaactgccgaggaaaactttcatctactatactgtgactgcaatataatttcaccataacttaacaaaattacaaaattatacctaagttatataaatattacaatactctgcattgtacctatagggtaattatattacaattatcctataataattatattataggtacactataactatactatagttaaatttggaagtttggttagcaagttttttaacaattcccttgtacaatgtaaacaaatatgagttgtgacttgtgagtngcacgcacaacagcaagagaagtagccagaaaacaagtacaagcacaaagggccgcagtatgcagacgcagctgcagcagcagcgaagaatattgatagagtaatagtagaattcccatggtcgtacagcttcaaataggcggatttatggnggggcaaagatacatttttcattgagttcgcacaatcaacacagcatgattacacaataaatagtaatctctacacaaaaaccaccctgacctattgcaatggtgttgcaatagttcagcagcactcaccagcacaccacacaaagacatggatggcatctcacctaatacaagtaggcaaggtgaagccatggcacataaagacgagcacaacgtatattattaccgtgaggaggaatatcaacgcaatcctgcacacggagtaatgtgagccatgttagtttctgcagaaggcagatggaaaaggatacaacagcagtcaagtaaacagatctgagaactcattaatataaggacaaatcttcagaaagtgtgagctatgccacatcactgcttgacgcaacaaaaggaaaatgagaaactgacacttgcttgacgcaacaaaaggaaaatgagaaactgacaaactatccagaaccccaaaagtaaaaccagatttcagaaaccagaatgttctccttggctccttatttacacacgataacatggttaccattccaaatcgtatcaatacagttgcttcgatttccaaaccttgcttcttctttagccagaagacttatgcatgaatcttacaaataccaaattacgcagaactactaaacaccaaaataatta

SEQ ID NO: 35847 - DNA, 604 bp, Oryza sativa
caaagagggaagataaaaaggtgctggtgaaaattgtggagattggagaactgtagttgcacttcaaattatttacagaagccaagatcagagtaatgacatgttatggctggtactgcaccaatcaaccccaaaaaggctagatgctgcatgaatgaatctgcaagccccttgattccaaaacgattaatagattgactacctattatttgaatgttcttaacccctaaatcagtcgaatttccgattatcagatgaaaatacaacggattagatttgcccctccaaacacatagactcaaacagtaatcccacctttccccaatccactgagccgccatcgcacacaatccccaattccccatgactcgcactcgcgagacgcttggcgagcgcgtctgcctgtaatgcgccataggtgccagcaccggcaagccagcaagccattccccaccgcagggccactgcccccacgccgctttcttcctcctctccggcatcaccttcttcccctctggtagcctcacgcgacacgagaactcaacggaaaccgtgtgcgggcgaagaccactaccaaaaacccaaaccctagtgccgaggatcg

SEQ ID NO: 35848 - DNA, 681 bp, Oryza sativa
agggaagaaatcatgagacaaatttttttagcctaattagtccatgattagccgtaagtgtcacagtaatctacatatgctaatgacggattaattagtctcaaaagattcgtctcgcggtttccaggcaagttatgaaattagttttttcattcgtatccaaaaactccttccgacttccggtcgtctgatgtgatacccaaaaatttccttttcgcgaactaaacaggccctaaacatcaaatgtgacatgtaagatcaaatttaatcgttgatccaaacaggcacttggggacggagggtgtagtaaaaatctcctgcgatattgctgacacctagtcaaatcagtcaccacttgcgcggagctgaagagccggctcgttcctctccttcccgttcacatttcaaaacctcaaagcccccacaaacttcggaatcgaggtgagcgggagttcggagagatcaacccgagggccgccggccgatggcgatagatcagcccatcaaagcaagttctttcctctccctctctatctgtatctctcgtttctcgattaaacccagtttttttgggggtcatttgcttcgcttattcactgttcatccggttgattagagaccgagggttctttgatttgttccactctctcttgaatcatcgattaatggcggcggatttgg

SEQ ID NO: 35849 - DNA, 538 bp, Oryza sativa
ggtggtgccatttacacgtgtatgatggaaatgggtagaatgagatggagacggcgcctctggagccattggaatggaggatgatagtggacagggtaaagtgttagataatttattgaatatatatatatatatatatatatatatatattatcgataataaactacgacatggagttgataggtcttaggataaaaatatagtcagactcttatcttagtggtaattgcatgatggcagtaggcgagagaacgacttgttggtaggggtaaaaatcggtcgggtacggttcggatcttacccttcccatatcctaacccacattttataatcggaatcgggtcgggcatggatagtgccaaatacagatacaaactcggataatgtcgggcaaaaatacggaacgaatgcttaccaaaatggattagtacactatcgattacggatatttattcagatatcaagtcgaagcaacaaccttatctatcacatactccctccgttttataatataagactttctagcattgcccatat

SEQ ID NO: 35850 - DNA, 697 bp, Oryza sativa
  unsure (1)..(697): unsure at all n locations
agaagcggcggacgagccgagggtgacaccgtacatctcgacgacgacgacgaggaggcggccatgacggccatgcatggtaaattaattaaccagctcggtcttgatcgtggttaattagcaagtcctgttcctccagctgatgattaatttnttttgttcaatttcaacagtgttgaattgcttggtaaatagtagtggtagtgacataagtacgtttcaccactatatggcctgtttggatagcttctgcctgccgaagattcttttagaagccactactgttagacagtccagattttcactcgaattctaagaatccgtagttgtagaatccaaaaaataatctagaaatcccaagctatgttttccagcttctccaggttctcaccagctagcttctcaccggttgtttctcagaattttaagctcccaaaacaggacatagggtcgtttggaagagacgagtgagatcgtgtgggggcaagggccaattggtctccctctgtgccgtacggcccacgcgcacatggttggtgcaccagagcatataagaacgcacctgtgggctgggctggacggtccaggtctctggagccaggctagatttagaaggtacgcgtacagccttgtcatgttgtcccatcgcacacacttgcacaagaaattactccaaaagggcagaggcaatgtacgg

SEQ ID NO: 35851 - DNA, 697 bp, Oryza sativa
cgagctcggtaccctaaaattcttggcaatagaatatcaatcatatgtaatcatctgcccccacaaaaaaaatgcattgtacatgtattcctaattgtacaactatttattctggaacacttgatattaattattcaagccacccgatttaggagcaccatcttacaatgattgaagatacatttgtaatcatatttcctttgtacgtatgaagtgatcacagtgatctaggaatcatgcaatcacaatttcttacaaatatttcacaacataaagaatagtgttagttgcttttacactaataaaattcttataaacagtgacaccccctgagcatctatgtccaactacttctgctaaaacacaaaagtttagtaggctagctattgttttccaacgaatatacaaaatacatgcaaatattctcttaggtaagcagtgaagtacacgcatatatacacaatgacccttaaccacagatcatgaaaaatacaggaactaataaatacatgaaccaatcatgcttatgaacccatcaaggctcaaattaattcaaatcaatcatgcaagttcaaaatattgctgtggtgaacatgcaacgcaatcttttcgaaccctccaggccaattagttagctgccataataacaactggaagagaggcgatatatacctgtcggtgctaaccgggctttgct

SEQ ID NO: 35852 - DNA, 538 bp, Oryza sativa
caggagtggatggccatctgaaaaaatcgttttggtccgtttgtaaaaatgatttttctcatagtgaagcttaatacggctgggatccgccggccagggccccgccgtcgatcgatatcaatcggcgccgggaaaaaaggcgccgacgtacaggggcggacctagggggtgtgccgggttggcaccggcatacccaatttttttggaaaaaaatactaggatgtagtatgaaatcaaatgacataaaaatggaatcctctcagaaaatagaatataacaatgatcacggtttagaaatcaaatcaggggaagaggaaaggaatagatgaagagaaacagtgggggggggggcagctagatatatagattaggacatgggattgattgttctgaattttattgatttttcatgaattatgggccatatttgaatagaattttgaaaaagccgaccaaaatctgtcgaaatttttccatcaaaattaggtgttttctttttaaaaaaatatatggtggagtgatcgctagaatgaacaca

SEQ ID NO: 35853 - DNA, 1107 bp, Oryza sativa
cgacatgtagcttttattaacttgatatcttcttcacacttttgcagttgtgctcaggaccgaagctagtgtgttgccctgaaaagaacctgcatataagatatagatggtgatttgtcaaaaaccatatcatttctattcaaccatagagcccaacatatagcggaagctcctaccaggataagtttactggttttttttttatcaatcccaacaagccaagcaaaattgtgtttataagggtatttttcattggcaatattgtgccattatagccgtgttaaaaattcgcataatttcctttggcacaactaagaaaggtttaaccttacgtcccgacccaagcattcgttgtagatatcctgaaacactaggttcggacctgttttacacttttcgaccgttggacacattttaaatttatcggccattagttataaatatatggtcttatatcatgttactccctcaaatattgaaaatatgttgatttggatacattttaaacttctcgacctttggacacattttgaacttctcgacctttagttataaatatctggtatgtacgagagcaatggttttaatttttaaaacacaccgttttgcacaagttccaaactcccaaacctcctatcaaagtgctccatccggtcttaaaaacaaaggtccggtttcccacacaaaaatgttacaccctttcacatcaaacgtttgaagtattaaatataagctaaaaataactaattgtacagattacgaataatttgtgagacgaatcttttaaacctaattgctccatgatttgacaatgtggtgctacagtaaacatttgctaatgatggattaattaagtttaataaattagtctcgcggtttactgacggatactgcaattagttttattattagtgcccgaacaccccatgcgacaccctatataatacccgatataacacgcaataattttacactcttggatctaaacacccccaaagttattttggatactacattccaagttcaaatataaaactctaatggcaggtacaataatagactataagtcagctacaagcttatgtggtgaagataagagaggagata

SEQ ID NO: 35854 - DNA, 513 bp, Oryza sativa
aaaaactggaccaacatatcttgagattgatgaagttacctaacacattcttccgagaaatattaatcacaatgcaagaataaattccaattccttctaaatcgcaattaccttacaaccataagcatcattactacaaggttttaacaatgtggaactcagctacaagtctatttgtcagtaattttcttccaaagtttatctcactagatactagtgctgctaatacatactccctccgttttaaaatgtttgacaccgttgactttttagcacatgtttgaccgttcgtcttattcaaaaacttttgtaaaatatgtaaaattatatgcctacataaaaatatatttaacaatgaatcaaatgataagaaaagaattaataattacttaaatttttttaataaaacgaatggtcaaacatgtgcttaaaaaatcaacggcgtcaaacatttcgaaacagagggagtaattcataatctgcacaatgcagatagttcgtagatataatgta

SEQ ID NO: 35855 - DNA, 632 bp, Oryza sativa
ttcaaatttgaacttgaaagtttttaaatcttaacttgaaagttttcaaatctcgatttgaaagttttaaaaattttcaaatctggacttgaaagtttttgaatctcgagttgaaagttttcaaatctcaatttgaaagttttcaaaatttcaaatctggactgaaagttttcgaatatcgagttgaaagttttcaaatctcgatttgaaaattttcaaatctggacttgaaagttttcgaatctcgagttaaaagttttcaaatctcaaattgaaagttttcaaaattttcaaatctgtacttgaaagttttcgaatctcgacttgaaagttttcgaatttgagttgaaagttttcaaatctgagttgaaagtttttaaaatttgactttaaaatttaaatcgaaaattttcaaatctaacttaaaatttttttaatctgttagtaaaaaaaatctccataatctttcctaattactattattagtgttaagtatattaattaatagagatagttaagtatattaactaatagtgttaacagaggtagttaataggggaggagtgctcgctagcagcgagcacgcgctagctaggagtccccagctgagagcacacgcagctaccaaaacc

SEQ ID NO: 35856 - DNA, 527 bp, Oryza sativa
gatgtaacacgatgactataggcgaatgtcgagctcggtaccctgagaatctctacaggacagctgaccgcctgtgcacatgctgagagccgactgagtcattattacggggcgggctgcccgaacttattgtggtcgagagctagtactagccctgcggcttcggggaggattgcacgtggggtgagagatctaacgcactgcgggatatgtagaggatgaacatcttctgttgacaggagcttatctgcgatccaggagaagactgcgtcggctaggtggagagtgttcactttatacgaaaaccataccggataaagcgggagcagccttcttagacatgactaaatgtctgtattcatgatgccctctgtgaagaaaggaaacaacatgtgctgaaagggacactgttggccaccctgctgcactgtaccaatggatggtggtggaatgaacactaaacaatctaagtctttagtcataacttggaatgaaagacattatatgtatgtatgttctatgctacc

SEQ ID NO: 35857 - DNA, 603 bp, Oryza sativa
tatagggccaattcgagctcggtacccaaaaaaaaactcaagtgagtaaagaatcagaataatatgtgtacacttgggaagttgaaaataaaattaagagcaaacattaatttcttataagaatcatatactctctaataaacatcacatcaaatttacataatgcctgtcttcactccatgcaaaagacagtttggaagtttggtcgaaccaaatgggtcagagatatgaatcactagcaacaccttcagtacggaagagctctacagcatttggtgtcatcagaaaggagaaagtaaaattgaattcaaagtttcaaacagttgcaatgttttctcaatgaccaatttcaacccaaaactgctccctcagaaaaagattatactagctaaatttttcgttcaaatacacataaccaagagaagcaactcgctctgtaattaacagtcaccacttaaactgaactaatacagacaaaagatgaaaatctggttgttgctaaaaaatgacataataaattgaagtaaagccttatcagcacatacaagtatttgaaacaaaaaaaatgaaatgaagtaaccaaactttaatggataaacagag

SEQ ID NO: 35858 - DNA, 739 bp, Oryza sativa
tatcaggtacacgagatcgccaagtgtgttatccagagatcccttgccacgatgacacctatgttgaaacctatcctactgtccctttacgccgtcttgacaaggcctccgaggaacctaagggaacttcagctggggacgcccaaagccgataaggccttgtcggatcctgtagagacaaaagaccatgtaagatctggtcgtgtaagagttctcgccgtgcgtattaaccaagccgtgtaatcggaaaatgagttttccaacttcacggctgggggctaggatcagtgcttgttcaaccgaggcaggtcaaaggtccaagagccttatcatccgagaacgattctccgacgacaaggctaggggctagggagagtgtatgactctacaaactgactgattggagtcggtaagagagaagacgctcatataacaaaacattagtctgtacattcaattcactagtctgttatattataacatgttaccctttgagcgttcgctcgggggctatttttattaatattcttttttgagtactgattttaggaaaattctattcgacattatcgaaggctccatgtctctatggttctacaccaagatcgactaagacgagtacgataaatgtcgacaaggctccgtcgcagactctacgccagctcgattactcgagaacggttggtggatctcgacaaggaatacggaatgaaaagatggtgtacccgccgagataaaa

SEQ ID NO: 35859 - DNA, 540 bp, Oryza sativa
aggtgctcgacatgagagaacgcgcaccagctgttcgacgaaaggccgagcccgcgatagagcagacaactagagggggcaaatcttctgggggccctttgggcttgagcggataacaagtgttgggctttgaataagagaaggcccggtcggtaatgctaagtacgaatttaaaagccatcaaataaaaaagacatatgaatttcattaagtcacaggcttggggccaccaatgaaatacaagcttttggtttgaccaatagattaaaaaaaagattcaaaaaaaaatggaaaagaaggtaataaaaggaattaagaattgccggggtggtttttaagtgccggcccaaggccaaggggtttaaggaggttggtaacaagggggccaaccctttaacctttaaaacccaagtttttttaactaaatagaatggaaacaaaagaaaatccggaccaggaaaatttttccggaattttggtttggtctggtaaaaatccaccaatggccaaaaaaaaataccataagggccctggggtggg

SEQ ID NO: 35860 - DNA, 640 bp, Oryza sativa
atgttagagcaagctagaaccacatatcaagaatattaaagaagagagaaaaaaacgaactgtagatttgttgccagtggcaatacagacttgaagacgttgtgtgtatatgagaggtgtgaccgggtattaatagattagtatatttttattcgtaactattatataaataggttattagattagttatactccctctgtttcacaatgtaagtcattcgagcatttctcatatttatattgatattaatgaatctagacatatatatctagattcattaacatcaatatgaatgtggaaaatgttagaatgacttacactgtgaaacggaggaagtagatgatttatagatatcatttggctatactattaaacttgctcttacctttaatcttgatttttggccggaacagcacagggacgcttatcgattttattagatttaggaggaataacttaatctcgtctcaaagcaaaatatttgttttatcccataggtaaatatcaaaaggaaatatgggtctaggatttgacatgctacttattagtattacgacatgactatgccccattattttatcacgcaaatatagggttctcaatggctgtatttagttcaccaaaattaaaagtttggtt

SEQ ID NO: 35861 - DNA, 766 bp, Oryza sativa
atatggcaaaggactagagtttatttttaccatcaatccggttaagacaaccactagtgtctattgccttcctaggagaggtgtaagaacttagactgtagtttctatggcatcatgtgtacctagttgttggatgtattcatattgtgttcttctatcatgttccttttagcactgagaatctgcagctaattgtcgatttctaggatcgacaacatattttatagggtgcgctagatcaaagaaagaaatggtgacacaaatgttatactggttcaggccctcgacgtgaggtaataccctagttcagttgtatatggattggatctgtgtccggtatgaagagtggataatgacgcaaggtgcagccatcatccgggttgtcgagagtcatccctcgtctcgggaccccttcccctctatataggatgaggggggagggttacaaggaaagtatctagttgattgcaactagatccctctattccatctataaaagatatgtaggatcctcgggatttatactttatcccgggtttgtctatttccttatttacaaggcagccatatgggcctatgcccttggcccaccgtatgtcgcagggcccgaatgcctctccttgggtacccgggtaccgtgtaacccacagaagccagctgggagagacaagactggctgagtacttgtagacccccgattttggaaattggaaatcttctgtgtttatccgtaccaatccctggatcagtagggtaccgagctcga

SEQ ID NO: 35862 - DNA, 517 bp, Oryza sativa
tcgtcaaggacgaggcactagctgcgcaaccgccgccgcaacaacctacgagtacttgaactacgggacggccggcgacgagggcagcagccacgcctggtacaccggcaacggcggcgacgccgacgcctcgccgccgatgggtttgagcgatcagctccagcagtgccagatcggggccgcgccgccgttcgatgtgaagcctgagctgccggcgacgatggaacacggcggtagcgtgttcgtcgaacagccggagcagaagattctgccggcggcagggtcgtcgtcgtcggcggcggcgcattgccagctggagcttgggtgctcttctaatgcttggaaagttggaacacacgttattaattaattaattaatagtttctcgatttgattgattcggatatgatgaaatgcttgttgcatttcaaattttggcttgttgagttaggagttaattacaaaaataatcactagactagcttataaatagtcaagttttaattaatagtagatg

SEQ ID NO: 35863 - DNA, 652 bp, Oryza sativa
gggatagtgggtccgaccagtcaaccagtcaaacaaaaccgtaaattggtatctgtgggccccacatgtatgtgaggtatttaacggatcgtttgcacacaacgggccagaaattaaatcgacttaggttgttattggttttcttttttcgggaattagttggttaatttgaagggtcgtcggtcgtcctacgactaggcacactctattaattactccattggtccatgagtaccagctaaatctcatcaaatttgtgacaagattttgttggccaccgccgttttgattggtatataggagtatatggctatgagcatgtcgtttttataattaagtaggtcgtcttgtgtcgtaataagcatgaacccaacaatcatctctgtcatttgttgctgttggtcgcacgcttaaactaatacctctagttagggagctagatgccaacgcttaactaactaatcagacaagatatatacactacagtataagcatgacttaatcctccgtgcgtgaagaagtgcacgcacgcaacagttaattaactcgtacacctcctcgctcgcacgcttcttcttcttctttttttcttctttcgaatggctaatggattgtttgcgacaattattcgagggtaggggatcctctagag

SEQ ID NO: 35864 - DNA, 683 bp, Oryza sativa
catcccactgtgcttgtgtttgtcgccaaaaagtttgactgtaaataacaaatttgtaaatagtgcgtattatttatagtcaaatttttttttcggtcgtatactaagttgaatatgaacttgtatgattgtggtgatatatcacatatttatccacttttttaagaaatacaattttcttttgcaaacgtgttaatatttcaaactgaaggcaactctgaatcacttatcattgtggaaataaaacatattgaaccaaacagatgaggtgagctagaattttacaagttaaatcatgtgtatgggaggaatcaggattgtactacctggcaaaagaaccacacattcttactttgccagcttgcagcagaaatccatgtcatctttgatgccatgcaggcaggacagatccagtttcaccttcaccaagccaaccaaacatcatccaccgtgagaaattcccttcgattctctgtattatgaagcagcatatttgacaaacatggaaccctcaggtttagcccagccttgggcgcaggatgttggcaccaggcagagctaggacagagcagatgatctcaattgcttgtgcacagccactttgtcaggtagacatcatcagcagatagctcatatggcaagttttgtgatgagtaccaattgacctgaaattcaacttgaat

SEQ ID NO: 35865 - DNA, 534 bp, Oryza sativa
atgatggtggtctctatttcatggagctcacgcttgatgtccacgccaaggcacattgaaaggtcagtgaggagcttcatgaaggttggcgatgctgccaaatgtaagccagccagcaccacctttgccatggaacagcactagttcttttctgggtgttattttctttcttctttcaatactatattctcttttacatcaggcaaaagtggagctcattgaagcagtgtcagacgcaatgaagatcctgggtattcctggggatacctaaaaatttgtgtaataaaattaatatatataggtatatcacatttgtatatatttacatagatctaatacttcattcccaatcttttttctcaataaatccattttttttactcctagctcacaccactttcaacaatctcaaatgccctaactctatcccactacaacactagggacatgacacttgtaatggttgagtgaatacgccatcttaaaatcctgcttccatgtcacgacgtcggcatcaccatgcgatccagaagt

SEQ ID NO: 35866 - DNA, 692 bp, Oryza sativa
ccctttgaatcaaaggatttatataggaatttcataggattcaaatcctatagaaaattttcctatttggccctttgattcaaaggattgaagctttctaaatcctatgaaattcctatggaatggcacattgcatgtggattttggaggaaatttagcaagagctccaacctcttggaaaatttcctttgagtctatctctctcatctgattcctgcgtttttcctgcgctccaatcaaatgatcattcctgtgtttttcctgtgttttacaatcctctgttttacacttcaattcctgtcagaatcctgtgtttttcctattcctccgttttttctaccctgcgattcaaaggggccctaagtatattgttctgaactaattcctgtagcactattaacctaccgcttattaagtctcactatttataagatgtcttgtgtttgtttctttacgtctcttaaggatgaggtataacttgtataatatatttaataacagtcattgctctttcagtattcatccaaatattgccctctgtctatcttactacattaaatgactattttttttaagttcaaatttattagcatgtcaagcgttgagtacctaataatagtcactggcatgccagattttaacagatgcagctctgctgaagaggcaaaagcaggaaatagaagaacttcgca

SEQ ID NO: 35867 - DNA, 636 bp, Oryza sativa
ggttaaactttgagcagtttgattttaaccaaaatcaaaacaacttataacctgaaatggaggaattatttatctatttagaaccattcaattatgtgcaattctacaggaattcgagacataccactgcatatccttataactgtattttctaattccttttaggaccaaattacccatgttcttcatcccctatgcttagcagtaagctcggtaacagcgtgctttctgtggtgaacattaaaaaacctggatatataaaatttattattaaaagtttaaatgtttgtttaagtttcttttgaactaggttaacaatcgtataataagcctgttaccacggtaatcatcggtaaggaaaatcgtggtatttattaacttgctatatatgcatttgtacggtacgtacagttggataagatttatatttatattcataaaggtcctgttcgatttaactttttggctgattactcgtttggcttacatgagaagagactcaaataacatatgaattattatacttaaatagatttatttgaaattataaaaaaacttctacatgtaaacaaattacatcatttagtaacttatataatgtgtctttgataatctggttgcttagaatataaaaag

SEQ ID NO: 35868 - DNA, 684 bp, Oryza sativa
gtagtgtataccgaaaaaaaaaacattgctattgtttgtgatttggaggacatcagctatgcgttttggttagcgttctggaagtgtcaagctgtatttgaccagtggaaacgccgtgtttgttttagcggcacaaaccagaatcagattgccatcaatgtaccataacatttcataccagaatccgatcagtcttgaaatttttattgttggcagcttcgttgtcccaaaatgcgttgataatccgtaaacagctatagtacacttccaccaatgctttttgtcacagatcaacagtcaattgcattctgatgaagactgtcacatcggaccaaagcaactactatccatgaacatgaattatcaatttgtccgtgaacaatgccagggaataccaaattacgaatccctgtttgactcgaattcaattcacatccatccatgaaccatatggcctgcacgttggcacgtataatctgacaggcacaatcacctactgctacgacacacgaagccattgtagatacacaagcaaacagtttggccccaaaaaaaaccggatcgtctctgtctgcagcagcaagagcaagcgaacaacggggagagtccgaattcgcagcagcaaagatttctgtacccttttctgcaggcgacaaaatcagcaaacccaatcaccggcagatt

SEQ ID NO: 35869 - DNA, 1237 bp, Oryza sativa
tggttgtgagacatgtgaattttggtgggatagtgatggtgaattgagaaataaactccctccttttcaatacctgggcaggggtggtaattgggagggaattcctcctttacttcgcataaacaaatctcagccatccattttcattaataatctaatctccaactaatctctctatcaatttccaccacctctaccaaacaagagactgggatgaaaaatcaaattcccatcttaatctcaccatcaattccttcgtgtaaactcccaatccccttccctcgagttgccaaacaagccgtccaaagctatcgagagatgagcaggagcgaaccacaatgacgcaacacatatatctattcgtgtcacaaactttacatttcataccacttaaaaaagtattaatatgattttttaagcaactttttatagaaagtttttttaaatatatacaatatttagcaattcgggaaacgtgtgtttagaaaataatattcttttttcttctctttgttcaactctcaaaccgcctaaaacttctctctccgtatcacgatcgccagatatatcacacgtcatgcgtggattctacacgtggagagccacgtcagcgctgatgcaagcgcttatgtcgtcgtacgtgctagctcttggcatatatcgatcgtcgtcaattaattatcatatgaattctggctctcgatcgatttagtggcaactactccaaagcgagctagtcaaataatcaagtcaaatctgccctctttgatgatgtaactccggattgtctctctgccattgcttgtcgatttgcaggttaatgaaacaaactattctaatttggctttgttcatgtttttgaacaaacaaagaaagtctgtctttgcttattgctggaagtatcactcgatccgttttcaaatatctatcgttgttgtatattattgtttcaattttgacggtaaattattcttaaatggttagattagactaacaggaattccatgcttacattaggaatccaatacgctgaaaatatgatacccattttacaagacgttttgatctctttatccttcatccttaaacacatatataaatccatgcatgaatttattcaaatcctaaagcgtatttgtaacttgaatcagagaaagtatctttttaggtgtttgcaaatcttttttttttttttaaaaaaagacgagcagttaaagtttaaagaggggatcctcta

SEQ ID NO: 35870 - DNA, 641 bp, Oryza sativa
ttgccttgaattccttctttgaccttttccttgacattgtccaggcagaagattcagtatcttgtttttgttcatcatcactggagtgttcatcagctggtgaccttcggttttttccagacacaaactggtggctcaagcgtctctatacaagtaaagaaatatcatgagtggatcatgcgagttgacatataagctattgaaataacaatcatagagaaaccaatgcaggcaagtacaatagcaaaaatatgaagatgagcgaatagaacaatgtgtaattgactgctgaaacatgtattcaggtaactgtaaacaaaatatgtcatggctgcgcattcatggccaacaaacagttctctggcctctatgtgttttctttctttggctctaatcattacaacgatataagcttttcacattcctccaaggcatgcgatcccattttttcctgttaaatgcagctttctttttccccccttatcccatgtttagcatgattccattttttgtgttttttctgttgtttgaccatgggcccactgcgacaaattttaggtcattgtaggggaatatctctggttcctttttaggaaaaggaagcattttatttctggtagaaagttttagtattttaaaaa

SEQ ID NO: 35871 - DNA, 661 bp, Oryza sativa
attcgctggaatgctaaaacatgccatcccgttccaagcagtggaacaggatgcacccagctctccactgcatgtgacggtgtgagcgaaatgagctctcctccacgggcgctgcgccttcttccccacacgcactctgggataaagcaccgtcagctgctcatcattgtcgtcaacaaggcaaaggaggacaaagagattgagagtcaaaggagttagttgaatggcggccagaaagccaccattggattccttcacagcaccaccgacaaggccaccgcaaaaatctcccccatgacgttcatcgcggtgctttctcggtgccctcccgctccgctttcttttcctcctccgagaagataaacatgagaaggttcaatgcacggagcgaggctacatcgacgagcaagagctcggctggtgcaaaagacgacatctgagaggggatgccatgtcccccaaggtgtaagtgccccacgttggccgcattgaaaagggagcgtggggcgtgggctaccagtagagccaagctaaacaagctagaagcggcaacgacatcaggaccctagaccaagatgtgagggaatagagagtcggggttagagaagacagttagacatgagcaggcgttgaaggacggatctaaatgtatcaaacctag

SEQ ID NO: 35872 - DNA, 984 bp, Oryza sativa
cgacgaagattacgcgaagcacacaagcaaagctacaagcctataaagaagcaataacaatacataaaaataaagcacaggattctttaggttataacaaacattaggagacttgaacggatcgattcggagctcgtatgaccaagatatgatcatccgaagtttaatgctgttacatgaagatttgcggattattataattaggttttgcaactataaaacatgtggaagcgctagcctgaaaaagacagaaaggctgcgctgttgacatgccgaccccacatgtcaacctaaaggaccacggtagaccgagtacacagagacggtccacgggtcgacggaagcggaccccgtgtgtcaaccgaggcgagtggccgacaaacggactccactagacaccacacggcctgcacacgtggaaaccacgcggctaccgagcgggcacactaacacggacactacctggtcaccacccgcacatgtgaacgactaccgacaccggtacacgggtaccggggtcgacaaccgcacaacgggtacggggcgacactgaaaggacgaggacgaggcagcgagaggagagatccttaccaccacgcgacgaggcgtgggaaagacaacgacgaacgggcgcggcggaaacggacggcgagggaacgacttcggcgaagatccttggacgaaggcgagacgcggccggcgcaacgattggcgacacggaggcgaggacgaagacgacgacggggctgcagcggcacacttgacggacgcggacgacggacaagaacggcttgacggagggacgaacgccacaacgaccgggaacgacgagaggacgacgacgacgacgaccgggaccggcgaggaggcgacgagggcagccggcagcggctgcacggagacgaggacggcgcggaccacgccgctgcgatgccgacgacgaaggcggcgccgcgagacgacgagccggcgagaatgaacggt

SEQ ID NO: 35873 - DNA, 644 bp, Oryza sativa
aaattggggcaatttaagagaattcaatggggattaaaaccccccaattaatttgaaaacagcgggcttgaatggggcagatttgaagtagaaacggcgctaggtttgcacgggagaaagaaaagaccggttgggggagaaagacgggtccgacaggcgggacccgcctgccaggcgcggtcaacgcgcgtgggcgcgcgcgtaacaggcgcgtgcgcacgcggaagaagggcggctcgggcaggggcacggcgtgggccgggcggccggcccagaagaagagaaggggaggggtggcccgggaagagcggaagaagaagggagtgggccggggaagaagggaggctttgggccagacttggcccaaaggagggagagggattatttttaggtttttctttttaataaactttgataattgtttttgttgtttaataaatatttccggtgctctaaaaattcaagtaaaatttgagggctccttttagaccaaggagaatttaacaaaaattctccaggccacattcgaatttttcttgtacgtattatagtgtttgccaatttcttttcaaattttaattaattctattattccttttagagaatgatttttaattcgggatgaatttatcaggacgtgacaa

SEQ ID NO: 35874 - DNA, 592 bp, Oryza sativa
tgaatatttaaaagaaaagttatatggtcatagtttcttagatataagccaattacttcgaaaagctctagctaaagaaagccgcgttagagaagccaaaatcgcatagaatgtcaggtctgatcaccctcatgttaatatagttgatcaacaaaaatcttcggatgatgagacaattgttgtatccacaaccaaatgggcttggaactccaaatctaaaccattcgtttggtcctctcttaagtcggtggtcgcaagaattggcaagaggaggtaaagttcacattttatatggccaaatgcgataggattttttactacttattagaaaagaatcaaattaaattgtcacaaggccgtgtcataccaacacttgaggaattgaagcggtgagtatattgtatgtggcgcaactcttattctcatgccacaaatcattgcaatgtattccgtagacaaattcaattggcccttgatgaaggatgattgacttttacaaaaatgcaagtggatgagctaccttttcctatacgcaccattggattgcttaaggacaagaacacattgaagactttaaaacttagggggggca

SEQ ID NO: 35875 - DNA, 597 bp, Oryza sativa
ctagtttttttagataatggaatatagtagttgtgtggtgagacttgtacatgtctagtacgttgtgtagtgtagcttttcctaactatttatgcagtctgtttgacaacaataaatacaatatgttcatcgttcatttagactctttcgtagggctgcctagattgtattctgatgtcctgttgaatgaaccagatatacagtgtattgaagttcagatgttgtggcgtgaaagtgcatcagttatcaactatgaactgtttaagggttacgtacaaagaggaggagaaacaaatgagtttgttgcaggttatctttctatctcaatgtgaccattttgtggtcaatttgcaaccagaatgagtttgtgtaacagtggttttttttcacattttgaatttgaataccttccaacagactgcttttgaatgccacacatagtacagataattccatggccccatctccaaataattgcttcaaaacataacaaatgtagtttttcgtataaatggtggtggttatttgcaatgatgtgtgctgtatagtttaattgttctctgcaggttatgacttcttgaacacgacaggatatga

SEQ ID NO: 35876 - DNA, 985 bp, Oryza sativa
acggaaaaagagagagagaaagggggagggaagagaggggtagaataggaaagagaggaagatgagagaaacgggcttttttgggttgtgatactcattgggctacccatatatgacctgcatggtagaggtgagtacctctagagtccttcagttagtaggggcaccctaggagtggctcacatttgtgatgcccttaggggaagggccgcacggaaggcatatgtcaccggtgagcttgggaaagtgatgtaaggaggcttgtcggtccccactgcctccactctggtaagagccatcactggcaagatccatcgatcgatgcagcatcttttggagagagaaaaaacaggagacagataaagaagatacacgtgaaattacctaactatccttcttcttcagtacctctctatcttatataaaatcatatagacagtactactaggtacaactccttctcacccgttaggtcaaatgaaattgatggctcagattacacgtaccgggaaaggtacctgctggacagtaaaaattctcttaggattatgcagtgaaggacaaagagacggtttaggattgcacgtaaaacgagaaagctattaacacatgattggttaagttttaattgttttaaaattaaaaatggatttatctaatatcttgaaacaatttctacataaaagttttcacatgaaatgtacctttctagccatttggaaaaagtgctaacgaaaatcgaggtaaaatatgtatctcgatcagaaattgcttgtctgatttactattggactttatgtaacacccagaaaaattgaccaacaaaatcaaaactctaaaaatacggaccttcaaaaactttttaaataaactgcatcataccggatttattcgcctattttatttagattttattgcggagttcaattaatcgagagtaagaataattaattaggaataaaccactagaaaagaaattgacaag

SEQ ID NO: 35877 - DNA, 1683 bp, Oryza sativa
atgaatggttaaatgttagtcaaaaagtcagcggcgttatacattaagatacggagggagtaacatttttaacccgagatagatttgttctgctgatagattcaattatcactatgatggaactaatttagtattataaatattactccctccgtttcgtaatgtaagtcactatagcattgtctatattcatatacatgttaatgaatctagatttatatatgtgtctagatttattaacatatatatgagtgtgagcaatgctagaatgacttacattatgaagaaacggaggaagtactatatttgtctataaatttagttaaacttgaaacagtttgaatttgaccaaagtcaaaatgtgttataacttgaaatggagggagtactccacagaataattcatcacgaccctaatatgaaaattccgtcctgtagaaagagtttttttttccgaatagttcaatgatttcttttataattacaaggatacaaataaattaattagatattataaagtcaaaagatagatttaaatagtttttcaaagaaattattgttagaatgtcatttttttccgaaaatcacaccgttaagcttgatcgggaagcaaggatgtttatgcccctattccttgggggaagaaaaagcctattagccgtctttttttctttcgggaacacacaaaaatcttacacgttgaaaagtgtgtgtctatatatatgaaaagtacttcgtatataccaccatcggtaatacgtcgagacggttacgaagacaagaggggaatagtgcctgttgggaggagcttctagctgctgtagcttcttccagaattagaagttccctcaaacagtccaactttagtccagatttctaagaagttgtagttgtagaatataggaaatgaattagaagacagaagctgagaaattcaacttttttaaattcttagaagctggctaccaatcagctgtttctcagaatcataagctacgctaaacaggccctatgtgtcacgcaatcgctagaaaaactcaatgcgcctctcccctctctaaagtctaaactcagttccgacggtcatcgggtcgtcatgcacgaacgacggtgcatcaaaacgatacagacggcaagatatcgaattaatgttaacatggatcgatatgtcgattctctaaacgtaccgggaacgacgatcgaccacgtacggcggcgcgcggagatcgacgagacgtacgttgctcgaaccggcgcagatcatgcatgaacttgcacttggtaaatcaacgggtcggccgggaagaatggcggatatatatgcactgcaagttcttcagcatcacaccatcgcaacgacgcgacttccccccacgcgcaatcgcgtgcgcagcgagagccattcaacgagattttttttgtggtagccgtacgtatgccatgcacatggattcgatgatatgctcgcggctcgcccctttgttgtcaaagttccgagggaaaaactctgacgctacgcgcaaccgagggcctagaaaaaaactttttgggcgtagtcatgctgagtaagcatgaaagagtaagcgtgagctgaccgtgagtaccggtactactatatcttctgtcgctttctcgaataggaaattagaaggaaacaattataagggattgattaggattagg

SEQ ID NO: 35878 - DNA, 532 bp, Oryza sativa
gaccctagaggatccccaatacgtagaaagaaagctgcagggcgactgaaaggatcttctgtggaggtatgaaacttgtcttgatcacatatttgcatcgactgccacattctcactctggtatcctgttcagagacagttggagggtgaaactcatattcagcagcagcttaataaggctttggaggataacctgaatgcaaatgaagtaacaaatcaagaactgttgccactaacacctccaggctttgaatcaattgtcaatggaaaacgtatgttctgggaactctatctttgctgtaaatgttcacttattttgttgcattcaatgtagcagttttctaatgatgttttttttggcaggttctcgtgattggaacactgatggtttctctgaagttaacttaaattctagtctgttcgatgaagagctgactgctacaatcagtagcatttgtcaagataatcataatagagatgcagaatctgacaatgtggctaccgaagtagctgaaatcagccatcttatgga

SEQ ID NO: 35879 - DNA, 1995 bp, Oryza sativa
cgtcccgatccgatggaaagacctccacacatcaaacggagcgatagattaacacataattaattaaattttagcaatagaaaatttagaatttggattaatatgatttttaaagcaacttttctacataaactttttgtaaaacacgcaccgtttaacagtttgaaaattgtgcgcgtggaaaatgaagaagatgagttaggaacttagataaaagaacataacctagggaagtcaagtgaagggaactcaaccaaatcactgatctcctctcccgaccaattcccttcttctgttgtactcccctcgtggccctgtatacgcgactggtaagcctggatcgttgcggcgcgcctcctcggttgttggctctgggcatagccgcaaggacgcattgtagcggataggaggcgatcactggtactcaccgatccagcagtagttggagtactgactttcgagtcaccgcgatcggcaaacagaatgcgcactcccgaacagcgacagagagctaagctctcgcggggcaaggggaccgttctatcgttgtcggagcagatcaacgaatcgtggcagtgcggtctcatcggctctgtgacttgtgcacgccgatcgcgctatgcatgtgggtcctagcttttgggggggtaaaaaacgactctacaacgatgcaccaccgcggggcgctgtgtcggtggcacgcacgcatcggtcggacgacgggagtggtttcgcgaacgaggccacggagctctccacgacccaactgcgccggtgtaccgtatcggtgcacgtctgacggtgaaacccgggcggaggagtggaagtctgaagcctgcacgtactgaaagcgatatcatacgcagtggaaagatgggatatgtcggtcagtccagccatttaatcgcgtagtacaaaccttaatccggagaacttttataatgtgcacgatcccaaactgacagtacaactggtgtggttaccctttccagtagtaccatttaaaatttccgctaatttcaactgctttctcaattcaattttctttatagaaaaaagggttaccaaaagttcattggtcatattaacatcaaaatttggtatgattcagttaagaaaaaaaaaaccgtttgatagataaaagtttattagataaggttgagttcaaggaggaattgtgagaccacggcaaaaaacagttttgtaatttcttagtatatacttcttccgtttcacaatgtaaatcattctagcatttcccacattcatatcgatgttaatgaatctagacatatatagaatgacttacattgtgaaacggagggtgtatctcttaaatttgtaggattagttatttttcttttttttaaggaaactagtatggtggcccgcgcagattgcgcggctagcatcattatattttctctcatatgatagcatttatgttttctcattatattattcaaatatattaaaatgacaacataattttaaattttgcaataactttacaaaactattaatgtgtaatattcatattatattttatatacgtgttagttattaattatttttaatatcaaattttagttatttgtaaattatatatatttctatatagactctagactcgtcttttaatatttcttttttttaattccgaattttctataaattgtatttctatatagactctatgctcttcttctaatattatttatttttatttctgaattttcatattatattttatatacgtgttagttattaattatttttaatatcaaatgtttagttatttgtaaattatatatattcctatatgaactctagactcatcttttaatatttttttaatttcgaatgttctgtaaattgtatttctatataaactctatgctcttcttctaatattatttatttttatttctgaaattttattatttctaaacggatttctatgtggactctaaactcatctttcaatattcttta

SEQ ID NO: 35880 - DNA, 599 bp, Oryza sativa
cctcctgttgttgtcgctgatggcccgcccttatgtcgtgtgtctgcttgattcttgcagggcatgaacgctgtcgagcgcttcaagactgggttcgagaatttcaggaatactatatacgagtatttttctgatgccctgagagttcgtcggtgtgtttaatacgattttgtgctaaatcgaatctatttgtttttgtcggttttcagcaagaggccggagctgtttgagcggctcaagactggccagtcaccaaaggtatagtgctgccatcagattaatagttttatacatagattatgaaacctataatttgttctttccagcacacatagaatgcgccggcataatttgctgtctctactaagaattatgccatttggagggtgcatacctcacattacgctcttttggtttgtttgtggactgaagtcaaactcgactaaggaattctgatgggaacagctcattaccattgtgaccattgagcaatatatattgataaaaaaaatagttgacaaaattttcatcttcagtacaaagtactagtggaatttcttcaaaattctacattagaggaactaacatgaacaaaagca

SEQ ID NO: 35881 - DNA, 503 bp, Oryza sativa
  unsure (1)..(503): unsure at all n locations
cgcgccaaggcccgtgtccgggaggacgtcgncgacgatccggcgcacaagcatgncagcgcccacgacgnagnagcccgccgtgatggcgttcttgtaccgttccagagcttcgctgttcggagacgccatggctgtcctcgctgcagctgcagtgggaggctctgattaaggttttcgatctaatcaagtgtttgagtggtttcagtaacagagattagcattcagcaggtgaggagagcttttggagtggttgccgaaagggaataccttattataaacattgtaaaggtcggtttaattggttggtgtttgatcactctgtcatgtaattaaccaccgtatactaatgtttgttgtgtaggttgtgattaatgtttgcttaggaaggagattagtgggtgctgactagctaacagttcggtctaccgtgtaaagcacttcagtcagtcaacaggtcccacccgggaccgcgcgtggtgagcccggtcgtgactgggaaa

SEQ ID NO: 35882 - DNA, 530 bp, Oryza sativa
atcttatatatgtgtgtaacaactaacattctatcccttatgctctttcaaggaggtaataatttttttatatcttaaattctcttatatagtgtgtattggaaaacatatagattaataattaaaacttacagtgtaattatattgtaagtttttaaatttatagtgtaattaaaatgaaaatatagatatattacagtataatactgatttgactacattttagtgaaaattaatgtatcataaatatatctagtgtcttatatttttaaacgaaattgtgatgtcagatcagacaagtcaatgggccgtggtttgtacccaagaggctcactatttcggaacgggaaactttcaggggaacaaatatttagaaatttccattgaactttagaaattttgatcatttttttagtaatgaaattcattccagccttttcttcaaagaaactatagataatttttacataaagttgtgggacgaatgactactattgctaaacctcaagctatggttagcgagaatttac

SEQ ID NO: 35883 - DNA, 607 bp, Oryza sativa
ttctttttttttctgcttttaatattgaatattgatttcacaccatcccctcccatatccaaatcatcacatattacagaacatctccaaatcctcaaacaaatcatctccaaatacattacaaactcttaaaaaaattccatcacagggttctaaaaattcatcacagattcacatctcacgcaaaaatacatcacagattcacatctcaaaaaaaaaagaaaaaaaatccggccggcggccactgccgcctcccctcctcccctccgcgccggccggccagcgccgcgccggttgccgccgagcggccgcccaccgcagccgccgcctccgcgcagcctcccgcgccgccgtgccggccgcccaccgccgccgccgcgcggtcccccgcgctgccgcgccggccgccatgcaggccgcctgcgcgccgtcccctgcgtcgccgcctccgcgccggccgcctgcactgtggtgaaggaaaaaaggaaggagaggaggggagttagagataaggaaagagataagaagttagagaggaaaaaaagagatagagggaggagtttgttgtgtggacgggaaaagaggatcggtactatggattatatag

SEQ ID NO: 35884 - DNA, 507 bp, Oryza sativa
cggaattgaactcgacgatagatcggggattgagatcttgagatggcacggactctagtcaacaagcaaagaaacaaatttcgcaattagggtttttaagagataattttcccgctaggtgccacgacgtaacgggcgctatagatatattttatatttatctatcttgttgtttttttttaaaaaaaatctttttagttacattttggatgacatgtacaaatcactagggaagacaatagttcacctcagttatattactttcctgtcccgaaatataaaatctaggagttgatcagacataacctattacaataaggatatcttgatatattgtacaaggttatgtccaatatatcttttcttaagtcactactcctttcgtcccaatatactgcaatctaggatatgatgggattatattcatatatccatattcgtagtccacctatcctaggttgctacatattggaacgaagactgtatattttaggacaagaagagtat

SEQ ID NO: 35885 - DNA, 662 bp, Oryza sativa
ctacttgaaagagaagataaggaaatgttgaagcatatttacatctggagagagagcaattacactcggggaaaacaactggctgtgtttagtttcatgtcaaaattagaagtttgactaaaattgaaagtttgaagaaaaaagttggaagtttatatgtgtagaaaagttttgatgtgataaaaaagttaaaagtttaaagaaaaagttgggaactaaagcagacctgaaaattgagccaaagatgtcggtatataattgaatgacagttactttaagtgggttctttgaaaagagcaaaaatagaaaaaaaaataaaataaaagtacatgcctgttgaatcttagagcaaatacaatagcaaactataagcaagctataaccacgtatcgagaagaaaagagaagagggagaagaaagcaggctacagatttgtagccgactgcaacacggactccaagacgttatgtgtgtatgagaggtaggacctggtattaatggtgtagtatatttttatacgtaactattgaatgaatgggctattagattagctacagatgatttgttacgggccctgttgggacagattcagcttcagcttcaacccttctagagctggagctcaagcaaacaggttcagcttcaccaaactgggagtagag

SEQ ID NO: 35886 - DNA, 596 bp, Oryza sativa
cgcacaccgttgtaacaaatcacctacatattatggaaaccctctattaaaggaattcgtttcatttttttatgcacaaaaaatgtttcactatatatggatcaaatgttacaatgaattggaatattcttttgcaacaaatcacccacgtattatggaaaccccctattaagggaatccgtttcattttctgttccattaaaaatgtttcacttagtgtactcgtaatgtttcactatatatggatcaaatgttgcagtgaattgaaatatcatttcgctatttgctaaaatattgtttttacgcagggtgaaacaaccccattttttgagaaaccgttgtttcatatattttagtaaaatgtttcatgaggtgatttggttttgtttcagtttttttttaaaaaaaatgaaacatttgcgatctacttagcgaaacaattctgatttacttgatttaacatgcaacatttaaaaataattcaataataagctaaatatttttttatcggattatatccatgtatggtactgttttaaagatttaattggaacggatttaatggtgtcatccgaccatgatttgaataaataatt

SEQ ID NO: 35887 - DNA, 607 bp, Oryza sativa
ccgactgaaagtggccagtattttttttcaaaatacccagattgcccccgtgtcccaaactcggtcgccaaacaccactcggaggactgcatcatgtagatcgccgccgggaagtccgcaccaacgtgctcttctttggctgccaggacacccacaggacaggaggcaccaccacggcatcaccgccgccgtttcgccgcagtagtcgggacacgggcgaacttacacacaacaaccgccgaacgccgctttcctccctccctccctctctcctcgtaaaaatacttgctccaaacgccatccatccatccatccacccacccacacacagccgcaatcgccacctcattctccgcacgcaaagccgtcacgtcccgccacatcggcatttcggtgaacacctcacgcgcgcgctcctggtgtcggtcgtctgcctcgcggcgggctgcaacgtcgtgacacgctcctcctcccatggccggtgccagcggcgacggccggcgagcaactgggactggtcggactatgacgccgcattcactgaggaggccgacggggcgatcgccgcgctgcaggacacggacggagacgggctcgccaccaagca

SEQ ID NO: 35888 - DNA, 519 bp, Oryza sativa
agtagcgaagacgaagactgtaaagggcgaaaagataaagaatatggtgcatcgaatagatgcacctaattaggtgtagcccccaactatgtgattagttaacaaactaaacatatagttgaaagacaaaataataacacaatcgtgcattatatgacaaaagcgtacgcggcgcctaaataggcatgctagctgactgctttttagccacaataaaagaaatctgagtggtttacactctaaaaggttcacgaatgaacacactcgacaggcattcgaatataaaaactccaaagattacccatcaagtattataaagattatggtaataaataagtcgaatagcctaggccatgactatttaccataaaaacaggcatataagacgccaaggaaatgactataataaaaacaagtcattcctagttaatcccaaacagcttttgtagcctaaaaaagctcgcaaaaacagcataacgcctttctgtcgggcacctttttaatttgcattgcaatatt

SEQ ID NO: 35889 - DNA, 711 bp, Oryza sativa
tcctgcagcccaaccgggactaaagatgggagcatctttagtcccggttggtaacaccaaccgggactaaagatattttttctttttttttctgcttttaatattgaatattgatttcacaccatcccctcccatatccaaatcatcacatattacagaacatctccaaatcctcaaacaaatcatctccaaatacattacaaactcttaaaaaaattccatcacagggttctaaaaaattcatcacagattcacatctcacgcaaaaatacatcacagattcacatctcaaaaaaaaaagaaaaaaaatccggccggcggccactgccgcctcccctcctcccctccgcgccggccggccagcgccgcgccggttgccgccgagcggccgcccaccgcagccgccgcctccgcgcagcctcccgcgccgccgtgccggccgcccaccgccgccgccgcgcggccccccgcgctgccgcgccggccgccatgcaggccgcctccgcgccgtcccctgcgtcgccgcctccgcgccggccgcctgcactgtggtgaaggaaaaaaggaaggagaggaggggagttagagataaggaaagagataagaagttagagaggaaaaaaagagatagagggaggagtttgttgtgtggacgggaaaagaggatcggtactatggattatatagtgtgttttgatctttagtcccggt

SEQ ID NO: 35890 - DNA, 681 bp, Oryza sativa
attcctgcagccccgcgcatatcaccgtaacttgcttgaagaacttgttcatcagcaggcagtggcatgatattaatcacaacctacacaacaaacattagtatacggtggttaattacatgacagagtgatcaaacaccaaccaattaaaccgacctttacaatgtttataataaggtattccctttcggcaaccactccaaaagctctcctcacctgctgaatgctaatctctgttactgaaaccactcaaacacttgattagatcgaaaaccttaatcagagcctcccactgcagctgcagcgaggacagccatggcgtctccgaacagcgaagctctggaacggtacaagaacgccatcacggcggcctcctccgtcgtgggcgctgccatgctgctgcgccggatcgtcgccgacgtcctcccggacacggccctgggcgcgctgctcctcctgccgccaccctcgtcccgccgccactgcgtggtcatcgaggagttcgacggcgccttctacaaccgcgtcttcctcgcggccaaggcgtacgtctccaccctcctcgccgcggcgcccgtgccgctgatgaaagcgagcctgccgcgcggcgccggcgcggagcaaatcacgctcgccatgcgccccggcacggcggtcgtggacgtgttcgacggggcggag

SEQ ID NO: 35891 - DNA, 564 bp, Oryza sativa
cgggactaaagatcaaaacacactatataatccatagtaccgatcctcttttcccgtccacacaacaaactcctccctctatctctttttttcctctctaacttcttatctctttccttatctctaactcccctcctctccttccttttttccttcaccacagtcaggcggccggcgcggaggcggcgacgcaggggccggcgcggaggcggcctgcatggcggccggcgcggcagcgcggggggccgcgcggcggcggcggtgggcggcttggcacggcggcgcgggaggctgtgcggagacggcggatgcggtgggcggccgctcgtcggcaaccggcgcggcgctggccggccggcgcggaggggaggaggggaggcggcagtggccgccggccggattttttttcttttttttttgagatgtgaatctgtgatgtattttagcgtgagatgtgaatctgtgatgaattttttagaaccctgtgatggaatttttttaagagtttgtaatgtatttggagatgatttgtttgaggatttggagatgttctgtaatatgtga

SEQ ID NO: 35892 - DNA, 514 bp, Oryza sativa
ttccttgattccaccacagcagctgtgaccaatcacaatgatacattcaacctgccaaatggatgtctgtcaacatgtgcctttcatggagaataataagatccttgttaactgttgaaggggcgaatgtgtgagttcaccaaatttattctagagtggaattcttccatatccatttgggcactttaaatgagaataaatacagctaacggagttcagctatagtgctctacagaactccgaattacagctataatctgaaagctaactcgtccatgctagaatcatttaacacatgatgaatgttacagactctattattcataatatggaagtaagtggactgtatgatggttgtcgcacaaatatctagcactgctatgtgtatgcacattctttctaaaactttcaaagaacatacagtttcgaaatgcaaaacagaagttcactccctaaatcataccaggggtacttgatttgtgtatacattgccccgacaaaacctaatggtaaa

SEQ ID NO: 35893 - DNA, 623 bp, Oryza sativa
caaaatatgtgacttgtagaattttccaaagctataccgaaaagcccccctgttggtatttcttaacgatattactagaaatataattcccagcaatggcgcagaaatactcctggtatattatggttacggagtttatccacaagtacacggatataccattgtagcatttaacccgagagtattccaagagtatcatatttgtttaatcccgtgggaagattataatagagagaaccgtactaataatttatatattacttgtaataaccatagtctaagtaggggttagtataatccaaagggtagggtgacacgcaagcatagaactactcattctcatattaaattatctaagctaagtggaaagaaaatagaaaagaatctatttctatacttctagtatacatactgtacatacattctagtcatatgattaacaaactaataccctctatccgatgccctcctgatacttcaagaagccacccctagctgccgagtttcttacgacagctcgtcatgaccatacaaccggggctaaatacggaggagtaccctcccccagaaattaacttaggactatatacacgcgcagaggaatagacgtactgagctgtcac

SEQ ID NO: 35894 - DNA, 641 bp, Oryza sativa
tatccccgtccctaaatatttgatgcctataacttttttaaaaatgtttgaccgttcatcttattaaaaaaatttaagtaattattaatttttttcctatcatttgattcattgttaaatatactactactactcaagtttttttaataatattcacaaaagtttttaaataagacgaacggtcaaacatgtttaaaaaagtcaacggcgtcaaatatttagggacagagggagtattactcaagcataacattacttgaaatgggaaatctatattgaattacaaaccaaacttccttttattactccagttatctatttatatttggtcggacacctcaactttgttgacactgtttctttggcaattatttggttcattatcatagttattatggctagccacaagttttactcatagctaggaccctatatatcaaaagtttgttgtagtgttggctgagttgcggctagcaaaatgcatttttgaaaaatgacagggtagcaaaatgcatttttgaatactagctgggggaaaacgtaacctttgcccaagtgtgggtttgacaaagtacccaaacatatatatgccaccgttggtgatgggttcatgttgaaagattttgctcaatttattaccc

SEQ ID NO: 35895 - DNA, 521 bp, Oryza sativa
tttatgacatatttgactttttgtgtccattcgatttattaaaaaaaattaggtaactataatttattttgttgtaagttgttttatcactaaaagtattttaagcatgatttatgttttatacatttgcataaatttttttaaataagacgaatgatgttaaaaatcaacgacgtcatctattaaaaacgtagggagtaagttttttttagctgcgctgatatcctttataactaaacagcatgcatcaccttgtctaatcacgaaccagtcgcgctataagactaatataagtgcgcgcacaataattagattttaccgtaacaattatatatatattaaactcctatgtttggtacagcatcaatacagaaaccgatcgcccccgtcaccgttgtgcgctgaaggaaaaatcagaatccgcgatgtccgccgacgaggatgccattcaccttctgtcccgggggtccgtctagcaacttgccgagaaacaacccgccgccggaaccgggtatatgtcc

SEQ ID NO: 35896 - DNA, 627 bp, Oryza sativa
aagtattcttgacggcctccccccgctgggtgaacgctttaggacattgaaggtgcaaatcactatttatgagatggcattcaatttgatttgacttgtctaatctttattatactcaattgcagggaaaagaggctgacttgcttcttagtaataagcttggttcagagagcaaggagcaactatcacaggttagatgctgctcttttgttctaagaaataatattgtcagaatactactctctctgtgactctgtcctaaaatgacttgatttctagccattccatggagtagtcagtgaaattttctagagatctcatgtcattggagttaacatgtgatgagagatctaggttttgcctatgttgaagcaaagactagagatagatatatatgttaaagttgttgatctgttcatccacatttcttgatttaatgatatcattaaacaaatagttttgctagcttgtttttcatcatttcctttctacatgtgctagattgagttgagttttattggatttattaactaaatggtgactgcatttctacaactgtggcaaatatatatatttttaaataataataagaactataggtagcttatagcaagctcatattttgac

SEQ ID NO: 35897 - DNA, 532 bp, Oryza sativa
ggcgaattcgagctcggtaccctgacaatgggtcgggcacgggtagagcaaaaccatgcccgacccgatgcccgacattgcccacccaaaccctacccattagagttagcgggcaaaacttcgtgcccgtacccatgcccggcgggcgcgggtatgtccggcgggtacccaatggatctcacatgaataataacttaaaagatatgtaacttaacaaagagaaataaaatcaataatttaccaaattatcgtttatcaacaataatttgaattacatcacaacttagtatcagttagcatcacaaatgaactgagagaaatggtataagaattaagaaatgagtcaaaattagctaatacatatgtatcgggttgggcatgggttacccacgggtaaaaaatgaaacccacctattgcccataacgtcttcgggtctcgggcgggcgtgcccatgggtaaaaagtcacacccacgcccgtgcccatcgggtcgggtatccacggatacccggacccatgggtaaaattgcca

SEQ ID NO: 35898 - DNA, 628 bp, Oryza sativa
tagacgacccgccgaacagaagttgaatggcatcctcgtcggcggacatcgccgattctgatttttccttcagcgcacaacggtgacgggggcgatcggtttctgtattgatcctgtaccaaacataggagtttaatatatatataattgttacggtaaaatctaattattgtgcgcgcacttatattagtcttatagcgcgactggttcgtgattagacaaggtgatgcatgctgtttagttataaaggatatcagcgcagctaaaaaaaacttactccctacgtttttaatagatgacgtcgttgatttttaacatcattcgtcttatttaaaaaaatttatgcaaatgtataaaacataaatcatgcttaaaatacttttagtgataaaacaacttacaacaaaataaattatagttacctaattttttttaataaatcgaatggacacaaaaagtcaaatatgtcatatattaaaaaggaggtagtatatcttttaaactaggtattattttttaatccaattacaccgttatatttattacaattaaatttttaaaacaagattttacacgattatatttcgatgaaaaatgtatgttgtaaatattacttttatcatatatg

SEQ ID NO: 35899 - DNA, 581 bp, Oryza sativa
taagtaaatgcctcatgtttccttgagcttgggtttgctgaactgaactgaactgaacggaagatccatttaagctaggacggtgtgatcgatcgttgagttgatgaacttggtctatggctagctggcttaagcgtggccttccaatcagtttgtattctcgtgattttctttttatgttctctatcagggcaagtaggttctgtagtttctctagtgttacagctgttggtttctctttcttaggtgtatacatgatgctgaatatgactaccttttatttgcagcgtgtactactgccggactgccaaagtacgcttgctgctagccatttcggtagcttttgtggtttctacttaactatcgtgtttggcaatacaacaccttggaccaaaggatgcttgaaagatagactggataattaagactggatgccaaagtacgcttgctgctagccatttcggtagcttttgtggtttctacttaactatcgtgtttggcaatacaacaccttggaccaaaggatgcttgaaagatagactggataattaagaactatattggactgtacattcggctat

SEQ ID NO: 35900 - DNA, 685 bp, Oryza sativa
atttgttagggtatcgggaggtagtaatgggcttaggcttgcacagtgctgtcagcccaacttcgctattggcgtggatggtctgtgttccctagggagttaagcatatacctttgccctgctatttatagctctccccaggatagcccaatgccggtgcaatcggcttttaagcagctatatcactatgggccattgcggccatgcatcatacaaaggtgctcgtcagaatagtgtaattctaattttagtgacctttttagatggatgagcaggctgggtttcgaggatatggttaatggtacttggctattctctcagcatgagatatgctaattataatagtgacataggtcacagcataggctaatttgacgggtcggttgttattctttatacacgagttgacagatcctataacagtttagtaggcggtttctagtcatcaatgttgacctatagtatctttggagttctatttcactcggatctctttatgccttcttgggagtattatgcagtaaagcaatgtccatgttatagttatatctaggtccgcataagtttaaggatataatccggagagtgaaagggagataagctcactcgcatgaaggtgttatgatcatcagatatatgcatagtaggtattaaacaactctcatagttgggggggacgcgttat

SEQ ID NO: 35901 - DNA, 3642 bp, Oryza sativa
aatctatcttgttcttgcttgtgttctttgattcgcatgcagggattagccttctcggcgaggtcaaccgggtttcggcacggttgataaccagaggagacatggtgctgcaattgcggggctcagtagcgtgttcgttcagaagccggatcgagttgtgtcgcgactccgcccaaatcgactgtttatcaatacctatcggaagatcgggacctacatccctcaccaggggatcaggtgtattactatcggaggaaggaggaacacttgagttaggggggttgctttggtcagccatggaacccaacaagaaaaggaagactgcgaagagattatttggacatagaaaatggacagggaacgagtgggagaggaacacaaggcagaaaggggtcacggatctggaaaaaggagattacatggaagagaagagtgaaaaacgaaggtggaagaagcgtgctgtggaagattgagagcttgctacagtagaacactgactagaggcatcaagccgaccgcctcgtgtccgaaatccgatcctgatcgggaaataattacttacttccttcgtttcatattataagactttctagtattgcccacattcatatatttgttaatgaatttagatatatatgtgtatttagattcattagcatctatatgaatatgggcaatgctagaaagtcttataacctgaaacggaggtagtaggtaaataagatcagtagcatgaataggatatccttgccaataatccgttgtacaccgtaagtatctaatgctttgtttatagggttttagtattactattgataatatgattattaaaaactaacttacatattgttcttaattaagtgtgaaattaaggtaagttaggttcggtgttgtgtatgctagaaatgattcatcaaaaaatgaaattagtgtggttctcgatgaaagtcgtgaatattgatgacttttggttgcgtgtttgctactcctttcatttcaaattacttacaataaatgccacagcactataatattttaaaactatcacaaaactatatatttaaattggtagtatatcacaaaactaaaaatttaacatcaaatttagcatagaactatgtatttaaggtgaagtatcataaaactaatctgcaacaaagttgttacaaacttcaggtttagtgtaaatttaatcacaaaccttggatgtttataactcaaacataacattatcattagtactagggatttaaaccgtaatttgcagtagcttcattattaaatgtttagttctgctatactacacctaaaatctattttataaatttgatattaaatcagtagtcttataatacaccatcttaaatctatagtcttgtgatagtttgattaaatatctatagttttgtgtaatttactcagaagagaaaattaatgcataaccattatacagaataaggaaaaaaaaattaatgcatgacccttataaacaccgttggacattaaacaatgtgacacgtctccagaaaaaaaaatagaaatttgctgaagacaccataaccattattttattattttcagatcaaatggagagagaaaaatgccaaaaggacgcaaatgcctcttgggccaaaggcacatacttcctccgtctaaaaattcgttgttataggatgagtcacattatatcctagattgatcctttttgggatggagggactatatatatctgggtctagtacattagacctgaaccacactctatcccgacataggcgtgtggcgtcgatgcagcctttgaagtccggtagcatcgatggcggcagggatgaattcattggagaagaagaaccggcatacaaagaaccatccatcttcactaaacctccctccattgtcgctcgtcaccgcttcatcctgagttagctacttgctagtaggatttttgagagagagggtgagtgagttgggagagtgcagatcgatggccacagggtgctacttgaatccatcgtcttccatcgccactctcgctactagtcgtggccactgttgtggacgtcatctacctccaatttgtagggttctggagggggtcccgatggaggaaatgtagcttgggtctagttcaaacaagacctagctgtgttacaagaagctcgcccgagagacaacttgtattttctaattgatgttagtgtattcaatagtttgttaagtgtcttataagcaccccacaagtaatatcttgttttgggactgttaaatgggggaaattatgcacctgattgccttttggtatttctatttgaggttgaagaggacagacatgagtaaagaaggataagaataaatatggtgagaagtggtgtggtgtggagtcatgggtgcatgacactccagggtttaaatattgaccctatgaatattacacatatatatgtgttgacggtccttatagaccaatttctgcagtcaatatatctaaaataaataaaagagaactagctatgcttgcatgcatgcatattttgtttaagaataatctatttctacttgtacttggaatattatttgatttcagagattgctgcataaatgaaagagaatcgacggaaattaactgaacaatcaatcgtcatccgtcgagtggcagacttttagaatgattggcttacaaaaccattttaacacctacgaataagcccaactacccttcttttgtaatactttagcattaataaaatattcttctttatatagcttcgttcttttacataattcatattatttgagtaccgactttagttcgtacttgtctcaatataattgtgtagctagcttaccagagatatgcaaatgattgctctatatcgatcgcgagggtgtagagtagtatttaataatgtaagtgtggtgcttaaattattagatattattctttggggttatatgccatgggtcaatagaggtgggccgctgatgatgacaactcagtacgggtatttcttcacgttcgtatataattctaagacattttcctgatatgggtactcctctgtattcatttctggtcagatggccatgacggattgtcgtaaggaactcggcaatcaggtgtggtctctcgaaacatcaggagggcatagttagagggtattggctatatgattgtatactagcaagtgtaaactatagatatttatatactagaagtataggaatgattattttcatattcattctccacttagcctagattttattttagcggagtagtccttaaatctttcttctatgtgtcaaccttatcctacctaaaaattaattaacccatgcatagactttgatgaatacaagtaatatatgaattgttagcatagtattattttattatattttccattaggatttaattaaaaccataccttagattactaccatgggataattggacggttaccagattaaatttgtggcccataaatataccaagaatatttcagtgccattgctggaaattatatttctagtaataccgttaagaaatatctacaatatgtaagctttaaataggattatagtgagatcaggaatatgtcgctagtgtcttgtctctttgaacgtgtgttagtggatgca

SEQ ID NO: 35902 - DNA, 723 bp, Oryza sativa
  unsure (1)..(723): unsure at all n locations
cctgcagccgttacggccggcgaggatatgcaactttgttcaacctcgaacaacaattagatacggagtactacatgggactcccatgcaaactagtcgtgctcctacgacctaaccacaagtaatcaagtcggacacgacaacagctactgcatgcccatgattgagcatgcacatggacaactgggaggaaagaaaaaaaacacacgtattcatacagtacgtgtccatcaagttagtatattaatttttttaataatctactaatttcgtagatatatccggcatatatctacacaggagagagagaggaggaggaggaagacgtttctggaaactatccggtgacacgtcggactgggctgtcggggcccacggccacgtgtgggctgtgttgtcagggcagttaatgtgggcccacggagagacgcggttaaaatgggcctggcctgttgaggcccaattaagtacacggcccagctttctcatcgtctccttcctcctgctctggcttggcctttactgtcgtcgctaacttcttgctgacgacagtccgttaatctctcccccttagattgaatgaaacagagaaaattaattttatttttatggtaatggaaaaatatattcctcaatgccctttaatctctctcttgggatttacngaacaaggtctacgagaagtttgtcatgtttgtaaccggtggcacagttttaatattt

SEQ ID NO: 35903 - DNA, 702 bp, Oryza sativa
atacctgtcaaacttgcaaaacatgtgtcatatatatatggtcaaatacaaagagcatttgatggaatatgatcctctttgttttttttttacaaaaaaggaatgatttgcatacttgcatttctttctatcaattgcaaagctctgaatatttcagggaagagaaaaattctgaacaattgcattccagtgcgccatgcccatgcttcaaccaaagacagagtatctattctttcagaaggtgcaaagtagtagcacagtgaaccaaatactaacaaccagctgcattattgcataggcagcccataagatttggtctaaagcacagggaaaaagccatgatcacatgcctgaaattgaatagatccttcttggccattgtcaaagcttagataaacctcaaaaatttgtcggcaaacgaagacgaacaccaaccgataaaacttctgaagaacaggatagagtgcgtgctgtatctgtcactctgcactttcagaagtttcggttaagtggtgaattgatggaggtggaagaaagtaaaaatttctttcagccgccctctgttgcttagtggatactagatttgattcagagggaaagagagatagagagagttatgtgatggacaatcaggagctttcaggtattcagagaaaaattcagagcatgctcaaaaagaaagagaagcacatagtggcaggt

SEQ ID NO: 35904 - DNA, 561 bp, Oryza sativa
caatgtctacaatttgccatcatataatcatatttatccccttttttccgtcaccatcaattaacgtcctttacccatttagaaattttacatattgctaaaaatacctccaggttgcatgtgtttagttactcactcgacgaccgatactcatccctctatggtgttgttccccccctccttggtggttgtgcccccctcccccccctcctccctttttagccagcccaatagtgttattactccctgtttgatgtcattatccttccctggtgctccccaacctgaactatggggtgattctcctttgtttgtgtaagctcaagctgtcacctccctcccacattccctctaagacctcctccctcgaattggccaacactgccctctcacataacgcagcaccgtgtagagtctagatccgaaggtagtagtgagaggtcaaaagaaagtcagcggcaaaagggtcactcttgacctcctctagtgacggtgtgatgagatggcagtggcttggaggtagcccaagtgcccaacaacgatgacgttgagtatggtgat

SEQ ID NO: 35905 - DNA, 641 bp, Oryza sativa
acggtgggcgtgactttacaatgtaaaaaatgaatggcaataccaatcatgttttattttaaaaatcttcaatgatataaatgggcaggtcatatagaagtatagtggtggagccgacagcggttggcgaggcttctagaaattaaaaaaataaacccttaaaatttgaaataaaaaaattgacaatgggaaaataattctatgagttcacaaataaaaaaatcggaatgaaaaatatggaattttcaaaaaatagtccatctgaaactcaacgatgatatataatagtaaagatgagagaaacattaggcctgtaaagcagtaagttggtagcaattcatgcgacatctaaaagctataaacaataccataaatagaatcccaataatgattaagaggaggggcgatagacaagccgttaagcagcacaatcacgacggttggagggacttctagaaactaaaaggtaaatcgcaatgacaatcatgttcgatttttaaaatctcaatgataacaaaaatacatgagcatagtggcgaagtcggcggcacggtggttgggcggatttctagaaagtaaaagatgaacctcaacgatagttatgtccaatttttaaaatcccaacaacaataaatatggaa

SEQ ID NO: 35906 - DNA, 607 bp, Oryza sativa
ggggtttcaaggtgggagtaaaaccgtcgcggaggagagcgcgcgcggtggtgagccaggtggcgcgaacggtgccacaacgaagcaggtttgagaattctagcgtggtgaaaatggtgcagagcatgtcggccggtaggtctaactagttgacgggcggtggtggtgacgcggcggccatagtgacgaagagctagcgctagagccgacaagaagaattaatatccctaacaactaacaatgaatcggtggggcttgacctcatgtcaatcttgttgttgtggattattttgctagcaatggaacagagaaggagaacagaggagagaagctctgtgtttgtttcacaaactggttatgctttgctcaagtattgcacgttacattgattgttggacagcagcatcacatctaggacatagctgcctatttataggatggctaggaacttttctgaacacaactagtactggtacatgcatgaaaatactagaactccaaaagaacatattattgtctacactactctagaaatttcacagaggaaggacttgctccttgacttttgtttcatgagtagtagagaaagagttagagagtaggctgg

SEQ ID NO: 35907 - DNA, 532 bp, Oryza sativa
ccatctctattggggagtttgtcgacaacatcaagcttcgtcgctgcctctgatacggggaaatgtagcaggatcagcaaggagaggagaggaggcgcgagaagagccagagcaaggtggcaccggggagacgccaacgcaccgccggtggagcaggtatgggtgcgacggagggaaggttgtttgcgacgaggctagactccatgacggcggcggcggcgtctcctgaactaactgtcggtgaaagatttacccacaatttatgccaaatgacatctacttgaatgatgatgatgaagtcatgaagagtactttttcacctaaaccctttctgaattagccacacttcctatttggattacccagagttttactaaaattttaaaatacgtatagactatagtataaatgcatacaccttgtcacatatagtgtatattttagttgtcaatcaacattaaaattcaagaagctttattgcttctttggtacagtacaaagtatatacatttataaaccgctttacaaagta

SEQ ID NO: 35908 - DNA, 1499 bp, Oryza sativa
atacagtgcagctgggtacgtacctgtcccgggtgcttttctagctcatccaactggatcgatctttctttcaggtaccccttggaagagaccaccaggataaatataagttaatttggtgttttctgttcacgcaagaagccaacaataatgttacaattaaagagatgtcattggtaaaaaaacggagatcaggcatatggaaattattagcagaagtgttatatttattgagtttaatacaccaactacaactagcagcttagctagaagattaagccaatgcgaaaagtgagccgcagttttaaagaattgacatcttgtctatatgtccatatcatgaataaatgaaggatacaaagaaagctgtggctgatgaactgtagaaacatgaattaattaattaaaaattctatacaggtaaaacctttatatttgtacattttgaaagctaatgatggaaaataaagaacaatgagaaaaccacaaaatcaacttagaattaagtttgacaatttaaatttggattgtagttaataaggagcagttatctaatttgagtaccacaatgctcaaactcaaatttactactagttcggttagggaccccaccccaccttccatgcttcattagttcctcttaatacaaataatgcagttacaaattgaaatgtcaggattatgcccgtacccagtagaggaaagtttagtttttaacttcagcaagcgacaaaaacaagctgaatataccggttaattagtgacaaaaacaaagatattactgtactttctctaatcaaacttatatgatgtagcgaaaactgaggttagtttttccaacgtcaaatgtttttgactaaagaaagtacttaactaacatgatgcaatagagctggactccatcaatgcaattatcatcatgtcactattaaatactccctctatattataaatcgtttgtttttttgtcaaactttttttagaaaattatagtaacatttccaataaaaataaactttgtatcaaaatatattcgatgttgaattttatgagactaatttggtattgtaggtattgctaattttttttataaatttggttaaatctataaaattttgaccaagaaaaaaaatcaaacatcttataatatgaaacgaagagagtagtccgccgtatgaggggaaaatcctcacctgatcacaccattgtaacctgtgtgtgttcatcctttttagggcctagtatcaaactctcactttctctttctcgtggtaatcaggagggccttgcttccactttgtctccccccttcactcctataggagagtgtactctttaaccctgacagagagtagtagtaacatgacagcaatgcaggccggccctgcgactgcgagggtaaaaaggcatctgaaaacataccagtttttctctgccatcatctcctcccctgcccttctctatcacgtcagtcagtctttcttcagtgcgccaaaaca

SEQ ID NO: 35909 - DNA, 3587 bp, Oryza sativa
ctatggccaagagtggtcaactcctccatcccgcaatcttcggttacatgcgactaacaactcagtacactcaagcataggctacatcatctatggtagcatcatctttctttgatttgctagcaagctaagggactttgtgcaaattaacctttacgacttggtgtgcatataaccgttgctgtgccaactcttttgaacacatattgttttaccactacatatcttcccccaagtaaatgatgcaatacatattttgaatggcgctcatgctggcatttggactcattagagagactcattgatgagattttccgttatcacttagccatgcttacactgttctcagactcttatagtcattctatagctgaaggagttcaactctttcatcttgtagtattccgttactcgtgacccacaactcactatactcaagtgtaggctatgatggaaaaggaggcctcttcactcgaaacagtagcatattttccttttggttgttcgcaaactagtgcataggaggggatctcgccttggacaattagatagatagttaggttagtcattcgagccattgtatcctccaccatcaccacacaaggtggtggtataccttgtttgtcaacatggtgtatatatataaccgttggtatgccaacttatctatacacatattgttttaccactatgtatctttccgtagtaaatgattcaatcacctataaatgaacgacactcttgttggaagttcttgctgggatttgggcacattagagagacgctttgatgagatttttcgttaccacttagccgctccaaccccattatcaacctccttaatcgaacgatgtcctagagctcaactcttccgcagtcttcagttacatgaggctaataactcacttcattgaagtgtaggctacgtcacctaaggtaagcatcatcttcctttaatattctagcaagttggtgacctttgtgcaaattaacttgtacacatagttgtgaaccgtcttccctttcgctgatctcaagcatttgggtttatttcctcggagtgaacatttgatgtcattgtcccttgattgatacctcatatatcttggtgacagtcaatgggaggagggggggggtcccatcttgtaggtttagtcattgaagccattatattgcaatctccaccgtcatatgtggctttgcttgtaatgtagctaaataattacctgaagtaggttgtggtgaagaggagaagctaggacatgagttctgctctatttggttgatggctttcaagtgccccaagagggtccttatataggggttcagtaggtggagaggtcaatgcttctcttaattcggtgttgatgcaatgcaaaataacaaggctccattcatcccctcccccctctctctctcttatgtcattcatttcctagttttgttctctctatatcttgtgattaattctaagattaatagacatatatctgcacataggggtgaaaacggtcacggaaaatcctgatcgaccgatgctccttttcagtttttaccggccgagcaatgtgcagatggtcaccaacgaaaacaaaaataggaatggtaaaaaaacatatggaaatttaaacggaaacatttttgctgcataccgaacgtttctgactttatcgtgttcgtacggtaattacttttttatactatgtaattatcgtagttctaaatacactaatatttatgatatatttctttaattgacccatggtttagagagacccgtcgatttcttaaccagacccttaacttgagtacaaggttaaaaggatataatttggaaccttgaatttatattatcatattatatacttttgcaaagctaaatgtgctattgtacagtttaatattttcgatatttattatcggcttctgattgataccgacatgtttccatccgtattgtccctttccagtttttcgatatttcctgtattgttttcatttatgtctttaccatttttgaaaaaatggttttggaaatggttgagatgttttccgaccgttttcatccttatctgcgcattacaatgatctatataagttggctgtgtcatcctctcatggatgtagatgctgggttttttaatccattaattaacaaaaatgtatcatacgtacattctaaatttgaaacaattaatatagtttttttcagatgaactttgattcatgaacaattctaatacaaatcatgtatgcaaatgatatactacctttctttttcaacttgacatttttgaacattgacacatcaatctctgatacatatatttgattattattttaccgtatcatatttatcaaaagaaaattattaaaaatataactatacttcaagacaaatctagtaatttcacatttcaaactcaataatttcatgcattaatgactacagattttggtgtttaaatgcatatatattgtaggatgtcatctgtcctaaatacaaactgtcatctaaattgtaaagtatgaattttatgctattaagttaagacactttccaatattagtgagccacaaaccagtctcatatgaatatatttgatcattactttatcatatcatatatttctcgaaaggataatattaaatatatagccacacctcacgacaaatctagtaatgtcacttttttactcaataattttgggcattaatgatataagatttcgatgtttgaacgtgtatattgtaggacgccatgtgttctaagtaaaaactgtcctctgaaatgtaaaacatgaatcctgtgatatgaactttaagacactttccagttatattgatgagccccaatccagcctcagatgaatacatttgatcattggtttatcatatcatatatttatcgataggaaattattagaaatataactacacagcaggacgaatctactaacatcactttccctctatttttcgtttatataccaactatatctttctttcaacatcacctatttctctattgatcaaatataggcggatgttttggtgaaagccattgggaggtggtcccaccttgtagtaaattttatagaaatacatattttatggtcaaagttgcaaaaaaccacacacactttgacattggttacttaactacatatattttagattgaagtttcacaaaactacaccatcaatgaacgggcccacctgcaagatgacgtgtctgttccacctaggatgtggacttgggagctttatcctaggtggaacactcataatgccacgccagcatcctaaatatatgtagataagtaaccatgtcacctcatgagtggacccattcgttgattgcgtagttttgtgaaactttaataccagaatatatataggtaagtgtcaagtgtcaaaatgtgtatgttttttttttgcaacttgaaccacgttggtgcagttttatgaaatttactcttcttttttaacttgatatttttttacaatgacacatgagtctctgatacatatatttgcccattattataccatatcatataatatgaaaaggaaattacgggtgc

SEQ ID NO: 35910 - DNA, 709 bp, Oryza sativa
  unsure (1)..(709): unsure at all n locations
attcctgcagccctgcttcaaccttttgcctagggtccaatgaatctgttatgcaacacatacaaaactgtattctattaaggaatatcggcagccttgttgaaaaaatttaaaagtgaattacacgtatgtatataggtcatcacttattcttgcataccaagttttatcttaggtacttgacctaattttttctttcaatttggaccaacttttctttcctttaatttaactttgaaccctttcaatctcttctctaatagggaaataatctgaatgaaaggaaagtattggcccttgccccccccttttgggggccttttttctcttgtacaatactacatacacgcctcctttctcatatatcttctgcattgcaccccatgtattttccgttgctttgactctttcatatcctatgaaccactacaatattgctagagcacaccgctagagagatgggcggagttgacctacaccatccatccctatgcacccttttcgcagtcaccatgttagtagaagtagaggatgggagcaacgaggtggcgtgtggtagtggatcctccaaaggaggatgcattggactaatgggggagtattttgccattaggaaccccgtgagtgagtctcattttgttcttaatggacgttttacccatcaaggatcanggttcaggtccccattaccttatgcaggatgccttga

SEQ ID NO: 35911 - DNA, 1260 bp, Oryza sativa
ccaggacccatcaagatcatggcacttgaggcaatgagatttgctacaataacaaaagtttattttttttcatcttccattgaatcaaagcaaagagaggccagaaactaacctggatatattagtagttgaggacatgtgtgcattagccgcgggccacgtagaatagacatcacattgggtattagtttacatcaaccagcgacaagccaccacaaaaacaatcttcgaagttcgtacatcttaattaaaccaacaccattcctaataataaaggtgttgtatatatgctccccacgtccatcatgccgttcaaggctcttggtcatacacacatacatctgcatgatcctggcaaatataaaaacgtaagtacgtggcctcatggaaaggaacagagccacacggaataacataatgaggagcattagcatgtgtccccttatctagagttttatctgaatatacaattctccataagataccaaattcgttcatgtgcatggagaaacacaaacctgaattatcaaacgattgggcaggtgagctgcatgattgaagcttgtaggatgaagaacctgctgcgtggctccctagctccgatcctcattgccacctttaaatatgatgcacttggggcaacaattcacagccagtgcatgcatatgcactgtccagatgctatgccttgcctgcagatgggtaccagtttagtagttctgatctggtgtgttcctccactcttcaacagatacgtacacagctatacaactgaaagtacagtacactgcatcatttcttcttggtcaatgttttgacaatgatgcaattgtcaatgactatattatgtagtatatgtttaactaccatcagaatcagaggccctgtttcataattttcaggcaaatccttccactgagttttataagatgcaacgagattaatgcatgccctttctttattttcaagagtctagtatttcacaagagtagagacatgcatacatcagctgaagttcagaacatagtagtacaaggtacagacaacctatgaaacatgaactacgaaatttctcttttcgaagattaagaaagagtcgaaatatcttgaaataaataataagcataaccttctacatgatataagcataaccttaatgaattaactaacttctttttaaataaaaataaaaatagaaaatctggcctcttagcattctaaggctaaaaatctagtttaaagttaaaaaaaaccgtcttt

SEQ ID NO: 35912 - DNA, 13337 bp, Oryza sativa
ggaccgaatttctcggtcttggtcttttcgtttcggtctttttttgcccactcctacctcaaggaaatgctatggttgcaacgagtccgaacacttcatcgccgaaccctttgaaatgtaaaacacgaatcttgttatatgaacttaaggcaatttcctttcatatttgtgagccccaaatcaatctttgataatatacttgaccattactttatcatatcatatatttatcaaaaggaaattattaaaaaaaagctataactagacttcatgacaaatctactaatgttattttttgtgcacgataattttgtgcattgatgaattacgatttcaatgtttgaagcatatattttaggacgccacctattctactagtttattttgtgagagaactccaatcaactccagagtacgcaataactaaaacacgtcccttacaaagtaaaatttatactacgtgttatatgttttcaaacaactaataactttactaataggcttagtaggtgacaaatctactaatgtaattctttatactcaacaacttcgtgcattaatgacttaagatttagaaacttaaatgcatatattgtaagacgtcatatttagttataaatgcaaattaactctcttctcacaagtcaaagtggagatatttctcaaggaaatgctatgattgaaacgagcccgaacacttcatcgtcgattgcccgaaactctaccctctgaaatgtaaaacacgaatctttgttatatgaacttaaggcaattttctttcatatttgtgagccccaaatcaatctctgataagtgtacttgaccattactttatcatatcatatatttatcaaaaggaaattattaaaaaaagatataactaggtttcacgagaaatctactaatgtcattttttgtacacaataattttgtgcattgctgacttaagattttgatgtttgaatgcatatattgtaggacgtcatatgttctacatacaaactctccacattgaatgtaaatcacgaatcttgtaggatgaacttaagatattttcctatcatattgttgagccccaaatcaattcagataaatatatttgatcattactttatcctaccatatatttatcgaaagaaaattattaaaaatataactatgtaggattgaacaacaagaactaagccaaccagagaggggtgaatggttggatatcaccggccctatgcacctggtctgatcggtcccacacaaagaacaccacttctctctatttttccaactatatataccaactatatctttctttctatatcacctatttccatatcgatcaaatataggcggatgttttggtgaaggccattgggagggggtcccaccttgtaggtttagtcattcaaaccattatattgcaatctccaccatcctacacaaggtggtggttttgcttgtaacatcatatatagttgttggtgtgccaactcataaattcttactagtgataatgtttttatcactacataatcttcactcggttaagtctcaatctttcccaagtaaatgattcaatcacctcgaatgaaaggtaattttaccaaatgtagttgttagcatttggatgtgttcaacagatttattgttctgctttcctcttatcactgaactgtgccaacccttcttttagactcttagtcatactatagccaaaggaggtcaactcttccattgtgaatatttcgttacccatgactcacaactcactatattcaagtctaggttattatggcaaggaaggctcttcatttgaaatggtagcatatttgtctttgagttgtcaacaagccagtcaatgtgagggatcttgcgttgtacatttatataggtagttaggttattcatttgagttattgcattctccaccatcatcaccatcagtggcagagcttagtggagactaacatggatgatggtccccctagtatattggatgaaaaacttcatataggtagcacaagttactaacttcctttcatatgttggttactatacttgcctgtttcattccattggttttgggttcaactcctcccgaccccacccccccctcgttttttttctacagattgccctctaatgtgaaaaaaaatatgtctttaacactttcattgtttttctataaattgccatctaatgtgaaaaaatgcctttaacacttttaatattttcctctgtatattgccctcaaatgtgggggaaaatgctttcaacacttccaaaaaaaaaatctacagggtacgtgaaaaaaatgccattaacactttcaatatttttttctctatagattgcactctaatatgaaaaaaagagcttttaacacttcctatttttttaaactaatggtattgtttatgttatcggtactatcaataatacttaactttattctttttaccactgcatatgtttccccagtaaatgattcaatcacctataatgaattacgcccttactagaagttctcgatggaatttggatgcattagagagacatattgatgagattttccgttaccactaagccataccaaccccttttccaccctctgtaatcgtcctatggccaagaatggtcaactcctccatcctgcactctttagttacacgcgactaacaactgaatacattcaagcataggttacatcatatttctttgatttgctagcaagccaaggacctttgtgcaaattgacctttgtcgccttagcgtacatatatataaccgctggtatacctatattaaatggcgctcatgctcgcatttggacgcattagagagattcatttataagatttttcattatcactgagccatgccagccctattctcatactcttatattcatactatacctgaaggagttcaactcttccatcttgtagtattccattacccgtgacccacaattcactacactcaaacataggctatgatggcaaaggaggcccttcactcgaaacagtagcatgttttccttttggttgttcacaaactagtgcataggaggggatcttgccttggacatttagatagctagttaggttagtcattcgagccactgcattctccaccatcatcaccatacaaggtgaggtataccatgctcggttagtcaattccttaatgaacctatatgtttgtcgacttagtgtgcatatataaccattggtatgccaacttatctatacacatattgttttaccactatgtatctttccctagtaaatgattcaatcacctataatgagcgacactcttgttggaaattcttgctgggatatgggcgcattagagaaacgccttgatgagattttttgttaccacttagccgcaccaaccccattaccagcctccttaatcaaacaatgtcctagagaggtcaactcttccgcggtcttcaattacgtgaggctaataactcacttcattgaagtgtaggctacgtcacctaaggtaagcatcatcttcctttaatattctagcaagccgggaacctttgtgcaaattaacttgtacacatagggtcatttgatttatgttcttcttaaggccctacacataaaaaccatcctaggtcctctggtttgatccttgcataaagttccactgcacactacaccctccgtcacaaaaataagttcattggtgggtttttgtgttcaacgtttgaccgtccatcttatttgaaaattttatgaaaaaattaataaaaacaagtcatgcataaagcactattcatattttcacatctaataacaatcaaaatactaatcataaaaaaatttaaataagacggacggtcaaatgttacacataaagaaacccacaaatgaatttattttgggacgaatgattgtattttctggtccacagctgcacaggcttctgatttcttctggcctttgtagccttgatgcttaagctcagatcctgactgtttctgcagctggcatcaacatataattgggtaatgatgcccttgtttatgtctctccaatgcgtgtgtcggctgtgggctctgcagtggtcacccatgactgcacctgccagagatgcccccctccgctgttgccaacaatatctgtgacgtccactcgttctcagccgtcagatttcgatcagaccatcactttcttctcagccattacatgcacacactttcttctcacaaattacacacattacatgcacacacttttttctcacaaaattagaaaattacacacattacgtgcacacactttcttctcagccattaattaagtattaacaccaactgtcttgcaaattaattttctcaagaaaagggttgatcatcataggggcaaaatcaggtttaacaatcccggttttggttataaggggtatcctcggttttcacgccgttgttaaactgataaaatctgaataaatcttataaaaatattataatttagtttgatttcttttgaacttgaaataaaaacgaacgattcgtgttttcgaccctgtccaaaaagtctagattttgataaggttcacaatcccggttttggatataaggggtatcctcggttgtcacgccgttgttaaaccgataaaatccaaataaatcttataaaatattataatttagtttgatttctttcgaactttaaataaaaacgaacgattcgtgttttcgaccctgtccaaaaagtccagatttcatgaattccacggagatcgtaaaccctgcacaatattcactctactgtttttttttatcaaaagatagtgggggagtcccccatggttaaaatgttatataaataaaaaggagacagtttatgtacacactctactgttcttggtgcaagaacaggacaagaacagagtccaccattcacaaacaaatacacaagtactctctcttgactgaatcatcattgctgatatgcaatagagggaaaagtataatggtcactgtttgattagggacaatgatcaacttcttaacctaaagtcttatcttgcacttctttaatggaaaaggggggagggggggggagttacaacttactgctgctacaagaaccattaatccaccaccacataattaattccccccctactaaaacacacactcacacaccaacccataacaataaaaaccccaacataaggtgacacaaccatttttttggttttttatgatgaaaccaaagacattaaaagaggctctactactactataataatgatgaagaaatccggcatcgtccagtggatgatccaacggctgtcactcgtccactcatgcatggatcctgaggtaaccatccgtgtgagcatccactggacggacatggctggcggcaatggcggtctcctcctcgtcggcggcagcggcatcttcattttcttctcacaaaattagaaaattacacacattacatgcacacactttcttctcagccattaattaagtataacaacatctgttgcaaattaagtttctcaagagaaaggttgatcatccgaggtcccagttttggttataagagatatcttcggttttcacgccgttgttaaaccgatgaaattcaaataaaacttataaatatattattatttagtttgatttcttttgaatttaaaataaaaacaaacgattcatgttttcgaccctatccaaaaagtccagatttcgtggaatcgggagatcgggaatctagagatcgtaaaccctgcacaagattcctactgttcttggtgcaagaacaggacaagaacagagtccaccagtcacaaacagatacacaagtactctctcttgactgaatcatcattaatggtcactgtttgattagggacaatgatcaccttcttaatctaaagtcttatcttgcatttcttcaatgaaaaagggggagttacaacttactgctgctacaagaaccattaagccaccaccacgtaattaattcccccctactaaaacacacccacaccaacccataacaataaaacataaggtgacacaaccatttttttggttttttatgacgaaaccaaagacacttaaagaggctactactactataataatgatgaagaaatccggcaccgtccagtggatgatccaacggctgtcactcgtccacgcatgcatggatcctgatgaggtaaccatccgtgtgagcatccactggacggacatggccggcggcaatggtggcctcgtcggcggcggcgtcttcacttgcgctttccgccgcgcttcttgtcggcgtcggcgtcgacgacgacggcgtcctggttctgtagaaggtcgacaagggagggttgcttgcagttgatgcaggtcgggtagtccttcttggcgaccatgcagtacataaggcaacgggtgcaggcgccgatcaccatcggcgacttgtccccggggctaccgccggcggagctgcggccatccgacgacacgcacgacgtcgccgacgacgagtcgctgtcgtcgttgccgtccacctccatacccaccgccgacggcgacaggttcagctgcagctccaacctcgcccccctcgtgctccagacgccgccgccgccgttcccgttgctccggctcatgcttccctgattcacaaatcaagatcatacatgtaaatagaacaccattggtagatatacaaaaacgaaagaaaaaagagatcgattgtttttttgctcgtgaacaagaacagcgcacatcgatcaagatcgatctttgtttggtcatgaaaaagaagtgcatatcaagattgattttgctttttgtttttttgctcatgaacaagaagagtttatgaagaactagaagaacaagtcaatcaagaatcaaataacaaagttgctacctgaaggttgtggagaagagaggagaggagaggagaagagaaagaaatggacactgctctatttggttggtggctttcaagggccccaagagggttttatataggggagttcagcaggagaggtcaatgcttccctcactttggtgttaatgcaatgcgaaaattcatctcccccccttctctgcttccatatctttgtgattaattctatgaatactaaccagatatctgtgcatttacagttatctataatatctataataaattaagtataatatgttttaaacttgaaacaacattttttttcgagcgttgttgcggtacagcggtcggtaccagtaccgcccggtaccaaaatcctggccgttggatctgacccgatccaacggctggtagagtttgtactgggcggtaccaattctgtccctggtgcagtaccaagtggggaactgaggtggaagggcaaaaacgtaactttgtgtgcaatgagaacagactattaccctagaaatcccgatccgccgccgccgtgttcctcttccatgtcgtcgccgtgtttctcttccgctccagcgccgccatgttcctcttccgccccgccgtcgccgtgtctgccactgccgtgttcctccttcggcgccgcgagattggcctctgtattgtccgtgaaagcggaggcggaggcgaatgagccagcggcggagtatgcggttgcagcggctgaggagccgctccggtggtggcgccggagtaggccgtggctgaggcacgacgaaggaggaggcggcgggggagaaggcacacccattttctctcacgatccttcccttccctgattcaacggttggatgatttttggtaccacattctgctggacagtaaaaaatctcttttttttttcaattgaactttgatcataaataattctaatacaaatcagatatactacctttctttttagtaaattttatagaaatacatatttttatggttcaagttgcagaaaaccacacaaactttaacactgggtacttaactacatatattttatattgaagtttcacaaaactacaccatcaatgaacgggtccacctgcaagatgacgtgtctgttccacctaggatgcggacttgggagctttatcctagtggaacactcacgatgccacgccaacatcctaaatatatgtagataaagaaccatgtcatctcgtaagtggacccattcgttgattgtgtagttttgtgaaactttaataccagaatatatgtacttaagtgtcaagtgtaaaaatgtgtatgtttttctgcaacttgaaccccaaatgtgcagttttatgaaatttactctttcttttttaacttgatgtttttttaacaatgacacataagtctctgatacatatatttgcccattattttaccatttcatataatatgaaaaggaaattacaggtgcactaaaacacacccagagtacgcaataactaaacatgtcccttacatagtaaaatttttgctacgcgttatatgttttcaaacacataataactttactaataggtttaataggtgacaaatctactaatgtaattcttcatactcaataacttcatgcattaataacttaagatttagaaacttaaatgcatatattgtaagacgtcatattttgttataaatacaaactctcttctcacaagtcaaagtggagatattcgtcatggtaagggtgggcatttggtttgactgaaaatttcgttatgggtcttcggtctttaggtctttaaaaagtaaagtaaagactgaatttcaacgcaaaaatgtcaggaccaacaaattcggtctcagtcttggtccttgaccgaaattcaacaacattttcatatacgcaaagaaataatggaaattttcaacacaaaaatcacaaaaaaaatgtaagcacatatgagtaaagactcttactaggttgcatgcctagaagaagtagggatgtgaaaattagagtttaatcgtattaaacttagtggattgtaggttgcatttagacttttttttgttaattcggtttatttggttaatcgaggaaaataaccaaattgactgaacaaaattgggtctttcactacctagaaccaaattgatgaccgaatttctcagtctcgttctttttggttcagtctttttctgcccacccctacctcaaggaaatgctatgattgcaaagagctcgaacacttcatcgtcgattgcacgaaactctacctagtggagttgaaactgtttgattgggctccaattctaggagaggtagaaagctggagcgatgtcaaacaacccctcaatctccagtaaatatatttgatcattaatttatcgtatcatatatttatcatataatatgaaaaggaaattacaggtgctctaaaacacacgcagagtacgcaataactaaaacatgtcccttagatagtaaaatttatactacgtgttatatgttttcaaatacctaataaatttactaataggtttaataggtgacgacaaatctactaatgtaattcttcatactcaataacttcgtgcattaatggcttaagatttagaaacttaaatgcatatattgtaagacgtcatatttagttataaatacaaattaactctcttctcacaagtcgaagtggagatattcctcaaggaaatgctgtgattgcaacgagcccgaacacttcatcgccgattgctcgaaactctaccctctgaaatgtaaaacacgaatattgttatatgaacaggcaattttctttcgtatttatgagccccaaatcaatctccgataaatatacttgaccattattttatcatatcatttatttatcaaaggaaattattaaaaaagatataactagacttcacgacaaatctactaatgtcattttttgtacacaataattttgtgcattgatgacttacaatttcgatgtttgaagcatatattgtaggacgtcacctagtagtctactagttcattttgtgagagaactccaaccaactccactcccattttgagtggagttgaaaccatttgattgggctccaattctaggagaggtggaaagctggagctatgtcaaacaacccctcaatctccgataaatatatttgatcattaatttatcgtatcatatatttatcgataggaaattataaaaaatatagctatacctcaccacaaatccattaatgtcatcttttgtaccttgaataatttagggtattaatgacttaagattttgatgtttgaatgcatatattgtaggacgtcatatgttctacatacaaactccccacattgaaatgtaaatcatgaatcttataggatgaacttaagatattttcctatcatattgttgagccccaaatcagtctcagataaatatatttgagcattactttatcctaccatatatttatcgaaagacaactattaaaaatataactatgtaggatcgaacaacaagaactaagccaaccaaagaggggtgaatagttggatctcatcggccctatccacttggtctgatcggtaccacacaaagaacaccacttcgccaattatcatcaaatatcaaaaccaattatctatcatgctaattgttcatcatgaattaataaatcaaaacacactttgatttcacaaactaaaccttacgactaatgccatgttttttactccctctgtcccataatataacctagaaccggatgggacatttcatagtacaagaatctagataacctctcgtctagattcattgtgctatgaattatgaaatgtcttatacggtcttatgttgctatattatgggacggagagagtacttaattagtaagtgtaataatgacttaagatttcgatgtttgaatgcatcatctattctaagtatacaaactccctattgaaatgtaaaacatgaatcctgtgatacgaacttaagacactttcctgtcatattggtgagccccaaatcaacttgtcctgctggtgattgccccctctgcttatccaccatgctattgccaatacctgtgagtatgtttacaccatgcagcagttggcaatagctgtatgacagtgttaacatcttgaatgccctttatgaacagaatttatggccacagctgattctatctagcaaagtaaatgtgcatcaatgtgtcactggttatgtgaataaatagatcttaaataggagatgtgctactttaggtaaatagtgtctttaattgaacggcgaggtcgtacatatgtctttgcagcctctccttcaatgctctttacacttcaatgaagttataggaaactagcagcccattaacttcaatacttcatttgatgtttcacaaggtgcagcttgtgaaatgacatctcaccagcaagcttttagaaccctatcgcatctatgcttgatttcttttactgctttttagttggttatttttataaatgtaccgcttaaatttgctgatgtaattggggctctgctcgtttagtcaaagaggagtttattcttgccagtttgctctgacaacgaagctctatagcattctagggttgactccgagtgtatcttgcaggaaccaggacgagacaagcaacaataccagtactctgaataacttgtgctcacataatatagctccaaaaaatatgtatgtatgaaaaacctagatctcatttttaaagaacaagtaaaattaaaatcatacatattttaagtgaagtgtatctgacctaaaagttgtaaacatgagacatggaaattaaagattagtactttcaactttcaatcaccatcatcaggtaaaaataagaagcatctgcttatctgtagcatatatttaagctgaattaggctcatctcaaaggagggaaaaattacccattcccaagggatttaacagttccatgtgaaattcatgcttggttacttagagggatatcagtatcagactacttatatttctatcaaatgataattgtcctcaaacttagcagactcatccatggtggacatatgaggtgtcaaactcttgttcatgttatatatgcaatcttttcagtaagggaagttatatatgtaatctgacggtgtaagcattagatagaaaagaaggtaatagttatgttgttcacaaaaaagtttaaaaattgtgcacatgaaccttgataaccttatacatgaataaatataacagagaagagaatttttgttgtctaacggattaataatcagatatgcatataggatttgaccttattacatacataaacaggaagttctcaaagagacaaggtagtaattgttttgataatagaggagcactttacatggactgtgcaccaacagtagacgatcaacgaatgcaaccttatatgcattgtttccttttttttcttttgagcaaattctatgtacatatcttaacatcagggcaattgaatgatggtactcagtactcagtacccaggggatttgattactgtacagacaacatgtgcgatttaaacaagtatggactgttattgcacgtgccaacttgaattatatattcgatgaggattaggattttaatttaaaagtatattgtagaccatttattcatagattcagatatttcacaactaagacatgtttcaagatctgttctgctatgtgcaactaaggaaaaaaatgtgacatgccggattctgatgagtttcaaactgcagaatgaagttgcttgcaaactgatatgtaatgctcgaaataaaaaatcgacaagctaaaaataataataatcataccttcaggtctgatgatcaccagaactccagatgacaattatatgaaatctgtgacacaggtgagattactgatgttagctgaaagcctgaataaagctctgagtaagttgtgtaaatacgcacagatcaatgtacaacaaaaatatgtgaggatatatatcaaatatatattatctatttctctgtacttatcaattacttaaagtaaatagaaatttccaagaccataactaatcagatcattcaaaccccatggctgctgttgtcttgtggaaggagagaaataagagaagggtgatcacaagtgaggacaaatcagcatagcaggtggagcaagacaaagctaaatccttaacagaagatagaacaaacgatctacaagtggaagttgtgtatccaacgcgctgattttgttttgctactgacagaagaaaaattgccatttgttggattatgacatttcacactaaacagaatgtacaatatagcatgattggaatggaaccctaactgcacttccagtgtgctggtgcaatacagtctgttgaggtttatttatattaatttccagt

SEQ ID NO: 35913 - DNA, 539 bp, Oryza sativa
tccacgtttgatcgaaccgtccgcccaaaaagcgcacggccgcgttgtgagtctgggccaaggccggcccaacaagcctcgtcctccagcgccgtctgtctcgctcctattcctttttaccgcgaacagatgcgttttgacggccgcactcgcctttttggcgccaaacgaggccacagcgccaggcgatcatctgaacccttctcttccttttttttcagcacggattccaccgttgatcaagcacaggtgaagtaatatggcctcttctcttcctttttttcagcaaattatgtgattgtcttccacctcctccattagacagtgttggaataattcatcaaagaagcctccagcaaaatctgcatatttaagatggaagaaaacaggtctgtaaagctatggttgttacttttttcaccatgatcgggtagattttacttgttcgatgaccaccaaatcattttttttgttcctgtagagtgggtgtgctacctagtttgttacctgaagttggcatggaattcaatactgttgat

SEQ ID NO: 35914 - DNA, 603 bp, Oryza sativa
  unsure (1)..(603): unsure at all n locations
ctataagattatagataatataacatgtttgcatgatgtttaaatgtgatgattgttagtggatcatgatgtggcatcttgttaattactccctccagtttgggtttatttgtcgtttcgcacgtgatttcaaaaccaaaaagtcgttaggtagggttgttatttcctatttcgtccctattaaatacagttatgtgtagcatgcaaacaagcaactactactactctctcagttgggttagtgcattcatcttggtgtgttgggtcctgagttcgattcttgctctagacacataccccattgatttttgtcttggcgattatgcatggcaccatgcatgcatgcatgcagcccatacagcttcagtgcagatagcacgctaggcggcgagggcatacgaaaattaaaccagccaattttatccaatctgtgcttatgcgcgcgtttttccgccaaaagttttcgtttctgcttatttgccacgctaatttaccgcgcgctgcgcgtgtatttatactgtatacacccgtacttgtagacacacctttatattcgagtccacaacaagcagaaagtatagtgnaatggatctgaatatggag

SEQ ID NO: 35915 - DNA, 2673 bp, Oryza sativa
agatggtgagagcccatgagaaacttacaggagagagagagagagaggaaaaattgacatgttttgcaagtatgtatgtgtcatctgtagtatgtgactgtgagtgggtccatgaacaaactgtgaagttgatgtatccttctcctgctgcctcccctgaacctgaagaaacaaagtaataccccaatggggattttgttctcttccccttttcttctaccactactactgtttctatacatgcatgaatgactcttctactgttctatacttctacatgcatgatgcatgagttgttctttgttttaaaaaaataaatttaacctcgtgcaatcaattcattcaatgctttcacctaataatgagtaatgcaaggaggaggggggcatgtgcagtgcatttctccttctctaagcaacagggtggtggtgatgcactagcagtagtaggagtagtgaaattatggagaaaaaattcatagtagatgccccaaggaccattaaagaagtgatgtgccacaagcaatgccgacacctggggattttcatgtcctgatcttttactagtctattaatggccggtctctacctttctgttccctcgggaaggaaaggcacaacaaaagttagagtgtacaagtgggctcaatttgccctaataggatacaaagaaaaaaaggctagctaagttgatggtctaaggcacacaaaaaggccactaaactccaataatccgccagattccccacacagcatgcaggtatcaaaagattaaaaaaaaatggagatctgtctcctgcttttgttgcctatgttagaaaggtttgtacgaggctaaaccacagatttattgctctgtccggtcaataatccaaagcagcagatgcctggagaaaggaacatggaggcctaactgaactgacgtggtgctatcagcctcttaattaacttcaggcagttacctcgtgtcaactaatgaaacacaaccatagctaattaaaacaaaagtactcctacctgaagaatctagagtgaaagctttgcattacctagctaggccaccaagctaatttggaggcaagagcaccacttggtatgtatgacgactgagcaagctgcaagttgccctaagaaggtaggtacacaatttctacatgcaggacagattaagtataaaactaaggttagtactagaatagagatttgattaggaaaataaagaatgagatgcaggtctcagattcatctgaatggggggcttcctcgcggcaattgtgctagtgatgattaaacttaataggttaactaccgtatcaacagcaagatttcctgtctgcttgcaagaaccgtagccatgtgcagggggagctctccctaatgacaaaagatgaaccttatccgaggcactccagggttgcatgattaacgcctttgaaccccaaataatatatcttagcattagcagaaaagagtcatgtgagtgccataatgataaagtagaccctcacttagtctacttaacgcataccgagaaaaaggatctgtttttttatatataacaaaaaggaggccttgtcaaaggaacaactgccaagtacagactaatcacgtcatctatgttaaaaatatacagctgattgtgcatctctgtctggaactaaacccctgtcctacctgcctaattttagtctctactcaatgtagttactgccagggatagagaatacaggtttaggcaaaaaaaaaattaggtgggttaaaccaaagaattactaaacacgatgcatggtggtgagcaggcaatagaattaactaccacatgattaaaaacggttatacgagatgagattgaggatgcgtcacatgagtgactcagtgacccacacacccttggctactgggactaccagaacctgacccacaaaactggatgcagccatgcaggggcccaactcaaaaaccggacctacaagacgctatgatatacccaccaccaacaccaaggaaggcatcactactgcatcatcagccacaaggccagaaagcccgcaagatcccatttttcgctacaagaagctgctgccttcatgtagatcatgaatgggcatggtccacaaagagatggctaacccagatgaatggtcatctcttgtaggcattatttgcccttttcctgagtactaccttcaagtggttctagacgccagcttttgtacacaaacagtactttccttgaaaaacaggtgtatcatgcgcatggtggaccagtattggactgtaaggaccaaagatatggccggttctaccatgatagagaaaactatagaacagtcagtaagttggtaagggtgagaaatgacaaggacaaacatttcccctatgttatgccgtaagtatagacagtgaaaagatgttttcagtcgttgatgacaaatgccttgacgtagcaacatcataaagtaactgatcatcatgatcaagagaatatgacaaattagttttttaggagtacacttgtcgacatcctagcgtaaccaacagctcaggttttgtctattatgactgatgaacatattagaggcttttaggtaatgaaaatctgaaccaatgcgcttgctgtttttgttccagaatatcaataatttgccatactgaagccaacactagatagata

SEQ ID NO: 35916 - DNA, 650 bp, Oryza sativa
cgcccctggtcagcccgagcctagtgaaattccaagtgattgtgtgtgtgagatgaaaagcgagcacaagtctaaatgcataatgacctaatgtggcaattaaaatcatctctttgctaggtcattacccctcttaatagtacagcgaaactaaaaaataaactagcaaatttgatcgcccttcacctcgatcaattttaaaactaaaacactacttttaccgttttcttttcttcgcttcgcgccatcaaattttaatccatcgatagtcatccatgcgcacacatgacgtggatctaacttaaaatgtatagctcaaaagacaatggttagtccacaattagtgcttgtcattaattaccaaaattaacaccgggggcctagatgcttcaccggtgagcccaagggagttatttttatttttatttgctgactggattgccacgtaggcgccacgtgtgcaaacttaagtcaaaaccgctcaaaatagtgttgaggggggtaattcgtctggtattaaaagttcggggtgagtaatgtctggtttccgggtttaggggggtaattcggtcgaccaccatagtttagggggtaattcgtactttttcctactttaaataaactttgatataaaaggttttcgcatgaaa

SEQ ID NO: 35917 - DNA, 536 bp, Oryza sativa
aagacgagagaagagaagaaagggggaaaaagaagggatgtggggcccgcatcgttttctctcacttacatgtggacccacgtactttatttatttattttcgctgactaggatgccacgtcagtgaaaccactcacgtatactgccataggaccttttgtgcacggtttgtgaaagtttacgggtgcatatttctggttttgtggttaagggacctcaaaaaatctcgctgttaagttgagggacctctggtgaacttattccgtttgggggggggggatgggccgaaatccccgtgtgccatcccggccgggtctaattttcttccatggcccatatgcacgttcgcctgggccggggtggaggcaattctccgcccgatccacgccaaacccccgggtacagaaaaatcgtctcggagacggttgttttcttcccgagcaaatacggcgcttgtcttcctcgactcctcacggcgatagggtttggatgcggcgcgaggtccgggaggtggctctagctagggtggagatccg

SEQ ID NO: 35918 - DNA, 582 bp, Oryza sativa
gtaccctccgaccgaagcatatccttttcactctccatcaaatccttcttcgcctggatttcctccaacctcctcttaagatcctctgactccatcatcattttttctttttccttcaccaatgcacataattccatctggagcttctcgaccatatgattatatttttcctccacattcaaaaccttcaacccaagcatttcattttttctttttccttcaccaatgcacataattccatctggagcttctcgaccatatgattatatttttcctccacattcaaaaccttcaacccaagcatttcattttgacccttcaagctactctccacctcctctttctgccttgagatgacctgagcttcctgctttgtctcctccaattgcttctccactttacccttctcgtcaagcagctgggcatttttgttctccaactccgacaccctctccccaagtgtggagacctggtgcattagggtcctcctcttgtcatctgtgaagaagtatgcaacatatgttttagaggggtcttaggggagagagatgggaccacactgtgcaaaaggataaagatgat

SEQ ID NO: 35919 - DNA, 597 bp, Oryza sativa
aggatccccatttgattcaaaacatgttttaaataggatgtttttaaagccggaactagtgctacacagcctgcgtaatcaaagacttcaaatttccagggactaacatgtaaggacagtggaaggaatggacacaatatattggttcctctgacagaaactcacctgggagcatctgatgtcccatttgcacatgtcctagtcttccacatctggacattccatctgttataatcgagtgccgtgcatggccgacccacccaaaatacgaaaccagctgtctacacttaaaaagagataagtagtggcagtggtgaggggtgaatttgtcaccactcccaccaccaaggcatcaacttgctaagtaacattttggaacgaattaagaaaggatatatgtgggccaaacggccaacatatcaataacaaatatatatgattaggagataatgaataagaaataatggtaatagcatattcataattttcattaattaaaatcttgttaaaacgtacgagtctacgggcagtttgcttgtacacacataaaattgagtctatcgcattggggtaccgagctcgaattcgccctatagt

SEQ ID NO: 35920 - DNA, 590 bp, Oryza sativa
ccccagatagggacctaaatgtaagaatgacagatcgctataattgatagcgatcctcccaaatatctgcgtcctataaaggccttcgtcggattatggaccggactttgtgttcgcgttgtaaactttgggccttagtgaaggcccaacgttccatacgtccgggaggcccatcgcttcggatatcgtgggccggaaactgttgctccctcgcttggagccacggaggcccagagtagatctggcccgcatgttggccagtatcccgttccgaaggcccaactgctttattatccgttctctacttatgggccaaattcgtagtagctccgaattttgggcctcaaaatgggctgatcgatcctcttgtaccatcgagaagcccagagtcacattcttaatcgctgctaggcttacagcttgctagcctgaaagagaacacttctgcgaataatcattgataatccagatttgaaaaaaatattgataatgacatgtgtgatcgagttgctcgaggaggtcggtgaatccgagccggcgggtggcggatgggggattgccgtctgtcggtggcctgcttcaccccaagt

SEQ ID NO: 35921 - DNA, 1379 bp, Oryza sativa
  unsure (1)..(1379): unsure at all n locations
tttgccctttctacttgtcccaccatataacacaaattaagtatgctttaattacctgaatgacacaaattaagtatacttagagaaatctacagtatattaacaaaataagtaaaaaaacaaaatgagtatagaaaaaatgctcgaaatgatttagttgttccatcacttcttatgttattatagcaaatcacaccaaccttgcaaggcgttgcatccgtgcgctcacttgttagattcttgtactagattgtacccacatatcaaattgttgcgctaccacgcttacttctcaagtttttacactaaattgcacttgcatgttaagttgatgtaccattaatgcaatttattcatcatgtataatactatttgttattgtatagctagcttacaaattggaatgatcaaattgagttaaactaaggagatagtcattggcacctcaaaattatgggagttaggctccactgcannnnnnnnnnnnnnnnnnnnnnnnacttttcaattgagtgccggattccaactcctaatggtaatggtatgaaggttttcatcaaattttggtaaaaccaaaaatccccatcaaatttaatgtttcaaatttgaattctcaaaagtgattcaaaaatttcacacggaatagcttttgtcccacatcaaaaccttgaattttcacagtttcttgcatttttgtcaaaaatgtgaacatttactccctgcgtaaaaaaaaacttctatctcgaacctgaatatgcctatgccgaggttcctatctagaaatgttttttcgatgaagggagtaaagtggtgtttgtttttactgaaaatgaatacaaaattaggatatagaaaaaatccattagcacatgattaattgagttgtaattgttacaaacataaaaaatagatttatttgatattataaagcaacttttatatacaaagttttcatataaatacaccatttagccgtttaaaaaatattgctaaggaaaatcgatgtaaaatttaaattttaatgaaaaaggaacgggtctaataagttatggcgacagaactatttttcttcctctccaagaagcgaagaatattgcttatagatcgaatgaacatactgaccaagttttgacagaatgacaggtggggcccatgcccctaccttttttttaaaaaaaaaattcccttcttaaaacaacacaaattctcgcctccccatcttccagaaaaaaactcctcctaaacccccgaaaaccctaacctttcgtccgcgccgccgcacgggtcgccatggctctcttcgccgccgctcgccgcgccgccacctccaccctccccctcctccgcgcctccgcctccgccgcggggaccacccgcgg

SEQ ID NO: 35922 - DNA, 827 bp, Oryza sativa
aataatatagccaactactatctccaattcatctatagtcaatataatagctcattcatacaatagttacatactacactattaatacttggtctcacctgtcatactcacactgtgtcttggagtccgtgctgcagctggctacaaatctgtagcctgctacccttctctctctacatttatctacttaaaatatgtttgcagctggcttagggcacccacaatagttatctataagctctctacaaaagatccatgtcagcatatttttctacttggaagagattaaatgaagcgagagagcaaagctatctactaacatggagatagtctatagagaaaaacgaggcaatggattagagagctatagatacccatgtagatatactattgaaatggtttactattaatctagtctattgctgagatgtacatattttatagatagcaccttactttactattgcgggtgctcttatagcctgctattgtacctgctctaagagatagaaatgatgttgactaaatggtcaaatgtaatgcgaatccgtgacacgagtttgaccatttggtttcctgggcaggaatgaaatggaaatactgggtgctaatcagttggcataataatccagagagttgcacgatggagcattcgttagtgttaggtacactaaaatttcagatatagctaccaaatttcctgtgttgaccattgacaattttccagacctatttgaccattgactagtaataacatgtactagtagtaagtactttcagcccagtgggttgggccggaaggtaccgagctcgaattcgccctatag

SEQ ID NO: 35923 - DNA, 652 bp, Oryza sativa
cccccagaacgacagtaatacattcccttccatccaatattgcaggacaattcacctctagtatactaaaattcttaaaccgaatggattcgccgcgacctccgccagccacgtaacctgacttttgtgaaaaagcccctcgcttttgattagttacgtgccggtccccactacatccatcgtccgatctcgcggtatggtcgatctggccgtccgattctccggacaaaccctagccggccgtcctcgctccccaccacccactcgacgccgccttgcctcaccactgctgccgggggccgcctcgtcctccgcctctccccgccgcctccacctcctccgccgccactgtgtcgtccccgtccccggctgcctccgcctccgccttcccctcgcgcagggtgcagccgtctccgcctcctccaccgccgtcgccgtcaacgtcgctgagcaccgtctccgccgcccgcgttccgccaccgtccctccgtgccgtactaagagtaggtgtatatgcctcttcctccccctcgcgctgccgcctcggcctccccgttgcgccgtcgctgtcgccgagcaggggcttcaaggcggacgcggagaaagcgaggaggtgagtgctcctctcctcttcccttctcggttctcttat

SEQ ID NO: 35924 - DNA, 1262 bp, Oryza sativa
ttttaaattcaccactcaaatttaccttgggtttttaagcaaaaaaaaaaactttactgccactaccgtgatacttcctgcatcccaaaatatacatatttctagcacagtacattatttcaaaatgaaactatttcttcacatacgttctcctctcaaccaatcatcactattctcctttacctacttttacttatcaaccaatcacacatttcctccgattattctcacctattttttattaataaccgtaccaacctaaaaaaaatgtctacattttgggataagggaaacaatttggcaaaaagatctatgagcactcatctgtaaaaataaataattcattagggtgtaatttgtaaattgtcttgagtctttacgaacaaatccctatcctgcataccgccatcgtctctttctcgtcgtcgccggcgacgcctcccgccgccgccgaggatgccagtgagggtggtcgacaccgcaaccccatcctcccagcccacctcaggttcgtccacctccttccccactaccttctctatgctatgcacccacccctaattttgctgtgtaatccaagctttagatctgatcatctgatagagtctaatcaggtatcaggtagcttgtggggtttgatatagtgcgattttaaggtttaatctagattggtctgagttgtactgagggtatctgtgttgatccttttggaatatactcaattttttataattttggccactcacgctatgcgttatttggggagagctcggatggttttgtagctaagctgacaactaattgtaatgtattgtatatttttgaggcgttgctatgcttgtggctttgtgtcaagtgttcttctgtttcaggaggccttctatataaaccaattgttgattttgttcacctgcaattgaaatttcattagttattttgtatgtatttctggaaatagatagcccgccgtgccaatgtgccatactgattaaaatgctgcaggtcaagatgcaaatgctgggcatccgtctcctcctagctgttccctcttaagtgctggaagagtaagtctttttgtgctgttatttggaacttgaccaaggatcgaatcttcttatcggtgttgtttatggaactgaccagaccatatgcttgtaccattctttcagtgttatgctggaacccagaatgtctctactatacaaaaagaagaagcttggaaagttaatgtgcggggtaccgagctcgaattcgccctatag

SEQ ID NO: 35925 - DNA, 598 bp, Oryza sativa
ttcagccttaaacaaccacaattaacagtcctaagcagagaaacttaacaagcttttcaggctaacagaacatcaaaaggtccacaagacaacagggtcttcagagagcacatcttcaggctgtcatgcacgcaaaaaagatcagacagccagatgagagcgggtacaataaccggtagccatctcagtaaaactaacgaggctgtaggacagagaagaaaaaaggtagtaggaacgggcgacaatagtcggccagctctacatgagctccaaggtgaaaaagcctacaagataggaattttcaatttttaaaaatggccatgggcccacaagtagtgagatgcatgcaatgaaagatgctagtcagttgggtcccacaagaaaaagaaatacatctcgggattaactgctagcttactctagttaatatggacatggatggagccggcagccagcaatactattgaacctgcttaagagcaagtgcaatagtaggctatataccagctattaacatactttaaagagataaaggaagagagagaggaatagcagattacagcacggattacaagacgtaatatgtgtataacatgtg

SEQ ID NO: 35926 - DNA, 576 bp, Oryza sativa
ttctttttttgaaaaaaaaattgaatttttattatttctaattgtatttttatgcggactctaaactcatctttcaacattatttattttttaatttataatttcagttacttctaaattgtatacctatatggactctagtattttctttcaacattttattgaatttcgaattttagtcctatatggactctatgctcttcttctaatattccttattttcttaattccgaattttagatatttataaattatatttctatatgcactctatactcttctttcaatattccttttttaattttgaattttagttatttctaaattatatttatactagaaaaatgcccgtgcgttgcaatgggtaaatgctattttaattttattattgttataccgtttagttagggtaaaattcacagtgaaaactcgattggatatttttttagaaaatcataagctgcaattagtagtccatatttcatctcaagttagcatgagagatttttcaaaacatttcttgtacgctccttttatacttccaaaaggaaacaaacttaaaatccaactcaaaca

SEQ ID NO: 35927 - DNA, 638 bp, Oryza sativa
ccgacctactcagtctacgtgctacatatgttacttgttaatataaacttatttatatatgtatatggaaatactttgtatattgactgtgtgtgtattggtggtaaacacgtactgcagctgcaaggccatgcacgcggcggtcaaggagcgcgacgtcgggaaacgtgtgcgctggagaggctagataacatgaagtgggtggagaacgagcgctacctcgtcgccgcggacaacccggacacttgcttcatcatcggtgtcacgctcgtcttcgcacagcaggacatggcccagggccttttcctccttgacaaggctgccaccgcgggccacaagacagcggcctacgtgctcggcctcctcctctacaagtttacttattcacttaagtcttagactgcgttccttctactagttcccaacctctctttctcgttttccgcgcgcatgttttttaaacttctaaacaatacgtttttttaaaaaagtttatatatgaaagttgcttaaaattaatattgattcatttttgaaaaaaaaaacttaattaatcacgcgttaatagaacgctccgtttttcatgtataggagatttgttcccaacctcccacaatgaacacagccttagtctatat

SEQ ID NO: 35928 - DNA, 563 bp, Oryza sativa
atgtaacagatcatgacttgggtattttttttccttgtatgatacggaacggcctaaagtcctggtttgataatattgtaaagaagatttaggaaaccgataccgttttggttaaggtgtctatcttgtaatcctgccccccaccctatataaggtgggcaggaggccctctagggggcatgagacaacctgatcgtcaaacaggagtagggtattacctctcattgagagggcctgaacctgtctaaatcctttgtctccgcatccatccacttttaggtctcgtgcgtcacccccttttattattgccgaattcatgtttcgacaattatgtcatgcacaattatgtcatgcatgttggctataacttttatatttcaatttgagttgattgggtaaaatatagttgctacttttacctactaacacgattttgttatttctaggattttgataattccgtgcagtacagagctgaagtgttctatatttgtttgcgtgcacgtttaactactcgcaataaataaataatatatattattagatataatacatgcaaaaga

SEQ ID NO: 35929 - DNA, 677 bp, Oryza sativa
tcagctcggtaccccccatgacttgccttcttggaaagggagggcaaaacgaccaacatgatcgacggcaaaccttaacctgagcatcttgaagagggcgaaggacaggcataggtcccgccgccgcgccacaccttgatcccttcgaccgtcgctcaacttcagcagtttccctttgcattgccagaccttctcgacatccaccgtctccggaaccccgtaggctacctgtttgacttgctgcccgaactccaccttctccacctctttgccatcgacgaggtagatgtactccttcatggtttcggggtcatagttgcccttacaagatcggacgccggtgctgctcggtggctcatgctctatgtaatccaacacgacctggttctccttggtgagcccacgggagcgattcgtcgacaggtacggaagcaactcggtgttcggcgtaattttactgtggcatttatgggtttattatgtatattgggcctgttagctttagaaccttttaatgtaagacaatggtagcttgcatattatacagagagggtcttgagtttcgtcaagaattttggtttcggttacgttatatagtcagcgttttattggcctgtataatttacccgcgcgaagaattctacacacattattataaattgtcaataaaaccatat

SEQ ID NO: 35930 - DNA, 1189 bp, Oryza sativa
ccgatcgccggaagcgatacagcctccgccgggagcaaagccaacatactgccattctcgtgcgcagcactatcgccgccgtcgggcccagcagcagccgtccgcttccaggaacttgcttccgtcagtctctctagcgatataagttcttgagtattaaaagcctgagcccgtgataatatataactactgcatgtttgcatcagacttgtttgatgattcaggcttcatccgcttcaataacaatggatacaagcaataattaagttaattaacaagtctaattctctacaaacacttgtgaatcggtacatatgttttttttataaaattcttcttcacttttttaaaattgctgttgtcgcatgccgccgcggggcttccctgccctgctgctgctgcatgccgcactgctgcttcggccacctgccggctgcccttgccgctgcgagctgccgcagctgcgcgccggcagcggctgctttgactggacgcctatcgaccggatctaactgagaaaatgcgaatttacaaaattaccccctatataaatagatgaaaagacaaatataccctattcaattttatactgcaggataattaggaagaagatcagattaatttacaccgttagatcaaatataatggcagtatatacttgcagtacaatgtaccataaaaatcctaaaaagaggaaaagagctaagtagtattctttctttcaagtttcaagagcatatatgctcttagtgggttttatttaattcataacaaatgattaaaaaactaatatgtttattaagtatcaagtgcgcgatatggcaacaactattggcataagtgtttgcgtccctcaacctataagctgagatcgattagtatccctcaattataaaactaggtataacacactaattatcaaaatcagtgcaaattaactctctctcggtggttcttttgagcggtctcatttaacttattattttgactttgtctacacacatactatgtgacgtttatgtagcaatcatatattctaataaaaaatcagaaaaaccatactccttttttctttgctcctaggggttgtattttctcctactctattaagtgaaaaggcatctagtgctgttttccgttaaaaaaaaaaagaaaaacagtagggctctcatattagtcatgtggaaaa

SEQ ID NO: 35931 - DNA, 579 bp, Oryza sativa
cggcggctcgagcgcttgatcaaagagtactattagaaatccaacataaatgtatgctcattatgtacgtgaaagattaggggtaactatcatgtattgagtagactttgtttcgtattgataaaatttctagttatttcctaattgtatttctatatggactttatactctacttctaatattctttatttttaattccgaatttcagttattttctaattgtatttctatatggactctatactctacttccaatatttcttatttttaattacgaatttcagttatttcctaattgtatttctatatggactctagtttcctcttctaatattccttattttttaattccgaatttcaactatttctaaattgtatttctatatggactctgccttttctttttctccgattaatgtgagaatttctagcccatgagagcgaacgtggaggctcttttttctattcctttaataatataatagatcgatcaaaaccgactagggaattagaaggttggacagagatggtagagagataaaaatgagagtatatataggcaaacggtgttgggtgtt

SEQ ID NO: 35932 - DNA, 574 bp, Oryza sativa
aacatgtccagaggtagctagtgggactcttgcctcgggtaatgtactgctcaggttcctcaaaataatctagctcttcaacctccaaaaaggctcttcttctaatttaaattgtaaagataaaactaaatgaataaataatacaaaaatgctaaaatgttctaattaacatgcatgattcttgtgcagtggtttggtagctgattttatagaattattggtgaaggaattgaatttatatttttacatctagcagtcgtcccttgtcgtctggtgcgattggaatctcaaacatttggtttggtgggacagcgccgccaccactccaccacatatgaatcgtccatgacaacgaacgcgaccggccggcttctcagagtagcgcaccaattaatccaatccatgaagaagccgacaatacgaggacgagcagcagctaggtcgtgtacattgaactccatcaccataaatcattcattctctgttattctctactttgggctgctctcattgataccgaagcatggttggatgtcaatatggaattaaaaatctcattcgtacttgaactttt

SEQ ID NO: 35933 - DNA, 604 bp, Oryza sativa
ctgctgatagacataattaaaatgcagcacccaatttctgtgcatcaaaacaaaacaaattacacaaacagcacccaattaccaacgaaacgccatacctattcactgaacattctgaaaacgcacgctaaggattaacggaagaagcagaaatcaaacttctcgcagtatatccaaagaaaaaccccaatcaccaaacagatatcacagccaagctttccaaagcgcgcaatgcggcgtaccagagctgcggtggcgcggccgctgcacgatgttgcggaaggcgacgcggggctccgcctcgccggcccacctgcacggcaccaaaccaccacgtcacttcacagaatccacgtacggaacggaagccctgctagggttagggtttggggggggggggagtttccgggcggcggcgggtgggaggtcgtacccgatgcggaaggtggaggcgccgttgtcgatgacgatgggggtggtgctcgggaagccggcgaagtcggtctcccggtccgggcggtaccccgacggcatgccggccggcggcgacgggctcgccggaggcggaggcggaggggtaccgagctcgaattcgccctatagt

SEQ ID NO: 35934 - DNA, 649 bp, Oryza sativa
cccagatccggtcgtcgccggctcatctcctttctcgtcgccgagctcgtctcctctcccgtcgccgagctcgtctcctctctcgtcgccggcttgccctagccgccgagctcgcgtcaccctagccgccgccgtcgagctcgcctccatggcgtcgccttgcctggccgccgagctcgcctcgtggtgagaggggtgacgcgacccacatgtcgttcgcccctgctcgcccgagcgctcgggcggctgcatccggccgaatcggccggatccccccatccggcatctagggggaatattcccctccgggccgccctatcccaccttcgctcaggaaccaaacacccaaaaaaaaatgggctgccaagctgaggattgcggattgcggtcaggagatgggacccaccatccaaacacagttgaggattgcggtcggcggactagagatgggacccatatgcaagtgagcgccaccttgtttctcacacccacccctctctctctctctatagtgtctaggggtgtgattaataaagtcattaaaccgacatgctaaggggccatctgggaattgggacacaggactactatcaaatggtccaatttgggcctattctatatatactcttctcactaaacaaacgcgagt

SEQ ID NO: 35935 - DNA, 687 bp, Oryza sativa
ttaacgagtggcaaaaaaaatgtctcgcggccgtgtctgatacataactttgccaggagatctatctgttgatgcacacaaccgggggagtcagacttttaggagtcggacttctttttttttcgtttttttatttaaacggtgttttttctcggacttttttttttccttttaacggatccgatctttttttttcaggggaatcggactctttttgttttgtttttttttcgctttttttatttattaaacggacgaaggaaacgtttcttttttttaagtagtagtagattataaaaagaacagctaggaagaactctgttgtcaaaatttgcttagcatatgtagtactccctccgatcattgacgcacaatgtttttacactaaaattagtattaaaaatctcatatattaatgacgagacagagtgacaccttactactctgcatagtaaaaaaaaaaccatccacaatgcaaatagcaaaaatttgaaatccgtgcaatttcatgccattgaaatcttgaatgaaatgatatgatagcacccttagggtccctttaaatcgcatgattgaaaaaacataataatagaaaaaacatagaattttgataggaatgtatatataaaacagatattgcaaaaacgcagggaaaacataagaagggtagtttgattgaactgaaaa

SEQ ID NO: 35936 - DNA, 633 bp, Oryza sativa
tcggtacccctcaagggctcaaggctgttgtctgcattttttcttgtgatgaacaaagaatggaagacgccattgataacttccaatggtcacaagagttgaagctttggggtttcattttgcgctgatcccagaaagctgccctggatagtctgtatgatataccggagatttgtatctactatgtgccattgaccatatattgcacgcacgcagcgtagcgcgtgtatctttctagtgtatcttttcttaaggtgccccacttcaccacatgtacgatgacacattcgtttgaagcaactttagacttgtttttttaataaaagagaaacattatactatgttttagaaaaaacgaaacactatactaattttaacaaatggttgtatttggcaccactaattcaatataagtaattaggtaaaacgaaaatgcttacagaaatgaaaataaccgatagtagttgttaatgtaacagtaataatgtagggcctgttcactttgctgtcattttcaaccttactaaattttggtaaagttaccaaaaaagtggctacatttagtttgctaccaaattttggtaactatataagaaatcatgtcaaaattttgacaagtttgccaaaattttg

SEQ ID NO: 35937 - DNA, 566 bp, Oryza sativa
ctatagggggaattcgagctcggtacccatctcatgcataaagatatacaaagccgagttgacaaacttacgagcctttggatacgacaaatggtccaaatggattgttagaccaacacaatgcaagcctgcaagggacaccagatcaaggtcatcaccacctgattggcgaaaaacttcaggaatactgttgcatactgttgagagcgctatcacgattggtaaagggacattagaaagcatcacatcaatgttaccccatcacaaagagatcgatcagaataatggtcgttgtcaaacaagcttcaatttcacacccaggtcagctagcagagcacaaatatgggttgacaaaataagtaaaacatcaatttttattcctagttcattttgtatacagtactcgcgtttgtttagtgagaagagtatagaataaggccaaattggaccatttgatactcatgtgtcccaatgccccttgttatgtcggttcaatgacttttaataccaccaccaacaactcaccacaaaaaactactcctacattacttatcggttatcacaag

SEQ ID NO: 35938 - DNA, 561 bp, Oryza sativa
tagggactgccggactgggaagtggaaagggagaggagagagagatgggggaattattttggtactttagtctgaggtagaagacgactgttgtctgcctcaagattcgtgcgaacacgtgtcattcacaaaatgaagtctttccagatgagcgaaggactgaggtcctgtgtaattttcttccgccgcccgcaacacaacaaggtcagggggcatgtgggccccacttgtatggcccacccttccccacttgtatcacccaaaaaaaccgaaaaaaaagagaggaaaggatggcttctagaaggagaagcgccagaagcttccaaatagaacaattcggcgtcggcgtcgacggcgagcggcgcagagagacgccacgccggcgacgacgccgcctccatggcaacgaacgagtcccctaccgccaccgaaacagtggtactaccagcgggcggcagcggtggcgcgattgaattgatgatgaattaattggtgaggagaaacggcgccatgctcgccggcggcggtgccgatatgcatggatccatggagtattccaaa

SEQ ID NO: 35939 - DNA, 675 bp, Oryza sativa
ccccgatcgtgatgctcataatctcttttagagagtactcgatttgagttatctataagtttataaaaaaatataacaacacttttcatataaaacaaatatatatattatcaaaaaaatatttaatgttatattaataaaataatttagttttgtagatattactattttttctatcaacttagtcaaatttaaagaagtttgataataaaaaaaaatcaaaatgatttataatatgaaacgaagggagtagtaaatagtaattacgtggaaatacgcacatatcgtgtggttctatgcatacatacaatatgcttggtttgatatacgtaacaccctaaaaattagaccgacaaaaatctaaactccaaaaatatgggcattcaaaaactctttttgaataaattgtatcatgccgattttgttcgattattttattggaatttgatttcggagtttataaatcgcgaataatggataattaactaggaataaaccctaaaagtaaattgacaaagtaaataatttaagtgcaagttaaaataagatttaaatgagtaaaatattattacgaccatatttgtatcaattaaatttaaatgtgatggaataagaattaaccctaattaaattcgaataaattaaaaataataaaataaaatatgggtagtgata

SEQ ID NO: 35940 - DNA, 555 bp, Oryza sativa
tttttgtttacaaataagattgcatgcaatgatgaacatcctatttgtaattatgccatgccttgattattgatcacctataaatccttgtaaccatgattacgtatgagtccctagtcgattatgacacttgcttagaaatactactttagaatcttgcatactcatatttatcaaatattatatgcttgggcaattacctttggggaggtaattgagatgcggcatgtggagacatgagcgccacattgccatgataatgataacatgatttgtgaaattaggaaagaaaactaaacacttgttttagaccggggcggacggtggatttgggtggtatccgggaaaggctagtaccgtccccggtcaattaaggaccgagccatgaagttaagtacgaaacgaccccgtacaccacacttctcgaatggggatagacctagcggagtaaatagccgagcggaggcagtatccatgcatagtggtttctcatgtgtaaggcaggggctctacaatggtgtcgctattgttaggactgccatgtgatgagttgaa

SEQ ID NO: 35941 - DNA, 942 bp, Oryza sativa
tgatctcaattaaaaatggctaagcaatcctttttagatttttaacaaataccaaatctaccctttcatatactgcaagtatatactttaagtagaatgtactgtaaaagtcctctttttttcgccccccatgtagttaagctggcaattaatcgtttttttgttcatacttcatttgaaatgtgtaggatcaacaaaacacacacacttgtgaatcgacaaacgcaacctgcaggtgctaggcatgcaccgtgaattattgtatattaatctgtcaaagactcaaagagcagcaaaggaaatgtctcatagccttgttaaacataactttgccaggagatctgtatgttttgatgcacacaagctgttatgagggttgctagttgctactcacttgctcttacatgcacttctgctggcataagatgatagtctggtagaggttctgttgttgagccctggaagtctggaacacagccggtgctcagaagaatttcatatcactacggcgtatcaggatttgatagagcaatttggtatgttcggtgaaagtcatacacatttgagcgattgtacagtactcagaaattggtgttttatatcctctggtagttgtggatcactgtattgaggaatcaacctgacgtataattgccgggtctgtaattttgtatatgtggagactggtgtgtataccaattttctgctggaatgtcatgcaatgaggcatgggcaaattctcttgtagggctttcatcgttcattgagtttaacatagctataacagtactgttttatatgacaaaataacagtactattttctatgacaaaatttgtgattaaactgtgttcacgatttcttttggttgtgcagaaaacaatgaactgataaaacatcctagagttagtgaattttgtgctggtgtaactgattctgaagg

SEQ ID NO: 35942 - DNA, 1047 bp, Oryza sativa
ctcggcgacgagaaaggagatgagccggcgacgaccggatctgggagggcaccggcgagagcgagcgacggcggccggggagagaggatacgaggtggcgaggtgagagagaggaggcgcggcgacagggttgccggcgagagaggaggcgaggggcggcggcagagaccttcaggcgagggcggagaccttcaggcggcggcgaccttttcttttttttttgtctcctttcccttttattcctttctgcttttttatttctatttagattttttagtatattgatatttttttggtgagaatttggaggggtatactcaccacctctaatgaaagggtgattgcaaccacttatccatcccactcccccaaccaaacaaaaaaatggatcaccatatccactttcatccctacaaccaaacaaaaaactagatcgtcatattcactccactaaacaaaaaactagatcgccatatccagcaaaatatggaccgccatatcccatccaaccttgaccgggaaccaaacacaccctaacagtcgcgcggcgcccacgattggtaaattaagggacattagaagcatcacattaatgttaccccatcacaaagagatcgatcagaatgcatggtcgttgtcaaacaagcttcaacgtcacactcaggccaggtcagcagagcacaaattggtagacaaaattaaataagaaaaacatcatttttagtcttcttttgtatacagtactcgcgtttgtttagtgagaagagtatatatagaataaggccaaattggaccatttgatagtagtcctgtgtcccaattcccagatggccccttagcatgtcggtttaatgactttattaatcacacacctagagactagagagagagagagaggggtgggtgtggaggaagaaggtggcgctcacttgcatatgggtcccatctcgaggccgccgaccgcaatcctcaactgtgtttggatggtgggtcccatctcctgaccgcaatccgcaatcctcaacttggcagcccatttttttttgg

SEQ ID NO: 35943 - DNA, 735 bp, Oryza sativa
gcgcgcgggcagtcggctgctcgtttgcttttttttttttgtaatttgtgtttcattggatctataattttttagatgttgtgattcattgcatcacatggatctgagatgtataatttgtataatctgtgatgtatttaatttgtgtgtagttttttaggatttgtgatgtatttgatctgtgtgtaggatttgtgatgtatttgatcttaatatttaggatgttgatttggagatatgcatcccatttgattcgggagaaaatacagggattaacactagccattagcaaatcaacaataaaataaaataaaaaagatctcgaggtctttagtcaccaaccgggactaaagattccccctctttactcccggttggtgttaccaaccaggactaaagatcgatctttagtcccggattcgtagtcccggttagaaaaccgggactacaaagggttctaaaccgggagtaaaaagcatttttccaccagtgcacacacaatttttctatcacatcgtaccaatttcaaccaaacttccaaacttcagtgtgaactaaacacagtctaaataaagaacaagagattacacagcagtaattctaaaaaaaaattacacagcaggaagttttctagcggagtttagcgaatctgccattacataaaatcaaatacaagaagataaatataaagaggtgacgtgtgattaattgagttttactccctccattccaaaa

SEQ ID NO: 35944 - DNA, 607 bp, Oryza sativa
ttctcttcagtatgctgcttaaaacgcaaagtgtaaggttttctctgtgctgtccagttacatctaattccttatgtttaaagactgatattagtctttggttgggtgtgatgtgcttcttgttaatcgcaatacttgatctttactatgatactatcggtgcatatttagttccagtatgcccttttagttaagttgctgaagcattgagcatcttgtcatgttgatcttcttgtgagtggttcaatatgatttgttctgttttaatggaagtaaaaacgagggctgtcccctcctaatgggaagagaaaagagatgtatttcagcaaccatgtgttatagtacaatccaattagtttgctaagctattatggccgttatatcctgctctgattatttatttgatttgctgtaaagttattaaatttttggcattgttatacatgatttgtacttgattatatgctgctattggtggttcatgtaattagagctgaatgggatatttgctagaaacacattgcttctttcaacaacccttatgtaaaccaaaataaagtgctggtttctctgctgcgctgattcccattggtccatacctgaaact

SEQ ID NO: 35945 - DNA, 586 bp, Oryza sativa
cgtaggttggttggatcatattcctacgtcggcgcagacgtgggcgccgcgcgactgttagggtgtgtttggttcccggtcaaggttggatgggatatggcggtccatattttgctggatatggcgatctagttttttgtttagtggagtgaatatgacgatctagtttttgtttggttgtagggatgaaagtggatatggtgatccatttttttgtttggttgggggagtgggatggataagtggttgcaatcaccctttcattagaggtggtgagtatacccctccaaattctcaccaaaaaaatatcaatatactaaaaaatctaaatagaaataaaaaagcagaaaggaataaaagggaaaggagacaaaaaaaaaagaaaaggtcgccgccgcctgaaggtctccgccctcgcctgaaggtctctgccgccgcccctcgcctcctctctcgccggcaaccctgtcgccgcgcctcctctctctcacctcgccacctcgtatcctctctccccggccgccgtcgctcgctctcgccggtgccctcccagatccggtcgtcgccggctcatctcctttctcgt

SEQ ID NO: 35946 - DNA, 734 bp, Oryza sativa
ttatatagggggtaattttgtaaattcgcattttctcagttagatccggtcgataggcgtccagtcaaagcagccgctgccggcgcgcagctgcggcagctcgcagcggcaagggcagccggcaggtggccgaagcagcagtgcggcatgcagcagcagcaggcagggaagccccgcggcggcatgcgacaacagcaattttaaaaaagtgaagaagaattttataaaaaaaacatatgtaccgattcacaagtgtttgtagagaattagacttgttaattaacttaattattgcttgtatccattgttattgaagcggatgaagcctgaatcatcaaacaagtctgatgcaaacatgcagtagttatatattatcacgggctcaggcttttaatactcaagaacttatatcgctagagagactgacggaagcaagttcctggaagcggacggctgctgctgggcccgacggcggcgatagtgctgcgcacgagaatggcagtatgttggctttgctcccggcggaggctgtatcgcttccggcgatcggcagcggcggcggcggtgacggcatcattgcgtacgacagcggctgggcggcgcttgtgggactgtgggagccacacgcgagacaacgtacggctgccggcgacccgacgtaccgcgtacgaagtagactgaattggtatcacgaacggatgacgagatccgaaaaataccaccgatggaaaaaa

SEQ ID NO: 35947 - DNA, 643 bp, Oryza sativa
cggtacccccctcaacctataagctgagatcgattagtatccctcaattataaaactaggtataacacactaattatcaaaatcagtgcaaattaactctctctcggtggttcttttgagcggtctcatttaacttattattttgactttgtctacacacatactatgtgacgtttatgtagcaatcatatattctaataaaaaatcagaaaaaccatactccttttttctttgctcctaggggttgtattttctcctacattcgtatttttttctctcggtttttaatatgtagatatacaaagtttatatacacgtatgcaaagtttatatacgcatatgcaaagtttgtatacgcgtatgcaaagtttatacacgcgtatataaagtttggatatgtgcatattttttatacatcgattttttggtacacataaaaattatatatacacgtatgtatatactttatatatatatgcataaactttatattatttaatacaaaatttatatgtatatatacaataatacaaagtttaatatacaatatatacatattcatatatacatgtagtagtagcagtagtagtgtatgagttgcagatttgtagtagtagtagcagtagcgtatgagtagtagtgg

SEQ ID NO: 35948 - DNA, 627 bp, Oryza sativa
atcggggcatattaagttccagtatgccttttaagttaagtgttgaagcattgagcatcttgtcatgttgatcttcttgtgagtggttcaatatgatttgttctgtttaaatggaagtaaaaccgagggctgcccctcctaatggaagaagaaaagagatgtatttcagcaaccatgtgttatagtacaatccaattagtttgctaagctattatggccgttatatcctgctctgattatttatttgatttgctgtaaagttattaaatttttggcattgttatacatgatttgtacttgattatatgctgctattggtggttcatgtaattagagctgaatgggatatttgctagaaacacattgcttctttcaacaacccttatgtaaacaaaattaaagtgctggtttctctgctgtgctgatttccattgttccatagctgaaacttaagtaattgcaaaatttgcaggaactcatctgtttttttactcttataataaatgtgaggtatgcattcgagctacaggcatgctatgtgcatgcgctctctatctgaaccaatagacttttgtaaatccgtttgtacaggacattgagttcaactaaaattctactatgcccaat

SEQ ID NO: 35949 - DNA, 645 bp, Oryza sativa
acatcgggtcaaacgtcgaacttgacacccaaaaattttcttttcgcgaactaaacagaccctaagagcaagtttaggggcataagatggtggcatggtggaggttctgttgttaaaccctggtatcaggacttgatcgagcaatttggtatgttcggtgaaaattcatgctcatttgagtgattgtacagtactccgaagttggtgttttctatgctccggtaattgtggatcactggtataatgaggaaatcaacctaacgtataattgccatggtctgtatttgtgtgtatgtggagactggtgtgtgtactaattttctggaatgtcatttaatcagaagagttgtttagaagaggcataggcaaattctcttgtaaggcttatgtagttcgagtgtttaacatggttataacagtagtgttttctatgacgacatttatgattaaactgtgtctacaattcctgccttttgtgcagaaaaagaaaagcactgataaaacatcctagagttgagtgcattgcgctgctgcgactgattctaaaagcttgacagcaagagttagaatagagcaatattctgcataattttcctgcatctgtgaattttgctactcttgtactccctccgtcccaaaatataa

SEQ ID NO: 35950 - DNA, 613 bp, Oryza sativa
atataccatcatagaaatagtataaggagacagttgcatataatacaacacttattttttgaatatatatttcatcattgtacatatatatatttagacagctcaattatatatctttctgacaattgctaacacaatatttattatacaaaagtttgcttggaaataacataataaaggatataatgaggcaataagaactgtgcgtggagggccggaagataatgtctgtcatggccggcaagatggacgagctctggatagggcgtatggagtggtgcgtgctggaatgtaacaagaacgccatcaacttctacgagggaatgggcgagccacgcaggtgtgctcccgtaatggcacatatacagactcactggcgctgcacactggaaagtacaatgggactaagagaagggcaatggggcgaaatagatcggtggttgattcttagttgtccagtctcaagtaataaagaaaccggagatgtgtgatttagggtattggataagttcgtgatgtcttagcttgatgttctttcaaatgtagtacacaatctttgcagaaggttaagggaaaataaacaaattcttaaattataggaaaaggcaaaaaa

SEQ ID NO: 35951 - DNA, 706 bp, Oryza sativa
ttgaagaattgttcatttgtttgtaaatctgtgcttgtaaatctgtgacgtgatgtatgcatgatttgatgaactggtgacttgatgaattgtttgtgattctttgacttatttgatgaattacatgtgaatttcatgaatttgatgtgttatgtcaatttgttgtgttgaattgaacctttgaaggggtttttttgccagggcgtgcctaggccggcacgggcacaatgggctagccgggccgtcgggccagcccggcacggcccgaggctacttgggccgtgcctgggccgtggttgtagcccgtgggctggcacggcacggcacggcttgttcgtcgggccgtgccggcccgactgacctcggcccaggcccggccgtgcctgggccgtgccgtgccgggcggcccatatggccaactatagctccagaggaggaagaggctgacgaggaaggtgccacggagctggcctttgtagtagaggatgaggaagaggaggtagacgacatagagggcctggttcatcatggacctcgtctgctggctgctgtcgttgaagctgaacgccgtcatggtgtcggcgctgccgaggaggaggaggaagcaggcccagacgacgaacagctcgttctggatggacgactactgcatcaggccgatggtgtaggagatcaccgggtagttaaacatgaaggctccccagac

SEQ ID NO: 35952 - DNA, 594 bp, Oryza sativa
ctatagggcgaattcgagctcggtaccggtcttccgaattttggtagttcagaaaccttagccttctgttgacctggattgcctgaaattagtgtatcaaaaataaatagttcaaattttctatagcttccaccattacaaatagtgtatatatactccacagaaatgttaagaaacaagcactttaaaaggtccaaaagtcaaaccatactagtactagaataaatgttacagtattgttttaccattctcatttagttaaaagaatataaatatcattagtatggggctatgggcttattaggatgcatccaattaaagagcactagaaataccaatgatgattgcacaaccaaacatcaaataaacgaagcttcattttaaatgtaagatctagggaaaatgaacaatcagtatgctatcacttcaggtctgaccaaactaccatgacatttaaaacgaggggaatcatcatgtacatctacaaatatagccgcttatgtgtcaactatgatcatcaacaagtatgcgattaactcaaagaaatacataccggcaaagataacaagaccatctgtagaaaaccttgctaaa

SEQ ID NO: 35953 - DNA, 712 bp, Oryza sativa
aaaattgacatttttgggatggattttgtattttggccttgaagggatgtttgcaggggggttcaaggggaggattcgaattcgcatttgggatttaaatattggaatttgaacttccaattcgagagttcgcattactaatataataatttacttttgttaattttatacttgtattgcatatttgcaataatacatttatgatattaaaaaaattatataaaacaagcatgatggcccgcgcagattgcgcggctagcatcattatattctctcatataataacatatatgttttctcaatgtattatttaaatatattaaaatgaaaacataatttcaaattttgtactaactttacggaactactaatgtgtaatattcatattgtattttatatacgtgttaattattaattatagttattaattatttttaatatcaaattttagttatttgtaaattatattcctatatggactctagactcgtcttttaatatttcttttttataattctgaattttcgttatctgtatattggatttctatatagactctaggatcttcttccaatattatttatttttatttttgaatttttattttttttttctaattgtatttctatgtggactctaaagtctaaactcatctttcaatattctttaatttttaatttttaattttagttacttcctaaattgtatttct

SEQ ID NO: 35954 - DNA, 684 bp, Oryza sativa
aacattattgctttgtgactaaattggttctaaacatgtagttttgtgataatttagttactaaacatgtagttttgtgacacttcatcttaaatttgtagttttgtgataaatttggtgttaaatgtgtagttttgtgatacactgagttaaatctgtagttttgtgataatttggtcatagtatctgtagttttgtgaaatttactcttaaaattttaaaatatagaccgtatatgaaaattttaagttgattttgtattaaggttgtttggtttaagtactccctgctacttttaaaaatgttattttaggtatgatgaaattaattgagatttgaatatgagtgggtacatagatcgaactgacatccacctttaataaactccatataattcacatttttttgcatgcaagtaaacaagcaagaacaaagttcctatcccttagtattattaggatcttcttggactgacggttcttttggctctccaaccaaaagttgcttctcttctgactctccaaacaaaatttgtttgaattttgactcttcaagtaaaagttgttttgactctccaattaaaacttgttttaggggcctcagatattgatagtcctttaatagcctctcttctgaaagagcatcatcttcttcttgtggagtccatagaatttgaacaccctg

SEQ ID NO: 35955 - DNA, 610 bp, Oryza sativa
cagtggataattaatcctcagttacaaatgaaaagattaagttggagaaatgcatgatgagcagggccggccatgtttctgatgatgataacccgatcgatcaactcttgaatgatgcaaagatcaagaggctatcgttctgtcctacaagttaataaagcgacaaatacaaatgcatgcttgagttgattggattcgaagactgtgccatatgcatgttggaccattgatcaatcactaaacaatgattagaaaatcaccaaacaagtcgccggaaccaactagtcttggtccccccccccttgtggatcatttctaccgaatccttgttaaaagaagagagaaacagattatggtgttggagtagtttcccttgctaaaaccacatcgattggcagctgcttttatatcggtgagaactgagaaaggatataagaaaattcagaacacattaattaattatatctgacaatgttgttatcatactgataaactaatatagcaagaaagcattgttggcatgcggcaacaaacacaagtaatttgcctctagctatatgttttgaataaaagccacaaatcttctaaaccatactcctgacaaattttt

SEQ ID NO: 35956 - DNA, 701 bp, Oryza sativa
ccgtgggagaagttctggatcagcgtcgcggtggtgctcggcgtcggtgggctagtgttcggcctcatcttcctcatcaagagaagcatccccccgccgaggaccatcagtgtggtcaagcttcaggttaatttctctgaatctgatcttagagtgtccatgagcaattcagagtttcagactgggtttcttgatatgatcagtgatcgatcactgattcaaaattgtatatatactgattggatgatctatcttcgtctctgttactcgcaatttagattgcattgggtggtgtggctgcggcgaagtcgttccagaaggatctgaaccggattgctgagagggtgcaaggctctagccgacgttggtacaagttcatactgagcggtaatgcctattctgaatttcttgcacatcaaatctatttattctcctcgcaaaaaaaaaagaatctatttattctgaattcttgcacatcgaattctgctttggtggttccatgctaattacttaattgcagatggattatatttgacactagctagtagctttaaatataaatcgcacttaaaatgtctttaataataagacaagtagcaacaaaattaataatatttacataaatttattgaaccaagacaaatggtcaaactttgtagccaaagtcattcacgccaaatatttattatcggagggagtag

SEQ ID NO: 35957 - DNA, 971 bp, Oryza sativa
ctacgataaacggaactttacgctagcttgtgcttacgatgcaacataatatcatgacatcatttttaagtatttactccctccattcaaaaagtctaatacctatttcttttggcaccaagaccaaggaatataatactcatccaccatgtgacaaaattaatgaacatgcaaccaataaatacaaaaatagctttttaggtttcgatcaaccatttaatttaacacatagtgataacaaatagaacttaagacttttggaaaagccatagaatggaatagatattagacttttgaatagagggagtataaaatagtaaatttcacaaaattatatataatttaatcaaaatatcaaagtatactttagatttaataaagtatcgtataataaaattacagatttagtaacgaagttatccaagtatactttagagtttatatccatatataacactattgagtttataaaagttatagttatatgataaaactgatattaaatctgtagtttactaattaatatgatatattaataaatctatagttttgtgaaaaaatattgtttaatatgtagttttctaatatacttttttaaatatgtaattttgtgatagattgatcaaagcagtggcggatgcaggattaaaataaaaatggggcgaagatgctcatctcaataagaacaactaaacgcaaaaatatcatatttatgttgtaatcatataaacatatagtataatcaataaattaaggcaaacaaaaaaacaaaaatgatattaaaataaagtaataaattttgcgccatacataaaaagatagatattaaaatcgtagacgcgtgacaaagtcagtggcatataatagattctctcaaaaagatactagtaaacatatcaatttgtaaatatgaatcaattcataaagaatggttgatagatatcttttaaaaaataaatatatgagaagat

SEQ ID NO: 35958 - DNA, 569 bp, Oryza sativa
aataaaactatgaggtgggccccccaccaccaaaaaaaaaaaaaaaaaaaaaaaaactgaagaaagaagagaggagaggaaagagagggaaaaggaaagaagaagagaacctcgcggggtggcatcagcccacgcaggccctcagcattcagtgtcattgagcatgtaggctgtgcaccacctgtgctacccatgagacgatcccaggtgcctgtggaacgcagagcaagaacaccactccctccctctccacctgcatttccatcttgatcatatggaggagaaagtcttagtttaaagctagcctgtctttgacactttcctactccctgtcaatctccattttaaacaatgaaaggcccggtctcaggccataactttggcaggtaacagtgtaaggttagaatttaatgatgccatgtaagtttcatatatatgtatgtttagggttgccatctatgtaagacaactgaagattgttttttacttacactggtcataacaacttttaagaatccagttcaagtgagttgataaaaaggtcaagtccataatagtgcaggtggttc

SEQ ID NO: 35959 - DNA, 1267 bp, Oryza sativa
ttcaagtcaaatttcaaaaactttcaacttaattgttgaaactttcgacttaattttgaaaactttcaacttcaatttcaaaaactttcaactcaacttgaaaatttctatgtcaaaattttaaaaagttgaaatcaaaatttaaaactttcaactcaaatttcaaaatcttttgactacaaatttaaaactttcaattacttttctaaaatgattggtaactgaattatttatgtttgttacggttttaaaaataatactaataacagtaattaccactaattatcataattagcggcggcagcgcgcggactagtcgtcagggggacggcgcgcctgcgcaagttaagcagcggacgcgcacgcgcttcctaggaacccccaattctttggtaggatagagttcatataatatgtgtttggtttgctaccaatatgctttttatagtgaagaaagttctagagtactaccaaattaggtatgggtattgccaatgcattggctctaatccaaaccaatcaaactactatttaaattaccaaacaattggtatggcacattttgaaatcaatccaaaatggccctaacatgtgcagccggaaacaaacacgagattcaatcgtaaattctactttattttggcactcgttagttgtgcgtttagataaaagataaagttaggccatgaactacaggaaaactattggcacatgactaatgaaattttaattattattataaacttgaaaactcgatttatattaaaatgacttatatatagaaagattacatatgaatgcaccgtttattagtttgaaaaacatgctaacgaaaccggagataaaatttataccttattcagaaaaataatgaaacttcaaaacacaatttaaaatgcatcgtgagcgatttgagtcagtttcttttttataccgtcagaccactggtccgtccacctcccatttcttttcttttatcccatggatttgtttcggtcccacaaactatttcttttcttttattccatgatttcttttattccatgagatttgtttcggtccaacaaaaagtacctcaagttaccggtatctcatggtaccaaatcgtttccgatcgttgtttctaacaatgcccatcctaccgagttaaatccaaatatatatgcttcatatatgtgtccaaattatataaatgttatttaatttagatgatgaatagatatcaaaacgtcctttatatatagtatgaaacagaggaatatgcttt

SEQ ID NO: 35960 - DNA, 680 bp, Oryza sativa
caaattaatagaataacatcaagttatacataaatgcttctctaatgcgtgaagccgattgtagtggcgagactttctctgtctattgccttgaaacatgggtcccatatcgatgtagttgtgcacctccagactaacctggagtacaattttaatgcctaatttactatcacatccttatcgagttgtgcatcggtaagtagtaagttgagcactattggtgactgtggtctccactgggaccgccttaactcccatatgtacgtccatgttatacttatagcaacgtagcaaactatgttattcatgcttatgcccttcatgaaaggaaaaagagaagatggatgtgatcaaaagaatgttttttttttatgttttgagagtagattcatggtatagagtagacaccacgtgcttatggtgttaaacattatgcaatttgaaaatgagcgaagttgtaattcgacggtactaaaagagaagatggagatgatcaaaagatttttttttttaagttttgagtagattcctggtatagagtagacaccatgtgtgtttatggtgttaaacatttatattttgacaaacatctatagtttagcgcttggtttattttcaatacttaatgttgataatcacatgagacaactttactaattcgaagaatatatttatttttt

SEQ ID NO: 35961 - DNA, 632 bp, Oryza sativa
aagggtggtccactatacaatttttattatattaactagcacatatactataatttcaaattcttaggtggtccatggaccacggtgccacctagctggctacgcccttgaattgcgccatgatttgacaatgtgttgctacagtaaatatttgctaatgacggattaataaggcttaataaatttgtctcgcaatttcctgacggaatctgtaatttgttttattattagattatgtttaatacttcaaatgtatgttcgtatatctgatgtgatatggaggggcaacatttttttttgccaactaaataggccctaacctgctcgctgggttcaaaatattaaacttagggcctgcttggaaggtccataattgatccaaaactggtgtaaaatacaggcccgaaagattttccggtgcacgtggggcttaccacatatttttgtcatatctcaatgacatatcatatgtcacatatggacctcacctgtagtaaccggttcccgtactattgaaggaatcgatttgcaccggttttcaaagagaaggaatgtgttatatcccattttatggttgagggagacaatttaagcaagagttcataagatgaacgacaaaaaatatacttatt

SEQ ID NO: 35962 - DNA, 941 bp, Oryza sativa
atttctaattccctcaataattcacttgattaaattgatttaacttttattaaatttctagaaaatacattatttaaacgatttttaatcccgaacgaaaatcggggcatcacacgatctgtgattggtgatggaccagatctaatgtgggtaggatgggtatgctcggccttgtaatgatctggcccatgacgagaacaacattgagggttcgtgaggtcggtggcagtaggaccaatccacgacagcgagggacatgtgtgctcgcccttttgtgacggttttggcttgtgcggcgatcctaccatgcaaaggtgagataaggctagccggtggaggggcgtttgtgcaagggttcttcacactaatggtagttggatgctggtggggtaatgcaattgcgattgcaggggtgtataggttgcaagtaaaagcgttgtccaataaattgtaggctagcaacggtaacactttcaagtgctgtgatccctctagaatacgtttgccgaggagcctcgctcttcccttggtaggacactccaagtgaaaaccatgtccagatttcttaggccggcgacaacgcattatggcgtcacatcctcgttgaaggtgtcatctagaaggttctgtttttggctttctaccttaaacagttggggcaatgcttatggatgacggtaggtttgtacgaggaatgagtactgagtagatctttcttgttgcttgccctatacctctgcaacccctctcggaccactaatttcagttgtttgaaggtgttgtcgggtggttaaaatgtggatgtggtggtggcatccgtcggtgtggcactagacatttggtttgtgtaggagctacagcatgtggtggtggttttgtttttctattttcgttattaactcccataattttagtcttatagtagtaattttgtactagta

SEQ ID NO: 35963 - DNA, 683 bp, Oryza sativa
atcccactgaggaaggtggagggggtgggtgaaaagtgtccagacctgtgatgacatcagacagcctctgagctactgcagagaccccctatacctatggaccacttgattgggtgacattttcaaaatatatccaaaatctgactatttctcaccacccccagcactgccatgtgccccaggccaccacctcctatccccacagggctccccgctgctgatgtggcccctcccaggctattctccacatggtagccaaagtgaacttctatgaacttctacaaacagatcatgcaactccttccccagaaacccccaagccttctcttcccactctgagaaatggccaaagcctttaccacatggatgaagtcctctaagacctgggcctcgccgacttcactgacctcaccttgcaccactcccattgcctggaagcccctcaaagacacagagcacactcccttccgtgggatttgcacttgaagttccctctgcctggaacttgcctgtcttccttctttgcttacttgaggtctctgctcacatgtcatgctattatcaaggacgtccctgacaccctgtatgacagcactgtcctgcagaaccatctatgatatggaaatgcgtcataacctgagcttccaatacagtagccactggctacacgtggctactgagca

SEQ ID NO: 35964 - DNA, 504 bp, Oryza sativa
caacagtgtggtgtagacttacaacactgtggatgttaaatacttgtagaaatcatagatttaaacagcaaagaaatttactagctgactaatagaagcagagtcatagcaatatataagatgacacatagttctttaattagtcttaccgtgttaaagaaacatatagcgacttcatcataggatctaccgataatctgcgtcttcagcgcatgtgtgatgcagttcactatcgtatgaaaatgtgtctcctccttttcatctgcctgcaataaatggcagaaaaaacatgcttaactactacctagcaaaagaacttgattgaacatagacaatccaatccagaccaaacatcacagataaaataatcggtaaatgtatcatcccattcccaatatccatcgctaattgcaacacttgagctcgcacagggcagagagatttatcaaattaggcgctgaagctgctggaatttcaccttggtcgcaggggtgaacatcttgg

SEQ ID NO: 35965 - DNA, 906 bp, Oryza sativa
aaagttgattttgacgttttcatcatagttcacaacatatgtatactaggggttgttcagaatgatgttatttttaaccataacttctttttaacaagattgccaaaaaaaagtgtctacatttagtttgttaccaaactttggtaaatatataagaaatcctatcaaaattttaataatattatcaacttgccaaaattgtaaggtttattttggctataatatgaacaacctctaattttatctatgtattacttttgtttgctagtaaatgttatggcttataactagttataggcgaaatgatggattaatagtttaagggagtttgagtatgaatagttttggatggttaactgagttttaggtccgcgtcacttatttgtataaacaaatttgttttcaagacaagggaaatataaaatattcttgttggaccgggtatatgttgcaaatcgactcaaatgattgatttccattgtttttttccccattcgatattaatgcatcggcacttgttgctttagaaattgtcccatattagaaattgtttgctgccaagcgtccatgcgcaatagtcaatggaataagtgtccacatgttgcgacaccattattcaaattcgatgaaaggtacctcaacgttgaaatagtgggggctttggaggtggccatcaatgtgttcacttttgttctcaatgtgatgtgtaagaatatatctttggaggcatccaattgaggtcattctcctcttttgcattgagatgcccaaaaaaatgcatggcttgaattaagatgtttttttcttcaacaaatgtcactagagtaaatgtccaatgtgatgcggtatatgtgtcttatttattatcatatataataataaaaaagtagaaacatgcaacttgaa

SEQ ID NO: 35966 - DNA, 651 bp, Oryza sativa
gataacgttattaccagctgcatatttgtatgctgcgtttgctcgcccgtgaacctgacttgccgagcacaagaggaagggaggaggaatatgcttttgtttttgctctaccttttttctcccatccgtcacagctgctgctgctacggttgcttggccggtagtagctgtaggtgaggcaaaaaaagacagagcacctagacagaaacacacatgcatgatgactgtgtgtgagacattggagtatggccgcattcagcaagcaaggcatagacggcacatgacgtgataccctcacgcagcagctagtggcatacgtaatccatttgcattcttgcttgcagctgggtgctaactcctgttaatttgtttattacaactagtagtacctttgagggctggattagttttttttcttaaaatacgattcaaacgcaagcgtccacaatacatgtacgacctccctttaagagttatcatgaagcgtcttactgtcgatgggtaagtcgcttaccattaaaaggaaaattactagtaaatacaagcactcatgttaaatctagggggtttgtatattggagccaaaataaatcttattttggcaagttggccactaaatgtaggtattttttatagccttaaaaaaatagt

SEQ ID NO: 35967 - DNA, 639 bp, Oryza sativa
atttacttgtgctaaaagtgtactctgcatgagtggattagtttactttggttctcttcttcttggactgtacacgtcaagttactgtcagtctgtgacaaacttcttgctgaatgtcaggtgtatgttaaacatgcgttttagttgagattactattgattggttgaattgcatgtaatctgtactaatggcaataaattagttatttgcttcatttatttgtgccaaacgtgtagtctgcataagttggattgagttcagactcttaagtctgaatttcagacatgttcaggaattgagttggttgaaatttcagagaagttcagaattgagttggttcaatttcaaagaagttcaataacttagttacttgatctattgtttatgccaaagtaataataccatggaagaaaaccatgcactgaaaacattgatctgcgaggtgttctgtgtcaggtggaatgactgaccaaaattctatggtatgtgggaagcgtgatccatcctattacaacgtgtgggcaaagatgcaatctcctggtcctcatcttaatagtttgtatgattggcaattttttcatgggcgacgtaaataatatccaaccttttgcgaatcttattaactatagagcggattt

SEQ ID NO: 35968 - DNA, 750 bp, Oryza sativa
agtttacccctctatggttctatccaccagtaattcaaaatgctagcttgcagtttgatatgccaatgtattacggaccttgcttatgtatgcaccacagcccaaaaagttttgaggcacataaataaaatgttgaaggctgtaatctcaagggaacaatacaggcaggagctctatgctagtaacaattagcaactcatacttgaaacatggatctttgcctgctttagaatttctgcctagtgatctgtgctgatcagctgttatgctctggaaatccaaatcaaccgtaaccctaatagattcgtaatttttgaattccgaatttgcaaatgaaggacatgacggcggcggacttgaaatcttacctgagcgcacatgggctcccagtttttggaaagaaagaggcacttgtcagtagaatcttgactcatctaggcacgtgaaatggtccacttcgacggactactcagtgatagctaactctgtaagctatctaaagttttctgaacatgttgaagtgcctatcaaaaaccctctccctgcttaggctgtgccaaattttgtagcaatatgacaacagctgaccccagttcatttggtatcatgtgcttttgtgacatgtaccactgggatttctcttaaatgtcactccagtctgcagagatcagatcattgttggtagaggaaagtgatccattagagaaagcaacaccaaacaagattattaagacattttttaagtgaagc

SEQ ID NO: 35969 - DNA, 886 bp, Oryza sativa
aaaaactcaaaatcccttatattatgggacggagggagtacctaacagcccattttcctcaacggtatcggcatgtaaagactatatgtcatcggcccaccagccgatcggctatcgtttacaagattaattattttattttccttgttggttgcaatatcaaaccaactagtacgcccttgaagaaagcgagattttggacttgcactagagttatgtagatctcttaggccactgtgtgttcttttgcatcaacagtagttaagtgtcgagatacgtggttaaagagatgagtacgatttagattcgacgacgagttaagacagtcaaagcggacttaatccgatttttaataaagatggactgggctggccaaaaacaaaaccagtcttcggctcacatcgcaataccaacacaccgcatcgcatatttttcctcacctttgctcaaaactccggaaagaaaccagacgaaaccctaagaaagagagacgtcttcggctcttcgcccgccgccatggcagctattctccgatccctgggtcgctcggcaaccaccgccggcctcttcggccgccgctgccgcctccttagcgaggcagcttcagatcatcaggtcagttccgtcgctcgccatcttattctctttctcgcgacacagacccgaaatattttcgacgaaaattttctccatctcccccttatcttcgatctcccgcgcgttggggctccttcaatttcatatgggaaggaacaaatgggaaggaatagatttgtaggatcttgcttggttaatcaatttcatcatatgggaactagattggaggggatttgggaggtgtgcaatgtcacagaccaacacaatcacaccaaatctctcacacaca

SEQ ID NO: 35970 - DNA, 1070 bp, Oryza sativa
agaatcattcccctggaagcaaggcttcacttaccccctttctacactttcttttcactctctaccccttgctttctctctgaaagcttatctgtcccttgttccttcaggcagataagggaaacaatgagcttgattaattacctctagcaccacaaaatgctccaatcaaaggaatggttactactaaagagaacaatggagttaaaaaaaaattggtcaccaaccattgtctattaaagcaacatgtgtagatatgatgaatgatgctggtaggacttggtataaaatccgccgtaagtcgtctttatgatgctggcgacaatgacggggtttgaatctcctgaagataaagatagagatgaatattaagtgtttcacgtaaaacgaggtggtaatagcgtgtgattaattgagttttaattattataaacttgaaaatggattaatcttatattttagaacaactttcatatagaaagttttcacacgaaacgcaccgtttagcagtttgaaaagtgtggcacgaaaatcttaatcttcatccaaatcttattagagaaagaacagggccgattccgaggttgtattgtgcaagacaaaattccatgtgatggtaaaagacaatggtgtcgctaacaatggtaagaaacgcactggagttgacacatagattcctcttaccaaggaagagggaattgcaaccgatggtgctcaccaggacaaccattcccagcataaggtcgggtagcctgtaaactgaaaaatgccgatgaacactactaagatttgaggtggtcaccagatctgaatctccaagccgcattccaccaaattgtaggataaatgtgcttcgggtgttcttgctggacatttggcaatcaatcttggcggcggcggcgaggtgtccgtcggtgaatcgatctgcaatctctggttcatcgtaaattggcatgatcatatactccctcagctccgtttcattttaagtgtggttgtaagttttggtgtccaatatttgaccatccatcttatttaaaattttataaaaaaaattaaaaaataaagtc

SEQ ID NO: 35971 - DNA, 577 bp, Oryza sativa
cttgtgcaataagggctacaagttgtgggcgagttggattcccgtaaaatgcaagtgcaaacctgaaatggtacaattcataattgtaagttttcaaatgcaccatgtaaccatataaaatgaccacatgaaatatcatatgcatggttagtataagcatgtactaggctacagaggacctttgcctatgcatgacttgcattaggacggaatacatattcccagtcacttagtgtcacaaatacatgacttgcattaggacggaaagcctaagtgacatcactggaaacttacagttcagaaaaaggtgccaaataaacaaaccatttgagcctatgacttaaagaaatatattccctgatgtcaacaacagtatagctttacaaatcataaaataacacctgttttcttcctttttctcattttgttaaaaactcagtgaattgcaatgacaagattggcaaaaaatcccaaaacattttctattgtcatttaacaattcaaacaactctgggccgctttgtacattatctaccctatagttcaacaaatacttttactcaatctttcattcttt

SEQ ID NO: 35972 - DNA, 1422 bp, Oryza sativa
ccgtgtccgacccgatgcccaattataaattgtgggttaggatatgggaaggatgagatctgtccgaacctgacctgttttcacccctacgtctatattattgcaatgtgcaacttttatagaaataactcatatccggggcccctctgggtcacccgcgggttaattccgattcccgtccccatcgccggaattatgcggggccctgtccccactcacccacgggtgagaactcccccggccccgcccccgtaggggcgggtccccggcccaacggggaaattgccacaccctaatccggtttcatccaaatttatctcgagtcaatgggaatcatcgttgtagctgaatctgaacttggccttaggccttgtattagactagggccatctcggaagtgtctcccttcagctccacgaattaacctctataaatgtttatgtagaccctctaaaacaattggattttgattagttgaattttgcaaagcgccattcatcatgtctctagctctccgctcaattagtcggcgactatgcattgagagccgccaatagttggtgtgttgatttgcctaatcgattagatttaccacttttattacaactatttctttgtgcttaatcacctattcacaatatttagattacatcctatcttgttcttaaaatgttctctcgttagcattgcagggatcatcaaccacgcgtcacggttggtacgatatcgtttgtggggtagcgattacacgacgtcttgaacttgttctggtcgtagccacatcgcaaacgttgcgcttgatcaaagagaaagctatcccctcaccagaagattgggccacgagagagagcgtcatcaggatcgctccttttccgccactactttctttttagtgtgaggattaagtgtctgtgctgcaagtatttacgctttatttatatttcgatatgtataaagatttatgatattattacctggcttgattcctggacaagaaattatacacaaaatcgtctgaaaaatttggcttattttttggggcgtgacacccacaagagatctagcgaacgtcgtatgctcacatcccttgatagcgaatgagtcgttgacacgtgggtaccacgttacgttccagcataaaaccacttacgaaatcttcaccgattttcgaagatgaagaaagttctcagtccggtttgttttgcggttgagggagaagttcttattagcagaaacaaataaggaaggcagaatagacttgttccccttgattgctgcgagccgcggttccatacttccatccgtgagcctcagacatcgccgccgtgagccctagcctcgccgccgcggcgcgtcgatggacgtcggcgagggcaaggggttcggagccgtggttgatggcgtcttgccaccggagatgct

SEQ ID NO: 35973 - DNA, 526 bp, Oryza sativa
ttcccaaactttgttaacaatatgcttaaggtagaaaacttctgacctgattacccctattaaatctgttttatctctaatttagcctccaagtctccaacttcctcagtcattcaggtgttttggcatggcaggcagcttcatacgaggtggtcaagctcaagggcattcatatctattagcatttaataagggtaattaggaaaaaaagtacctagaaaacctaaaaacaaaatctattttaggaaaaaatcaacatcgtaaaaagtcataaaaaacggaaggagtatttaggcatagcaatcccccctatcattatgagagttgtcttgttcatttatctttcctactttgttgtaaagttcataaaagagttaacataacaatgcatagaattacttaatatgcttcatatagtcacataacatcatttttttacattttatttgatattttaaaatgcatgattagtgttatgttgatgcttggttatttgttaacagattcgctacaagcaaaagacagt

SEQ ID NO: 35974 - DNA, 777 bp, Oryza sativa
gattattaatttatttcgtattatatcatcaacaattataaaactagtatcacatgaaagtattttaaaatacgaatctaataacaataatataacatacataatacttggtgtagatatcattaatgtaattattaataaaaactatcgagtttgatttttttcttaaaaataagaacatcctataatttgagacagggagtactaatcatttttcttggtaaatgtgtcaaattaggcctctaaaatcacaacccttttaattgaattctatgctccgattactgacaactcggacaacatacagctgacctttgaaaaagggtatattgtgatcgagttaggcccgtgccatgatgggtggttatccaatcatccaggttttgattcaggtcgtggcctgcaagacaatactatagttaagagagaattaggccctggtttgacatttctgatagccggcacacattttcttccatcggtttttcttttgccacgcgtacgtgcatgctgccggttaaaggcccgtttgcttctaagtttagggttccttttatttaataattttggttttttaatatataacatcattaactttttaagatatgtctcatcattcttttttattttataacttaatttatctttaaaacttctttaaaatgtttgcataaaagaattatataagacgcatagtcaaatgtaaatctaaaaatcaacgatgtcatatattaaacaatgcattggctccatctttttcattaatcattttgcaat

SEQ ID NO: 35975 - DNA, 753 bp, Oryza sativa
aagcccagatgcctatgtatcctgccacttatcattagcttctccaggtgagatagaggtttcaagttgtccatagatcaagaatatatcgatcgcgatcttctgcgaaaacggacaatgaattcagagatgtctgattgaggcccatagatctgtgttgtgggactccagtaccttcatgatctcatccctgtcaagcatccaatgtttttaaccatgtagctgttggcttctatgcttctcagagactgtagatgttgcagttgacttattttgctacttgctgacatcccaaaccgcccatctacgagtaggtggtgaagcttagttaacattgtggtttcacttggcaactccagtacagaaccattgagataaagcatttgcagattgctaagcttccctatcaatctcggtatgtctttcagttttgtgtacccgaagtttaggtagtgcaagtaaaacaattggcactttctgaatattgcaatttctcaggcagcagtctgaaccaagacgatgatatttcctctgaaaacacgaacatggaccgaagctgagatgaacattttgctgcttggactaaattgccataatccttttgtaagaagcacactgtgatccattggtcattccatccgagttaggacagtcccatatggtagcaattttttccttcttggatatggttagggctatttctctctcttgataatgcatctgggcttctggaatctctttggccttccttcc

SEQ ID NO: 35976 - DNA, 579 bp, Oryza sativa
agcttcctatttgatctttattgattatgtgcatatgtgttccttcatatccatatgtatgcacatcttgagggggagcttattctatattttgtttattataatatttctatcttgatttgaaatcatttttcatctcatctctctatattgtttatatcgggttattatccatcaccaaagagagaaaagattgaaagatcttggattaaacaatttgtgtaattgttactttggtgatagatgataaaccgatgtttatgggattaacctctcttttgcataagttgtcggttatttcccgataatgagatgtggaagacatgcattcttttgtgatggaccttaatcatgacaaggatgaaatgcatggagataaaatgatatgtaccacttcttatctcctactttttgataggttcatatatatgatttccatgttattgatatataagtgtgagactaatgtttactccaatgttatcttatttaggctcatttacattgagaacatacatatgccttctctatatgtataagataaacccccattggtcattctctaattatacatacact

SEQ ID NO: 35977 - DNA, 1723 bp, Oryza sativa
aatagagtacaattattactctaattaataggcgaataaaatgtcattacagaggtagatagttcctctcaatcaataaagatctaagcaacggaaaataagataaacggcgcagacggctccactccacaggcagcttgaccaaggctacacctaatcctccacaccatcagcatcattgtagaactcttcctctgatgaatgattgcaaggtgagtatatgacatactcagcaagccacgcagcaaatatgcaagtgcacaaggataccaaaggatggcataatagggttccatttgcataaacagcatttagcaaacatttcagaatttaataaaacagttaagtaaaaattaaacaatattaatccaacgctatacaacataccctgttgtataggcccaaccattctggacaaccacacccgggtgtacaaatctaatctccaaccaggaatataccattccaaaccaggagctaaacaaattattaccagttatagcatcttttattatgatgagaggtttgagactaatcacgaaagacattgttagacccgcccataaccgcgggcacggctattcgaatagttttactctgatcagaggtgtaccactgtacccacaagacacaaccccacatcatgtcaccatgtgccttaataccaccacggtacctcggaaaggagttgtgacaataccccttgcataacacaatccactacagcgcacctttcctggatcataatcacccccttataaacaaggtatggactccccagcgacccccgtgggcttatctccgccacttctcagtctggtgccccgcaatgaaccatgctatataaaagataaagccgttgcccatgctggcttgtggttggcacggttaatgtttcacaaccgaaactcgtgaaccggtccttaattgccatgagcacgactctcaaaaccatgtgctcacaacccaccattatcaggttttagttagcacattaattaattaaccaatcatgattgtccgtcgtgaactatcattaagccatctttaaataatagtgaatcataagttatcccaatagtgtgctaatgtttctaagcatggctaagcaatcacatctaatatctagctgaaccaatatataaagcccaactagtcaagttataataacccaaggtatcaaggaataaaggaaccaataacaaaaaggggtataacaaacaataggttaattccacccaatgacattcgaaaataaatgcaatagttgaatagaaacagtagctttaaacgggatcaatacgctcaaagggttgtttgggatctgggtgacttgccttgctggccttgaaactcttcaaattcttctcctgcgaaaacggactctctggaaacgtcggaatctaaacagaaaaaagcaaaaacaccaaaacagcacataaacaagcacgaacagtaatgtggatatttttaacatgtagatctcaattttagaaaaatttagagacttgaaccaactaaatccgagctaagatgaattagttatgaatttttgaagatttaatcggattaaaacacttatatggattttaattgaattatgacgcaataatgaattatttttgaaaaggaaaacggggtttattgtgtcagcggctagggtttacggtggaccgggtgcacggcggcggttcacgggaacggacggccgagatcgatccat

SEQ ID NO: 35978 - DNA, 559 bp, Oryza sativa
acaatcaagccgctggatgtttcatagagtggtggatatcctatataatctatgtcaacgtcactacttaacctaatcggctgccttctagtaacagatgttagtcgattggaggttagataacgatattgccggagattatatgagatatatgataactcgacgaattacataaataagattagagtatcataaagatggaagcactaatcctgagaacgcaggcccgcataacaagttttacctctagttgaagatcgaaaccgatgcagctcaacccgaaagcaagaactcgtcgaaacgaaacgaaagtaaaagggtggcgatgcgccgagattgtattgaacatgtgttaaattgattacatggggctcggggtctatttatacccgagattacaaaatatgcccgtgtcggacacgacttttatctctaacaaactctaagataccataagtctttgcggcagacttttgtccaaacatatctctaagggaattacatgaaatatcctaattaatagctacaattgccttctcaggactttatccatacgtgg

SEQ ID NO: 35979 - DNA, 1876 bp, Oryza sativa
tcatctattatttctatattgcagtgtgcaaggcaatgttgtttgtgtatgcacgtaacaagagtgaaactaaggttgaatacaaagtgtggaacttctttcgttctaagctggcatccgctgaaggaaattgtggcctccttttttctgattctttttttattttgtgttctttttttcatgtaggggagcagctctggtgcgaccgtgaagttggcagcacagacgcatttcattgagcacatctttagcgttctagatttcttgagtgttctatattgtggccagaccaacaaggtatccatctggcatacagttttctcatttgggttaagtgattggactggtttattgtatcttgcgattttttgtgttaaaaaatattattcagttttcttgctaaaagcaatctatctcttctgtcatccagatgggaggcctcctgtaattacttatggcatcttatgttagtaggcataattatggaagaactggattagcatggataattaatggactacattaattggcgatggttttggtttagttgacattttccattttaagtataagtggaatgcatcattagggcttctatggacacttgagtacctttgcataaactagctaaaaaagcctgtgctttgcaagttgctgctatggtccatccttagtgtttattcactcaaatcttacagatgcacaagagtccaacttttcagttatttatgtttctgttctgtctcgatggataaaacttacaattttaacaaatatgttcttggttatctgtacttgacagaaataataactactactcttttcactttgatagctcttttctgcttctaaaaggtgggttttccatgaggagatcactattagaagctaattcagaggatttcagagcagattttggatgccggaggatggcgagagtgacacatttcagtaatcccctaaggttgctgaattttgttggtagctttatcttttcctgtgtaatctcccaccaacgctgagagctctactctatgtagttcctccttccaatgtataacgtgagttgaatgggttggatttaagtataagtggaataaattgttagggcttatatgagacacttgaatgctaatctgaatattagaacatgacagtgccttggcttaactatttgtatggttaaatatgaaaccactaagtaattttgctttgttgagttcatttagaaggttcggagggcggcctgtatcactattcactcgagcacatccttttcaaatgatatcttaggatttgcgggagtattactatttgatgtttctggctcaaactatatgcaaactttatttaattgattctaaagttagatttctgtttttgtggcatttcataagctagccaacatatattttttcagctattttgtcctttggcatatcaaggaattctatctatattatatggttcgtcgattgcctattctttttaaaggaaactaatgtgttatgtgtttattttgagttatccacatctaaaggagactgatgtgttatgtgtcagaattgtttgatgtacgtaaagctcagatcatataatttatttttattttttggctaacttgacgttttggaaattattaaagacaaataaaattggacggcagcatttagctcgggcatattactagtgagctgtaatttcatatgtctatcgcatagagtgatattgcatcagagcgtaacatcgtcctgttcttatcgcaatctcccgcggctgaattcatcgccgtagaaataatcaggtaatgttaattaatttaatccacagtacattttatgacttgacatacattatgtccatttataactatgtc

SEQ ID NO: 35980 - DNA, 526 bp, Oryza sativa
aagtacaaaactttgaggagaaaataacttcgaaatgttggatgcacacttttctttgcaccaaaaataagttgtcaaaagacttgaggtccacatttgtacgatttggttgataagatctgactttgagcaaaatcgactctctgcaaaatctttcttgcggtgagccagctgaggaagccatgcgaaaggcaagcaatgcatgcacgccaccgaccggctatatctctatatatcagcatgtgcatattggttagtgtcatgactcatgagcagttgtcaacatgtcaggcgcttctagtacagcgacctgacgaaacaaaaaaaagttggaaagcggcaaaaacacacttttgagtcatcaagaattgtctttaaagccatttaatttccaaggagacttttgagccatatcatttttttaaaaaagaaacacgttataaaaacaggtgctcatatacgtgtgtacatacggggtacggcaactacccaaaaaagaatcctagatttaaaccactcatgacgg

SEQ ID NO: 35981 - DNA, 587 bp, Oryza sativa
tagcccatgccacagtcggacgaatgatttgagcaccacaacatttttgaagaaacaagtggcgaagtggttcatgagcatctatcttcttacggtagactaatgtgcgttaagcaaccaaactatacgctaactacagcacctatccaaacaggcctgcagtattgattaggttcgaggaaaaaaatattataatgtctcttattaaatgatttatggttagatatgagaggatgattggaagtaaaaaagaaaaaaaatataaattattaaaagtgattgatgaaacaagtaatactgcgttctgacatctaccgtggcttctgtgccttggttctacagtacttcattttgttttacgttgagtagtgcagtgatgaggccaaactggccaagccatgagctgtgaattgtgatgaacagaacaccaccgagagagatagagagagagagagagaggcctatgcacctaggcgcctacctgactgctaccgaagcgaaaggcacagtgaccttgtgggtttggtgcagtaagagtaggtataatagcaggctataagccagctataaatatattttaaagagat

SEQ ID NO: 35982 - DNA, 803 bp, Oryza sativa
gttgcaccaatatgtgccagggttcacaattccaatggaaaccggtcgaattccgcgaaattccgaggtttcaacgaggctcgaaagtagaaaccgtctgatatttcgatgagtttcattcaaattcaaatttgaattgataaaaaagggaaaaaatcaaataaaatcttataaataatatgatattaatagaacaaattgggatataaattttcgaaaaaaatgatgtattccatgtatttactgaaatttacagtagaaaagaaaagaataacgaattaaaaaaaggaaatcaattttagtttacctctttttctagctaccgattgaaatttcgatgatttcacccggaatttcgccaaagccgaccggttttcatgagcttatcggtaaactaagggaatttgtatttaaattttggtttatgaaatttgttcggaatctaccggctttccaccggattagtataagatatgtgcatacaaggttggcaattattagtctcacagctgcttgtctggagctgctaaagggcttagaagaagtactggcttcttaggttttgcaacaaaaaattgcaatcaataagtagtgaccttgaggacaaagtaccacacaatttgatcagtcatgaacctagagagtgtatatgttccaagctctcttagataactccctaagcacagcagccgcaatcaacacagctgaaatttggttatcgttgtcatttatgattgcaacgttgtctctattaaaatcataccatgacttgttaccatgcaagacttttttgcctgttagcg

SEQ ID NO: 35983 - DNA, 880 bp, Oryza sativa
tgaccatcttgcagggcttcggttcgaactctgtcattgtcgctcgaccttaatggtttgagggcataaactcctagccatccatcccgcctagaaggtggatccgcccttagatcatgaaagtcgaatctaatcagtgtatatactgctaaagattctaggatctggggttagaaatagagtacgtgtattaaggaatatccgcatgcacatagctaacttttctaatatcaagccacaatcgtgcaacatacatacatgcacctaaaagttgacaaaaactcctaaccatccactgttgctaaattagatcgtgcagacaacattctccttcttttgacacatgagcagggaaaaggtcaccctgcgcacccatgcatttccatgttgcttcccctggaaaaatgcatgcacgtacggcagtctgaaaatgacaccaccgatcactgatgagtcgcacaccgtggtcgctctgtgaattgatgatatatatccattgacaacctcgtcaactctgctcgacagcttatctagcaaaatttcaatttgaaagttatttttttactgatcgatctaggtatttttacatcatatatagtctatatattttctaactcttgcttataaaatattaagggcccctttgaatcgtaggattgaaaaatcataggaatatgaaaaacacaggaagtattatgataggaatacaagtataaaacagagaattgtaaaacataggaaaaataaaggaatgaacatttgattggaccgcaggaatcagatgagagagatagactcaagtgaagttttacaagaggttagagtggatgttaaatttcctacgtttttcctctagaatcgtaagaataggaaagtttcc

SEQ ID NO: 35984 - DNA, 691 bp, Oryza sativa
ccataccatgagatttgccagcttaccatcattcatggggcatctagaagtagaggagaaaggggtctccattcaaggatactttatggtgacaagtcggtgatcttgtatggtccaatgcaatgcatgaacacacacggatacagcaatttgcatgcattatttgcaccaaaataagttataaaatttatatatataatatatgtacacgtattgctcacctgtcctctcaagtccccatctggtcaatatcctctctctcattccttagatgttgacatatgtcttatcatgtgttatacaaataattctactttaatcatgtaaactatgtataccatgtaagtaatgcaatatttgcaatttgcacaagtctgaatgcacctctaacacagctacatcagagaccaataattatggtttcattaaaggttttaatttgagaaaagaaaagaattgaaaatgacttagtgagagttacagaggtccactgatctgaatgattaggcaattaagagcaactttgtgcaatggttggcttgtatagttttcagataagcatcaaagctgaacctactaccatgggtggtaggattggaaaggcatatgcatgctttccattctgactgaaataattgaatttttctcacaataatcatggccctgtagcaaagagaacactggtttgggg

SEQ ID NO: 35985 - DNA, 512 bp, Oryza sativa
cagtattctctcgagatccagaagttattccgtaccgacttccaatattactcataaaagaatctaccataaatcaaaataagctttagaatcatgtcatgcaaaaaaggatgctcaattttgctacacaataagtatagcagtccaattcaatctacctggactttcagacaaaataaatataatataaaacatcaatacgaaatagtgatgtactgcttctaatgagatcttggagtcaattttacagaagaaatatgatattatcaaaccttaagttcctaatgggaacagagaagcaactcaagacacagataacagatcatgtgttcgactttctaaaacactaggcattatagtctgttaaataagttttgagaagaagatagaacatataaggcagctcaaattgtaagctacaaaatgcaggtggaataggaatggtgataatgtggcaaaagaaaatgaaaacccaaacgaattctacagatagatgataggaaagattgcat

SEQ ID NO: 35986 - DNA, 1137 bp, Oryza sativa
tctaatattccttattttttaattccgaatttcatttatttcctaattgtatttctatatggactctagtctcctcttttaatattccttattttttaattccgaattttaactatttctaaattatatttctatatggactctagtctcctcttctaatattccttattttttaattccgaatttcagctattttctaattgtatttctatatggactttgccttttctttttctccgattaatgtgagaatttctaaaccatgagagcgaacatggaggctaccttttctattcctttaataatataatagattatagtaatttttaactatatgtccgaacatactcttgttcagatagatacatagtcaaaaattgttatattctgatacacggacggagtatctggtaccatcatcggtaataagtattgggtgtttataagatttcaagtacaagattaatttgatcctaattttcattatatgatcgtcctggcggctgtacaagctgatcgagttctttgatctcaatggataatcaactaaccgtgcgtgtggtagttgcaattagttattggattctttgctatctgaactatgattaatgccgatgctgaaacagtagaaaaataataggaatgcatatataggccgcatataaccctcttaaaactttgatatttttctgacaaaattaaatgtttatatggtaaatagaggccgatacaggtttggtccaggcccaaaccagcccacggtatattgtgtgacatcccggcgcagggcttaatagaatactcatatcaacaagttaatctataaaagttgcgcacgaggcgggtagttacatattagatcaaggcatgcctctgcatggtgaaaataaatgcctataaaggggtagcttaagacttggcgctgatgataattaattagatttattttttcacgaacgcgtaaaagattgctcgtaaatatatggtaagtagatttagatgtaactacaaagagcctttgatatcctcaagggatttgaccaatcaaaagcagataattataaatatttgatctgtagtcatcttagataaactaatctaattatgtgttggcttaaattgagacaccacactttt

SEQ ID NO: 35987 - DNA, 775 bp, Oryza sativa
ttccctgcttggtagattgatctcggttttgtatatttcacctgtgctaatatctaggtataaggtggtatcggactactagctgatacatgttaggtttgccctatcggctatgctgcgagcatacataatccctactgtggggcacatttagatactgagtgatttatactgtctcggcataatgtccgatctatcccaatcactcgatctaagcacgttccattggatggattacgtatcatctacagccgatcgagtaggcctaataatctctaagttttatctacctttgctgatctgatgcaagttatatcagcttgcctttgctgatctatcgttgatggatttaactctttgtcttttttctatcttgttggttgcaggatcaaaccagctggcacgctcagaacccaaaggcaatctctttggacctgcactagagttaagcagatctcttaggccagtgcgtgttttttgcgtcaacagaggtgtacaactttacccacaagacacgattccacacatgttaccatgccctgaagtaccgccacgatactacaaaggtggaaatcgtgacaaaaccccccgtacaaccctccctaaccaaacatacccacctcaggtttcaccccctccttgtgccaagttgggcagtcccttctcgcgcctaggtaaatccagctacgcagagaccaatatcaaggtccgaactgcaccatcgcctctacctttgccatggtatgtcagctaggttaagttatactgtagattt

SEQ ID NO: 35988 - DNA, 747 bp, Oryza sativa
caaacagaggagcatgtgactctcatcataatagaatcaaatggaactcaatagataggttcaggtaaaaaggacacaataaaaaagctaaatggaagtatagtctgtactgtaccatgatgcataagaaactcggttatcactctcaatcctaagcaaacctaaaagaacctgtaaaagaaaattatctgtcaactaaaatacaattgcactcaatatataaatggcaaaaataactatatgggtaacgaaaattagcacagcgttttgtatagagcagttagtggagtgtatggcatggttgagataatgcttgtccagtatcaaaagaaaagtcaatgctagtatgaggttgatctgccttcccaatctgaccaagtggaaccaactacagtttataaaaacaatatggtaagaacagaaataaagcatacttttatttgacagctgcagagaaacatgtctgtattgtttcatcacttggaaatgtttttcaataatccagtcaaagaaccgcagtgtgttgatttgtactcgcactgctcacagcaggattgaagtaattggataactctcacacatctgggaaagaaacaagcataaataacaagctgagtcatatatatcccattaacttacacagtaaggtgattctaaaatcatacacacaatattaccttgcagcaccgtttaaatgttcaatcatactaactccaatcaactttagacaataaggggtgcaggaat

SEQ ID NO: 35989 - DNA, 649 bp, Oryza sativa
catattaaattaatcattaaatggtctaattataattttgttaagtactttgagtgtccaagtattttcaagatttttcttggaattatttgagcataagaagtatttttaacaattcaaagatcatttcattgattaatttaattggaaaagtaataataatcctcttcctaatcttgggccctttccaccccattttccttttttgtgtgcaccggcctgccacccaagtcaacccaacccaatttcccccctctctttccttcctttctttggtttcaacccacccaagaacaaaaagtctatttggcctccttcgacactgtttatcttctacctctagcagccgaactgagcccgatttggctcggttttctcctccaatctgacctttccccttgtgttatctaaaatagttgaggggaaatatcctcttatcctcctctatctttacccccaaaaatcggagctaatcgttgagtatcttatccggatcgaactcgttttcgagtttatctccaaaactgagtttttgatttcccggatcgatttcttgcgggaggagtccgatctctttaatccaaggctataaataggacccccttatccggctctttcttttgccccctctcccgtgatctcccgtgcc

SEQ ID NO: 35990 - DNA, 636 bp, Oryza sativa
ctcacaaatgcaatgctgcatcaagaaaggcaccaccaatctgaaaattctgattgacagtcagaagaagcagtagatgattgcatgcatgatataccaggtgtatatatcgatcgatctatacatttttcatcctaccagaatccagagtttgactcatagttaatggctatgattcttttcttttttcttcttcttcttctctacttttgattttctgatgaatgttcaggccttcagggttttgtctcttttgtttgtctgatgaatgttcagggtctgatactctctgatcccgctcgtcttttttgtaatgccattggatttggcgtctgtttgatactacttgattttagctgccgaagaacatactgaaatgaaggaacccattgggtttcttgtctgaatcttttgttgattctcaggactacgcatgatgatctagttcattgtgcctcttttgttgattctttcgggtaaaactgccatgtcaacttcaaagatgcagcgttggaaccacaagttattctgtcaatggtaagcaagacacttacttcatcgaccaccactccggcgaatactggtcctaaagcttaaagttcacacataaatgcatgattgcacactacaagttac

SEQ ID NO: 35991 - DNA, 2334 bp, Oryza sativa
taacgcaatacttcaggcactggcaacccgctgttcccagatgtcgctctactacgtacccggacagggaggacttaagtgatctcgagggctgttaccacctctacaccaacctcaaacgtactgtgggatatgcaacaattactggataataattacctaaacaccacgtctaagcaattaatatctactttagtgtttataactcaccaaagcaatcactatattttagttgattattgtgaacaataataccgtatgctacttaggaactaaccaagagataattctcgcaaaataaatcaaaattactcaagaagaatattacgttgaattcagagtaataaacattttagttgattattgtgaacaataataccgtatgctacttaggaactaaccaagagataattctcacaaaataaatcaaaattactcaagaagaatataacattgaattcatagtaataaacagaataaaagaagtaggagaagattaccgacaactctggaattctcccgacttcttctactctactctcttcctattccattatacaatatagtacaatagagcctcttataattcagctcaaacttggaagtgtgtgtgtgaagtgagagagtgaagcctttatatagaggtaggtattacggttgtactatgcgaattgtcggaaatgctccgcaaccaccatcacgagatgatcaagaccgcccatgccaaaacctgggatcaacggtgatcaccagggttcggccgaacctaggctgggccctcctggcctggccttcggtcggtagactcctaggaccttcctctgtctctttctcgaatttttgggttgatttactgatgtttcgatgaagttcacaacctctccttgtatggatacataattctcctcactttagtccgattttccttccaacttagggtttatcatcttcatacaaatatacaccaacacttgtagaatatgtgagattaagcacctatcactatgttgaatgttttattatctgaattttatgcagatgttggcggtatagaatcaacatttaacagccgccaagaaaaacccccacacttagccctttgctcgtccctgagtaaaggttagtgtagaatgaatttcttcaagatataaatcaagcatataaatcattcaaaaccatacctgcacctgtgaactttatcagtggctatcttaccatcttgagtaattgataaatggaatgatctcgatttcagtccttcttgcttctctgtcagactcatgggatttttataaattttcgcaaactagctcttttcctcatattgactttctttcttgtctctcaaggatgtatattttctttttggatcctcaccaaggcaaaatgtgccagaattcattcctattctaaggctgatatttgtagcttggtagggataaactgtgacatacctgcatcatatatattgcaaagccaaaaatacggactcaagaagatcatcagttatacttctagatcaagggtctttatttgtggtggaaaatgaaaaagtaaaatattttgtggaatgatggaataaagaaatgaatctccctttttcttatactttctctcccctttggttttctcggcatgaatatagaaggggcattactatatgttctttccaactttgctcaatgttttgggagcaaactttatttccttctcttttctatttttttcatagccatgcctttccttcccctttttttttattttggcaagaatttttccaagagaagaaagcatagtctaatgtaggagtttatttgaatggaatttttttttgtggaaagccatcttctagtgtagaagcttagcttaattatatattgtggaaaaatggaaatggaaatgacccctcgatcatgagagtatgaaagatatctaacacgagtcatataaatttgacaaagctcaatataatgtcaagcaatcatttgcataataaggttgatcattaatgtacttgcatatggccttgtgtcacgcccggaatttctatccaaaatttcaaacgcttacatgtgtgtgaatccctcgtccaggaatcagccgaggcacacaataacaaattgataatagagtaccattattactctaattaattaacgaataaaatgtcattacagaggtagatagttcctttcaatcaataaagatttaagcagcggaaaataagattaatggcgcagacggctccactccacaggcagcttgaccagggctacacctaatcctccacaccatcaacatcattgtagaactcttcctttgatgaatgattgc

SEQ ID NO: 35992 - DNA, 718 bp, Oryza sativa
caaattaatgccaatatagatatatattggcacacgtgggtgtaatgtttttcaccagaatgaaaacttcaaaaagcaccaaaacttgattttttgacatattggagtctgtttggtgagtctgtgtcgaaaaatcactctgtgactcgcgcgcgaagttttgtcaattaatgccaatattggcccgtattggtacatgtgggtgcgatgtttttcaccggaatgaaaaacttcaaaaagcaccaaaacatgatttttggacttattggagtatgttgggtgagttcgtgtcgaaaaatcactccgtgactcgcgcgacgaactttttgtcaaataatgccaatattggcatatattaacacacgtggctgcgatgtttttcaccggaatgaaaaagttcagaaagcacacaaacatgtttttggacatactgtagagaattgggtgcgtctgtgtcgaaaaatcactctgtgactcgcgtggcaaacttttgtcaattaatgccaatattggcctatactggcacacgtgggtgcgatgttttttaccggaatgaaaaacttcaaaaaggaccaaaacatgatttttgcatattggagtgtattgggtgcgttcttggcaaaaaataacttcgtgtttcgcgtggcgaagtttgtcaattaatgccaatattggccaatattgccacaagtgggtgcgatgtttttcaccggaataa

SEQ ID NO: 35993 - DNA, 683 bp, Oryza sativa
tgcaatacaaacatgtcatatcatgggacactacaagggacatgccgtaccagtgcatatatccatcacagtacctatgatattctatctacttatatactgactcctgagccattcacggctgcacatgatcaactctacgggccagattctattcgtccttaattatctataatcatgccctttcacctcaatagatcgtagcctttagatgattaatctactgtccatactatcttcctatcgactctctcgcataccatcataccaccttaccttacactatcgaatcaccattgcacatactgtgcgcacgaaagagaccatagatgacgttaattaacagagccacgactaatctaactaatgtacacgtcatcttcttcgggatcatacgaaatccccgcagcatgcgcgatggttcacctaggagaaaaacaaaataagtgcaaaatatttggaaccatcaatccaagtctagaaaaaggaataacgaacaacaggtgaaaaatgcaaaagaattttgcctcacgtccccactggccccacctgccagctacacagcttcacatgtctctcccccgtctacggacgcaggctagaagtggccaaacgggcggcccggcccggcacggcacgggcacgggtcccgaacggcccgtttcgcacggcccgttaggcac

SEQ ID NO: 35994 - DNA, 571 bp, Oryza sativa
atggattatgcgacatagcaaaaagtttagaccagtttttttactagagacgataccgcagttcggagcaattatggctttcatataatgatgttgttttttatgggagtacggtttattttcctttgcaggttgttttattaattatttgtccagaagctcggtttatatggtattatcaagtcagcgtatttatattttcagcaagtggttaaggagttttaacgtggcacccgggtgatcacttagttttcatgttgtaagacattgatctcgatagtttctatgatgttctttacttctttgaggccttgtgtgatttatccctttgaatatatatgtgtagtgtacgtgatcagaggagcctcattaccagatgtattaatttgatattaatagtcattgacttggggatatatgtctcccccatttttaagcgtagtatatatagaatattttgcaaaaaaaaactacatcattgagtgtttgataaacatgtaaacggaacatagttgaagtttgtagttgaggcaaagtttttagcttaagtgtagcagatgtctgtgttcac

SEQ ID NO: 35995 - DNA, 582 bp, Oryza sativa
ttcacacaattatcttaatgccaatactagtgaaatttcgagccggcaaaaaagttcaacagtttgttttccaaaggtacacaaataactcgctgccactaataatttgctaatgtcacccatgttaagattttaaatcccaatgaagagcggcgtatcaacagtaaagctgaacaacaaatagcccaataagacgtactaggctgtaaaaaaaaaaagacaaacccagacacacatatacaagttcgtagctaagattggttttttttttttgtaacggaggggtagtattgtaaaagactaggtccatctaatcctaacggcataactagcgcactcgagccccatactcccatggtctcgccataaggccagcaacaaaatacagccagtttattcttagtcgtcattgcatgaacaatccctcatgtttagtaaggtacaaacgggtaccatcgacgaagcacctgcaagcatatccggtaaagaaaacgggatatcatgagaatgagcagactccagacataattagcttatcgatcgcagattcaggcaacactaattcagagtgagcctcaaagt

SEQ ID NO: 35996 - DNA, 528 bp, Oryza sativa
acacacgaaacagatgggacaatgatgacgccctgctatttatgagacactatggaaaactgaggatgtgcttgatggagaagctatcatatcccacaggtgcccttgattcctggagctggctaatccacagccagcggatccctaatcaacataatttacattattctctttaacaaaacacaaagacactctaatgatactccatatatactactactactactacccatagtactgatgcaataactacaaagagaggctcatgggtaatgcttgtgtttgaagccaaagaaaaaaacttaagctcacgatgctccttgaaaaggattacatcaatgtctagatgttcctcaacggaatgcttctgtactcatgtacttagatgtcatggctcgccataaagcatggctccaaacccgcacacgaagaaaaaaggtgtttccttagcggatgtagtcggtgtggtgacgacggacaatagtgctgatgggagtacttctagccatttgtagtactgtgacatga

SEQ ID NO: 35997 - DNA, 542 bp, Oryza sativa
aaccatgttttggggaatatatatcaaaaaaatggaaggaattaatagtataaggtctcattcttttctccaacaagagttggatgaatattaagattttcatggcatgcttttcaaactgctaaaggccccaaattttgcatttcgtacgaaaactttctatatgaaagttgctctaaaatattatattaatctatttttcaagtttgtaataattaaaactcaatcaatcatacgttaataccacctcgttttgcgtaaaaagcttaatcttcatcttcaggagaaaagaacaccacctaaataaataattgatctgtagttaaatatatacctcctcttcttcatgtgtatctttggttttatgaaacctctgatatagttctgaaatattttccttgagatggtaaagtatggaaattatattaatgttaatacttccatatacacaaacttcaccccttttcaaccttgctggcattcatgtatgatgcacgtacgagtgggtttgatcttgaaaattttctgaatagatattttta

SEQ ID NO: 35998 - DNA, 573 bp, Oryza sativa
actgttgagatcgggactctgtggagggccggacactacttgcgccgatggagcgagcttaatggtcgaatccctttgtctacaattattatatacacatgggtacatatatagtgacatgcaactttccgcgaggtcataggatcacgaattcacgagtagattgttcagttctaactaaattataccatattaattagtaatatcagtcgataattgaataattagtatatataggatcctcggtaatttatgttttgggttcgtcaatatatatatgtggtatgaggtatgttttagtaggaatattcaggaggtaagtacgtgtacagagacataaatcgagaaaatattttttaaatagtttccttagatattgatcttctattaacagaaaaggaacccagaaatctttttttttttgttttttacaatctgctggaaagtccaaacagcatatatgttcccagaaaaaaaaaagagaaagaagcagagagagcagcaaggctgaagcccaaacatatttttttctacggcccggtgcgttgacaaatctgactaaaacagaagagg

SEQ ID NO: 35999 - DNA, 736 bp, Oryza sativa
ttttttccaaaggttaatactaatagattttgcgagaaggccataactcatgaatttaagtgtggttgctaaattacatgaaatattttctcctaatgttaataatcacaaattgcacatgcctcggcccaatgctagtactaacaacagtttggacaaaagaaaaaagttcatgcgttttttcaaaggttaatactcatggtttttgtcaaaaggctaactcaggaatttatagcgtgcaaactaaatttcacattttttgtcctaatgtaaattatcaaaaatttcaacgcaacattctcgatgctactactaaccaaattttgggccgaagaaaaaaaaatcttgcatttttctgaaagttaatactcgtgggttttgcgttttttttccaaaggttaatacacacgagttttgcgagaaggctataactcacgaatttatagcgtggagtctaaaatttcatgaaatgttttctcctgatgttacgatatggtccatatgctaatactagcaaatttttgggccgaagaagaattcttgcattttttttacaaaggtttaatgcaaaatttaatgaaaattttaacctgattttaatattcacaaatttcacaaacaatggtcccgatgctaatactagcaaaatttttaactatttgttttccagaggttaatattcatgggttctactcgaatgctataactcatgaatttatcctgatgttattattca

SEQ ID NO: 36000 - DNA, 675 bp, Oryza sativa
aaattctcactgttttatacgatagcttgtagaactagacatggcaagcataacattcatgagataaagtattagatgatgtctgagggatttgaaacttatggtcatggatacggcaaggccatggatgaagtttttctgctttacgatttttgctcctgtatcatgtatgatttttgctcctgtgattaaatccatttattgtttttttaatcgtttgatagagtgagcttttttaaagtcactgaaaaaggtccaacgcccaagtgcttttaattagtgggcttctttgttcctggcattctaccgagaaaactatattaatttcatatgaagggcttaagcccattccagttttgtaatcgcgtcgacgcggcacgcgaccatgatgcgtttaatggcggcgaacgtattttaaaatttttttatcattttttgttttgtcagcatctcacaatttaaacttttgtcgtattgtgtttgtattttgtctttgtctttgcaacttttataattttcctacatattaatcaacctaatgcgctatcttaataacaactatgaaatcatattatctaggtcatagccctatcatctaccggttttgtattttgttggtgtttgtcttatttgtctttgtcggattttaaaatcttcccacatattaatcaagct

SEQ ID NO: 36001 - DNA, 591 bp, Oryza sativa
taggcaatggcatcaaagcacctcttgaacggcgatgtgggctggtacatgtagcttccatcgggcctgggcgtcttctggatgctcatctgcgtcccatgtagcatcatgtgcgcgatgacgcagaggccgtaagtgtcagcctgcaggaagaaaccaatcaaccaaccaacaaacaaactggcagcgtcaggcaggggttgctttcagagatgtctaggtgagaggaggttttgagtaagtagcttgggagggtacagatacctgaaacgtccaggctctctgttcctgcatctcgacgcagctgaacccggaggttcggcagtcgccgtagaactccgcaccggatgggaagaggttcaggtcgatgccacggccccagtcaacaaggcagagcccctggaatgggaatcctataagcatcaggagatatccagaacatcttaaccaagtttttcggcgtgttgggaacttgggattgagaagctgacttgattccgctcggatcttgtctcgcctttgaaggtttcgtctgtgatttctccactgcacagaccaccacacgcaaaacaaagatgcgggtgaacgaaa

SEQ ID NO: 36002 - DNA, 616 bp, Oryza sativa
gtggttaagtcgagaacgggattttctgtatcgacccactcgatgtatgcgcaagccgtagtgcgggtctgtcgaatagagtagtgttacgaagaataaagcgattgcccatacggaatgaataagcatatgcagataataaaatacctcacggtcatagttagggcacctaaaaaagcgccttcctcgaatatcaggattcctcgaagccattagttggcatcgatcaccgcataggcagagaggacgctggcaccaaggtggtagtaggtatacacaaggatcgctacaccagtttggatcctcaacacctcggcgtctagccattgacgaaagtcggtcggatttgtaatgaagcaagtggggaagagagtactgaatgtgactgagttctgaaagattgtgaggcctcactcgttaaggcgacttatataggcgcaaaaaatcgagtgatacccctgacatgtgaacgtggtggggtatggtgggtacgcctgattggcgccgaaagatacatgcatgatcggcgccgaaagttccattggtcgtatgcgccaaatggcgggcaaatactcgtatcacacgcgaataaaggaggctgcatcggggtgcagga

SEQ ID NO: 36003 - DNA, 677 bp, Oryza sativa
aattacttaaattttttgaataagacgaacggtcaaacatatttaaaaaaatcaccggcgtcaaatatttagaaacggagggagtttatttcattacttggcactaggaagaagagtagttggggtatgaatttgtataccgtttcgaatatttcgatccatttcctaaatttatggattcattgatcttactggctaacccctgcatatgcggatatgccacacatcagcatctacccaactacaaactgcaagattcttcatattcattatgagcctaaaagtccttgcaaaacagttaagcctagaagttactatattataattcattttgatttttttcccacggcaaacttatttagttttgatcaaatttatagaaaaatatagcaatattttaaacataaaaacaaaaggccatcaaaatatattcagtgttatatttactaaaattaatttggtgctataaatatttctatagttttctataaacttgatcaaaggtactatcaagaagtttgacttaaataagtcaaagcaacttataatataaacaaggagtatttacatataatcttggctcacacatgcagctacataggatgccaccaatctagccaagctacatgtaggagacgaatcactctaataccttatgcacaaaaattcatgataaa

SEQ ID NO: 36004 - DNA, 549 bp, Oryza sativa
agttctcgcatgtcgcaccccacacgggtgcgtggattgaaaccagataggggcgcaagttaaacttataaaatgcggtcgcaccccacacgggtgcgtggattgaaacggtttgagtgaagttaaaagcttggatttggttgtcgcaccccacacgggtgcgtggattgaaacgaccatattgacgttattttcaatggcccggtcgcaccccacacgggtgcgtggattgaaactgctgtctaggctaaaaggggtttttaactcggtcgcaccccacacgggtgcgtggattgaaacaaaggggggaaaggttggggatataaagacgctgtcgcaccccacacgggtgcgtggattgaaacagagacgacatctttttttggctcatcacgcactgtcgcaccccacacgggtgcgtggattgaaacaccagatggacgtttaaaacgcttgcaaggctctgtcgcaccccacacgggtgcgtggattgaaactttggtttctgtcaaaggtgtgtcaatgtgtacgtcgcaccccacacgggtg

SEQ ID NO: 36005 - DNA, 1420 bp, Oryza sativa
agcacgaaaaatagtgtgactcattagaatatgattaattaaatactaacttaaataacttgaaattatattaataagtttttctcaaataacttttatataatttttttaaagaaatatatcatttatcagtttaagaagtgtgcgctttggagaataaagagagcataagttgtaaaagtggtgcaacgaacttagccaagtgtaggatggtccgatggctacgacatgttactacgtaccgtccttgtcgttacaccggccagctaactagagattgttgggcagacaagtgacaatgctaacggcaatgtcttactcaaaacaaaaggagaggagaaaccgcaatgtcaatgcctactaactggcttgaaaaagatggacaatattacacatatgtatcaataacgctcaattaactaaggttgtgtggctgatagatagcctgatatatttacaccgatcaaaggctcaaattaatcaagcacatgcatatgatacacatgatcgatctttgagcaaactagtcgatatatggatgcatggatcgatcgatcgatcgagtctccatcgatccaactatagcaacatgtgcagttttctggcaccaccactagatcgaccgatcatcactggatgatcatcattatattgtacgttgcattcgacggctggatgatgatcaaagattattaggtgcacgtaatcgatcgatctgcagtgatgaacgcaggttcaatcgtgcacatgtgccaatgatccaaagccgtcgctgttcatccgactcgaactcctcttgtcgacccgaaagagatgcttgaccggtgcagcccgacgaatgcatgaatcgtgcaccgttggatcgatcgatcgtccacgcaattcatcaccaatggcgtcagatcgaaagcaaccccaaatccacccatctatcgatcaaccccaaagcacggattaatttgtttgattaatttttggtagttatcaggctgattatgtactgataattaatctccgctgatccggccgtttcagcttaatcatatccattaactgttccggtcagaattatccctgtatttaagcaaaggatacagtactgagcatcattcatttgtactgtcttgaccgtgacagaaatgctttctcggtcaaataattgaattgctgtccattcaaaagggaaaagaaaatgtattttttgtgaatgcacgcgtgtgttgcgtgagaagctagacagtggccggtttaatcaaggtttggttaagttaatatcactccgtacttctcctcaatcctcatcagtcatccgaattttctatatctcaatcgatcgccatcagctgctagcaagtagcaacccagcaacctagctatagtcaagagccatgagtatcaaactgttacttaccactacgaa

SEQ ID NO: 36006 - DNA, 2171 bp, Oryza sativa
cttcctcctagtgttacaccagatgggttggacatggaagaggaattcgggatgaacgttcgtagaaaaagggatcttcatctacatccagtaattcatgttggagtagaaaaaggtataatgagctagatatatggttaatgtaagtgcatttttataggtgtgtatcgacttcttgaataatcatcctcaataaagttgcacgactctcttaaagcggtaagcatttttttaaagattattagcttataactggtttttaaagctatgcaagatatggtaggttcttctgcacgctgtactgtcttcttccagtcttcgtacttgcattggatgcctaatttctttgtgttgttctactattacctggataattgcttgataaacaataaaagagaaccggacgaactagttaggcccaaataaagcaggcccaactttgcccgttagatgtcttggttacttcttacttgggcctggttttctccatggatttgtgcagccggacctgtaaataattacaggtagacagtagtattaaaaaaagagtacagtactacatccatcagcagcctctgaaaattattcccctgagaagaaaaatcgcagattctctaacaaccaacggccttgcttggactatcgagtcagctgacagctagtgacgaaccagtatgaaccaaatacgcgtagtatgtaacttaaatggaattattaattatattgcatttttaatagcaggaatggcacttactattaatttatactcccactgtttcgttttaattgtagttgtgagtttctatgttcaacatttgatcatccgtcttattcgatttttttattagtatttttattattattatatgataaaagattaatagtactttatgcatgacttatatttttaatttttttatatttttaaataagatagacagttaaacgttcacggaaacccgctaaaatagaacggacggagcatattgcattcaacttgagatacctgagcattatagcatcactattttctcatgtagtagtacggtggtagtacgaaatgacactttttaaatcacctccactgatgatccactccactccactcctctcagtttctagcttgaccatgggcggcgaccacaggctacaaccattccaaattctagagaatctcaactgcaaattaacaaagttgtagcactactcctaattatgaaacacaacacatgtccagctagctagagaaatcatatctctgcactgcatccatacatcacctgccattcctcttctcacccaaaaaaaataatatagcaagaataattctcctgtacatatgtgtcatgaactctgaagaaactatataattaaagagctagaggtagctaatttctttaaagacaaacatgttaagagtagtagaaagatagctgagcaagctgggccatgtgcagcttagcaacactgttcgcatccgcgttatagtgtggttatttgcttcgtcgtcgccgctgaattggcgtgcaagctaggctgaattatatcctgggagtttagtactagacgccgttgtgttcagacaatctcgctttcagactttcagtcgttttttttcagagtttcagagtgattgcgagtcaagctagctatcagccaataattaacgaatgattaaatgtgtttccgccgttacgcggttggatcgatccaatccatcgatcgccggccggtttggggcaggaggcaactgtctgcagctgcatgctttcattgcttcctggtctcttcttcttcttcttccctgcagccatggatggagagagctcgagctcgacgtggtctccaagctggaaagagagctatctgacgcgacctgatttaaccctctgcgattattctgcatgtgtcgtgctgcgctttgtgggagtactccgtactggagtgagtacaccagcacagctagctctgtcagatgctgatcatgatctctttgtttccagtgctcccacaaagctgtcgcgttggcattctgccacgtcgtcaccgccacgtgcatgcgtccgtggcatggacgtacacgtacgtacgttggatactccatcataaaattaatactccctccgtcggtccgtcctaaaatataacaacggttaggcatcagaatttgt

SEQ ID NO: 36007 - DNA, 608 bp, Oryza sativa
cttgactagtgaatgttacttgattgtttgtgccttgacaattcagtattgtctatatttgtaattattttaccagtgttttcatgggagcattgcttactcaatgatatgcttgcagatggacaattgtttgattgatgatcgaagaatacatgttgactttagtcaaagtgtttcaaaactgtggggtcagttcagacaaagcaaaagaaatgcaaataaaggtattcttatttccatggccttagaatatgattgcagttttcagtttcttttttatttaagctaactgcatggtagctttcttttttcttaaggaaaagcagtaggggagatcctctactgttaccctttcctacaaggaaaagaactatataaatctatccttcatcaaaattcttttcatctagactttggtggcactcaatttcctttcagaccataattatagcatcctcctgtatcctatagaaatttatttattcctataaggaatttagtgttttgtaccatgcggaagatgtctagagaagtgtactgattattattcagcacagttaaaccgtgtcaagtgtaaagatggcaacaatgttcccaatagccacagg

SEQ ID NO: 36008 - DNA, 539 bp, Oryza sativa
gtatccctaccagtacaattcaacaacgggtacatgttgaatctgaacagtcttaacttaataggtaattgccttataatatgaagccagtgatgtatttctttttttatgcatgtaccagtaacattaatatatttttgtaagttgcagataattcgagtcaaaaggctgtttcagatattcacttaaaatccataattatttatcctgtgaaatcatgccaaggatttagtgtaaagagttggccactaaccactggtggtatgcctaaattctgcacctttgacttgttctttcatttgtaacttattttggttaccttatatgcatagttcataagttattatgtgttttgttttaggcctaatgtatgatagagaatggcttctccaagggtcaggtaggtgaaattttgacacagcaaaaaggtcaattagcgattcctattttgtgtatctgttaagccttatgagttatgagggcgcgacatgtatgcatttatatggtgtttttatactgacactgcatatctgcaacct

SEQ ID NO: 36009 - DNA, 523 bp, Oryza sativa
agttgtgcaggtgtgatgtctggtatatgaccagaagttgctctgtgtgtttgtagtagggatttgaaccgtgccttcttgtttaaatgtcattttatagctttcatggatgatcctaggtatcattcaccttcatcagaacggaatttgcagttatgctagctcttatatgattccatctatacaagtgtatgctgtgtattcttagtattgagcgttcagaacttgctgttccttttaagctcagtttgtatttatatgttgttccttttaagctcagtgtgtatttatatgatttgattagtgaatgtgtcattttgaccacttttctcttgatgtatctttatgtttgaatatatcgtccataaatggagcttgtctttatcgtacatgtgcagtagagtgcctgagaccctcctattcattcaatatattgccgtcgtgacttgcatgaaacatcgttctctttttggactttgaggctcactctgaattagtgttgcctgaatctgcgatcgataag

SEQ ID NO: 36010 - DNA, 619 bp, Oryza sativa
cctgtgcagtcgtgctgaccttgggtgaagcatttgacagaagaattgggaattgatcctatcatcaacgttttcagaggaaacgagtagccgagtactccctccatctcatagtaggtgacgttttcgattttttatttataacgtttgacaattcgttttatttaaaaaattagtgcaaatataaaaaaagataagtcatatgtaaagtacttttgataataaagcaaatgataaacaaaataaataataattccaaaattttttgaataagacgaatgatcaaacattgacaaacaaaaacttaaaaagacaagtaatatggaacggaggcagtaggtattaggtaaacaccgtttggtggaccgaatatacaggtagcagagccgagggttgaagagagcctaaaaacttgctctgggtgaacaatgggccaaccccttctggtttctttgatccgatgctacattccgacgtttccaaaaaaaaaaaaaatcatgacaacgttgcaaacgccatgagaaaagagaacatactaatagcatcaggcatcaattaaatataatcttataatcatacgaccatttcggggctaattaaccacaacataattaagtag

SEQ ID NO: 36011 - DNA, 623 bp, Oryza sativa
tgatggggtgcagcagtaacagggtcactcgcacccatgcttgaatcactctgactatctaataagcatgtcaaagaacacatcccccaagaaattctgcagtgcaatgttctaccaaggtaacaacaatgaagtgtccagaacactgtctcaaagtctaaggatacgtgggttcccatatacattggatgcaaggtctttcaagacatccgccatctgcgcctctgaatacagcgtcgcaccggcatggtccaggtaagccatccctgctcctcaagatcaagaaagaaagaaaattaaaaatctagaaacctgctacaaatacaagcacatttgtttttttatatataatggaaatcaacccggatttgcttcatagaagctatagccaattcttattacatagtttgcagctcacactactgcagttccaaacatcaaaacaagcacaattgttgaagcttatgtagcaaaattcggtaggatgctagattcttcactctccgcaacaacaaacctaatagatttatcgatacaacagtgagttacagcaagaaacgcggtcatctgaccgaacgccacaagttcctatccatccttttgttctcacaaaacactaatag

SEQ ID NO: 36012 - DNA, 522 bp, Oryza sativa
tcacctcagaccaaggagcagcatgtctcaatccaaaagatctctttttctcttcttgatatatataagctagctctaggtacagccttatggccaactgctgagagtgacaggtaaaatggccatatctgaacttctgaaggcatgaaggtgaagtggggaaaggtgtggacgatgatcttgtcaagctttgatgatggcttaaatcggttggagcaacggctaatgtagtaccactgtaccaactaagccttcaatgctgaacagttgcagacaagagcaaaagatgaggacaagcattgcaagtatgtgtatatgttcagcatcaatgtacattttttagggggccaagaagaatgacatgtaaccatgaattccaggctttgaaatggacattccaatgccttgagcttctgatgaaagttcaggtccctattgaatatatatagcaagtggattaaaggggtactgatgttgaaaaaggcgcaagcacagtgcccatcagataatcagatggcattg

SEQ ID NO: 36013 - DNA, 529 bp, Oryza sativa
gatgccagacttgagtaatttgtggctcaggccacgattttcattgtttgtggttcaggcttgaagagcgatcaaaaccaacgaagttgcaggtttgatagtgtgacaggttttggtacatttttggtagcacgaatgcacgatcaactaaccaatataaatttaacgccaacattaatcacatcaaaactgtgatcacagctcagatatgatccgttggacaaaatttgtcgttgcatgcaaaatatatcaggcaaaatttgtcgttgcatgcaaaatatatcagggacacaagcacaggaaaccaaacatgacagcgctatcattttgtccctgcatagttgatatattaaatgaagttgcattgacaataattgctgatgatgtaggagtactataaatgtgataaattgtcgaatttactaaggtcagattggaacatcaaaaaagtagtaattccatccaagccattaaaaagcacgcacaggattgcctgtgaaaggcacaccctttgtattctaccattgta

SEQ ID NO: 36014 - DNA, 566 bp, Oryza sativa
tatgatccttttgacgatcctcctcagctcagtgaacttattcctgagaattctcctgtagggaaaccacaggatgaggtaatatgagttctgctattttgctcatgttggaaagatgataaaccaaaattgtctcaccaaaatcacaggctgtcttttgtttaattcgttttacctccacattcttgaaaactatttatttgtgcacatacctttttaaaagaatatggtatgaatttcagttgaggcagccactgggtgtaggtgtattttttttccttgttctgtctgtacaaattatcccgatccctaaaatatctagacaggcatgtttcagattagtcctagaagggtgtggttttgccgtgattctcctgaatgctatgtgttgtccttttaacatggtcatgatattttcttttcactgtcaatgtacagattgcagaagagcgcttagaggatagctgggtccctatggatgaaatggtggctcctgaagaacttgaggagatgatccgctccaaagaagcacatacaaatgctgggattcttgagagcgtgagtcc

SEQ ID NO: 36015 - DNA, 626 bp, Oryza sativa
atttatctactattaaaactgctcttgtagtaaaaatagagctgcgcggttggaaacttcagttatggtaaatcgaagacggcaactgtttagatttctaccacgaaacatgtcatacgcttggcaaaaatgtatagcaattgtttcgtaatctatctatctatcttctatctatctatcttctatctatctatctatcttctatctatctatctatcttctatctatctatctatcttctattatatactaaaggtccattaaacttcctataaacgctctcaagccgccacgtggcacttctacaaacgctcctaggccgccacgtgacaatgtctaatctcaccgtcgattttcacttaaatcggtggacccaattatttggaccattagattagattagatgtatttgatttaaaaagaaactaataccttactattcaccggaaaaagaaaacaaattaaactgattttagtcctcccccgtaccccacgcggacatatgcatccatccctgtatatacgtatgtacaggtaacgtactaacgtacatacgtaagaatagaaaacgatgaatcttaccttacattagatgtattttatttaaaaagaaactcataccttac

SEQ ID NO: 36016 - DNA, 626 bp, Oryza sativa
tttcaatgtttgtctgaaagcctccctgtatgataacacacacgattaagactgtgagttgtattagtagtcattagtagccacggggtttcttattgcaaacaggccccacaggtgccctgcaaagcatagtaattcttcaatagttaaatattgccccaagacagtgacaaggggtgggaaaggctgaggctcaaaaacatttgaataatggcagtaccatacttgtatgatattgctatctaaaagcatgatcaatatgagcacgcatcaaaacaaataagaagttgatggcaatggatatagatatctgaatcaaggataatcatgcacattttaaattatgataaactagcatcacatcccatgagttgtgatggatcgaaataaatatacacaaattttgagtttaaacaagtaatcattatctaatctaaataattgtatacatataataatgcaagatcaaccgataactaatatatgcatatgcaacagtgaaagaatgcaatattttacacaaaaaaaatcctataaacagcacatgtgtagatggtctattctaaacccattaatgaaaaatctgatcatgcatagaaccagaaccaattcctctttttaaatag

SEQ ID NO: 36017 - DNA, 574 bp, Oryza sativa
cagttgcattctcgattaggtaatagtcctagcctcccatgttacaaactaataaattgtgcagatgaatcgatctgctatagttttacttttaagttcaatgtctaaacttgttctgaaaaatagtcatccgacataagatgctagcatcagttttatgtaccagcagcagagcagggaattcataattgaagaaatcagccattagtagacatactaaaaaattgcagatataagtaactgtaagcatgcatgatgcatcacaaaagtgtaactaaaaggatcttgtaataaagtctacaggagaaaatcatcgaacagaatgtttgatcagaaagcaatagcaattagcaaccatgtttggttccttagcctaccttgcctagcaaggttagcagttggttggttagattttgggcacatttttcgcgaatacacataagctttgtgtatcattgtattaagattttgggcacagtgagcaacaaattccttgatttatctatcatatcctaggaagactttctctttcaagctttacctagccaaactcccatcatttagtacttcagca

SEQ ID NO: 36018 - DNA, 561 bp, Oryza sativa
aaattcctttattgagagtgccctcaccatttgacagcacttgctgctgttgttcagtcaattcatcaccttgcttcagtaatgggtatggtttgatcatcaacctagctttttagcaagtattcaaaagtactaatgcacactgacctgcacccatgcacctaaaaaaaagacagattcagcaaaccaagaaaagatagctagcatgggctgcgtagttgggctatatgtatgaacatataaatgcaaaagaatatcctctgaaaaaaatcaatcgtgaacacatctcagtgtaatataacgaactcaaaatcagcgaaatgatcgtatcctagtttttttttgacaagttcagaagagatccagctcccaagttgacccatgaaagcctgcaaaggcaaaacgaaactatcttttgacctcatgacaccgactgtcgtaaaattcttcacgacagacatgatggtcattgagacttgcttccattccaagggccttttttccatcacccgaacgccaaaggcaatgccgttgtctgccggctatctcaagttcaattgc

SEQ ID NO: 36019 - DNA, 919 bp, Oryza sativa
aggcaagaaaacactgttccggccggactgacgaggaacccatatcgatccgctcgccgcggcccatggaaacccaacaggagatggcggcgctaccttccgccgccggcgactactaatggggggtgatgctcgagcacattgacgaactcgaggtcgacgacaaggactccaactacaactcctgctccaccgctgccgacgacaccgccaatcccgtgagtccatgacgacctcgctcacctccgacggccacgtcgtaagagtctacttccgcctcaaagcgcccccagcgacgtcacacctatgcccctggcagtcactcttctccatttccgccgccatcgtcatcgccggccgcatcccctagcacaagagagagatgaaaagaggagagaaagagagagaggaagcagaagaggaggggtgagttagactgacatgtggggtccgcgtgggtcccaccattattattaattattttttttgtgtgtgaaactgacatgtgggtcccacggggtttattattttccggatcgaattgccacgtaagggccacatcagtgccacgtcagatcaaaaccgagtcaaaattagccacgtaggtgccacgtcagccaaaaccgccattgaaaccgccgagggacctaatatgcaccggttttgatagttaagggaccaattgtatctggttttgtggttgaaggacgaaaatcggattcgttgacaagttaaggaaccttagatgaacttattcccaagaacaatcggtacgatccacggcccagaaaccaccgcatcgcaccggaccagcccaaccatttcgtcgagcacctcacgcacgcgctcccctccaagccctaaacccattccccaccaccatgcgagccatcggcgccgccgccgccgccgcgaggcg

SEQ ID NO: 36020 - DNA, 553 bp, Oryza sativa
ggataatgttctctttaatccataccaagagaacaagttcacaaatactacactaatacattacactggatacatagatttgagcctccatgatgagaatcaaaactccacaaatataattgcatacatagatttgacgcttcgtcataagaacaaagataggtccacctactaaactggataataagaatttaagacaagtcacaaataaactagtagtgcgccatagttttgaaggtggtagctgcagtgaatgaatccaaaactgtctctaactacatagaatgttgatgattttccattgttgattccaatctctgaaccaatcaacactaccgagtgataatgtgcatctagcattggaggataatatatttcgccatcattcagaaatgtaaacaaagatgtaaaggggatattaccaattaaaggaaacccattggccataaaccgagttatcaagtaaatatccctgacattaactttaagaaacatagaatccgcgtacatggtaaacgagattgttgttggtattttaacgtcagggggatcc

SEQ ID NO: 36021 - DNA, 690 bp, Oryza sativa
  unsure (1)..(690): unsure at all n locations
gtgctcgccggcgcccatccatccccgcaacgtgccgccccagagctcgcgcggcggcgccctgagactcgtcggcttggagggaggaggagctggaaggtaggggatctcctgcaggggcggttgccgatggctanactccggttcccagcgggatgaggaccgtgccgcctattatctcttccggaagctccgggccaagcgacaacacgtcggcggtggcgtcgcactcgaagtccaggaagacagtgcgcttgcggttgctgaccccaacaatggtgttggaggcgacgacggcgaagttgaggtactcgagagcgagccgccgcaacgtgtccatctgcgccatggggcggggcaaggcgctcaacactgtccactcgtcgtcgtgggtgaacatgtccttgatgttaatgttgaacaagaggtaggtggtgatgcaatccatcctcttctcttcttccaccaccaaaactagagttttcctcctccccttccatcttgtgcttgtgcgctgctgctgctcatccgcctccatctttttttttctttccgaagaagatactccctgcccgcctagcctgtatcgaggaaatcttattatacacaagtggagtatgtagtccgattccgtttcgacctcgctggctgcatcacaagtcgtttcgatcctacaactgtgtcgctgtt

SEQ ID NO: 36022 - DNA, 722 bp, Oryza sativa
ttcttaatttctcaccatacatactagtactatcagtgcaagcaccctaaaccggaacctagcctataaagttgacccgaagatactcatccctacagtgcaaatacctcttttgtgtgacttaattagatgagtgtagtgtgggaggaaaccgccctatagtgggcgtgatctcgggctgatatcgggctcgtggacacgggtagtggggcgaaataatttccccacctaccctggactcatcttctcctagccctcccccccatcgctttctcctcctcccggtcacccttcccgtcgctgcccgtcgcctcctccccgtccggcgccagtcccctttccgctcggtgggccgcactgctcctcctcgcctcaccgcgcctcttctggcgtcgtgtctcgcgcgccggcggctgctactgctccgacggtggcgagttgcggcaggcagcggcacaggcccctagattcgttggcggtcgtcaggaggcgaattgcctggagaccccggagcaagccaccgcggccgcgcctcctcgccaacagtgcacgcggcagctgcgaggaggagggggagtagatccgggttctttgcggcagcggcaggttctcggtggcgggaggcgtccccggttcccgccgcggcgtcggtcaccaccagtggcctcgccgccgcgcggatgattgtgcttcttgacttttcgtgatgatttttcttctct

SEQ ID NO: 36023 - DNA, 575 bp, Oryza sativa
aataagttgtttaagcaattacttgttgccttcagtatggaaggcttctctggattgggtgaaacattcttaaacatagaacactaaagagtggcagggtgaaagatatgtgcgctgttgttggacattaaaagcattttttttcagggttcattcattaaaatgagcatttttttttcagggttcggtctgcttgttctacaaaccagtaaaggcgcttttcactggagatcacgttgcaaaatcagaagaatctgatgatttatatctctttcttatgtacagcaggcaaccaggtagaatcctccctagattttggctaactggacataactgtgcaattgtacaattagcttacaaatcggattaataatctatctattgcataaatttgcagtgagcttgcaactggacagcatgagaaaattgttgaagttagacttcgagtgggttttacctggtatgcgctcattcaagcattgcggatagagtatacctttttaagaaatgagaaagtccctgccttagcatttagtttctgttggtttctttaaaacggcatgattgagtcactg

SEQ ID NO: 36024 - DNA, 567 bp, Oryza sativa
ttcttgttgaggtgcctgcatcatggccaccgacggttgcgtatccatccacacacagctgaatgttgagatggcctagctcaagcagggtcacggcccggctgacctccaagcagtgaccttgccgatggaggaggagaccagtgtccaatcgatgacaaaaacaagaagagaaattgatccagatcacaattcaattttcagcaatatttcactgtcaccagtgttttgcaatttctgtaagagagggaacagtctaacaatatcaatatattttacaccagatgctatattgacatctgaatccatgacaatagcacaaaacgactgttcgcagccagttaacacaaaacgccgcacctcaaattatgtataagacttgaatggagaaatcaaaacaaaatcttttgcattcagttaacagcaaagaagaaaaagagaaccataagccatcgattcatcctaattgatcatcctcgacccaatcaaacatcgtgtgctaatgacctgaagagaaacaccctaaatgcgctgcatgccgtcagcgcgagccccgccgttgtgacg

SEQ ID NO: 36025 - DNA, 667 bp, Oryza sativa
agaagatcagggagtgcaaattaagcattacaaaataaagtatattggcaaaacagtacatacatcctgatcagagggggaactctgtataagcaccatgcctccagctttaaaaccctgcttatttcagttatgaacagatcgcccaagttttccactttcttaatgacagcaagaacagaaccaactgatgcatcatcaaaaggtaacttcccacctgaaccatgccaacatggaatgttcaaaacgagcttatgacaaaccaaaatgtatactacaaggataaggtatactaaagcataacagaaatcgaaactgaacatatagcagagcaaaacagtgtgtcggttgtagggtccaaattttggaacatactccaattttggagtagtagtcatgggtgagaattgaatattgccactaatgaatctagataatcaatacaaaacatatagggagatgatctccaaaattttctcctcatgattgatgtgagaatatgaaactcttttctttccttcgtcaaccaatagcactgtctcataacctatttggtcccatatatggtgaaatgaatctatataggaattagcatatgaagcatcataaggggagtcgtcggaaactaaaggaatggtgagctccaaactgtttttcgaagaactct

SEQ ID NO: 36026 - DNA, 641 bp, Oryza sativa
cctttcattctttgaactgcatgcagagcccatcagcccatcattgaagagtgaagagttcatagaacctgttgcctacccagaccaaaacttgcttttgtttcttctcagggatcatgaggtgttcctccatatctctccacaggacacatgcactcgcgcaatgtggtactactagtctactacactgcgagctggtgagctgtgactgtatctgccttgaggtcccaagtatctgatctgaggcagcaaccaagcaaccaaatcttcccaattctcgcttgctcctagatactattaaactccattctctgcagcgccattgcctccatttctctctctctccctccctttctctttctctctcgagccatgaatgagctctgcgacctcaaggtgctcatcaatggccatcacacgcttcttcttcatcaggtacgtgcgacctgcgtaaatctttgagctcggttcacgtaatcaagcatcatctattcttacaagtgattggtggtgtttcatgtgcagagcgtcatgtgtgcgttctcggggaggttgaggccaatggtgacgcaggagaataaccagaggaagacgagccgggcggagagcctgtccgtcaagctcgccgacttccccggcgg

SEQ ID NO: 36027 - DNA, 654 bp, Oryza sativa
tcaagatggaatcctggaagagctctgagagagcctaacaggacaaccgcccatatgctggtagagtacatcatcattcgtatggaagaatatttcactgcgctaacagtatcaggggtgtgtgatatctatttctgaaatgaaactccgtatagaccaccataaagaaaatcacacattaccagactcaggtagatttaaaataacatacgggattccaaagacatgtttgaggactacagaaatccctattctggtgaatcctcctgatataactagacactgctacgtgctcaactcctgtaaaatccttgaaaaggatacataaacgctgaactatatatcatgtggttttcgaaacgatgaattcatcaaccaatacatacaaaacagtggacagatgcacgccaaaccacacagatgaacttgaggcgtacaagaccagcaacactgagcttgagagttgaggcgcgctacaaaccaatggaatcagagccttaaccaatgggacacgaaatgccatcttccaatctccattcaatgtaccaaacccaaaagtctgagcggttaccgaaagctcacgagttgtcgaattcgttaccctagaaaaaaccgcacgcgcatccgtacgcaagctaagcacgagcatacacg

SEQ ID NO: 36028 - DNA, 681 bp, Oryza sativa
tgcgagcagcaaggtcgatgccgctgacgaatcaaatgtataatgtatatataagagaaacgactagtgatgtcttggcggcgcaagccactgaaggtgaaaaagacagatggtgctaaggtatctcaccatcgctcaagcatagaaaagagaactagtgaacaggagggggagggagggaggaggccggtctagtagagaacacacataacttttacttagggatagcgtctaaaggcatcaaactaggtttagactgagtttgacagcgtcggttgggagcctgtggttgtggttggtagcaagtgcgcactgttcatgtactgttcatagaaatcgtgggcctcccaaacggcgtcgtgcgcggctttacttccgtccaacatctacagtatgtcaaaagcacgtgagcaatccgaacggattaccaacctcaccatcccgctcccaacgggcgctgtcgaactcagatttattccatactagcttgtagaaaggaaagtacactagtacagtactattgtacagaatatacccttgaaatacattgatattctttattttcgcagacaaagatgtaagtgcttttttttcataccatcaataatagctaggcaagtcagggtgtgtttagttctttggatgtaaaagttttgaagtatacggacatatatgtgaagt

SEQ ID NO: 36029 - DNA, 629 bp, Oryza sativa
tatgtgacaatttgataaaaaaaataaaagactaaaaagttaaaacaaaatatgtgggacccacataccagtcaaacaaaaagataaaaataatgggacccatatgtcagtgggttcaatttcctccacctcaccctctctacctctatctcctctcttcaccggtgagccgaagccaggcggagagggaggaggtagggaggctggacgcaggtggcgaagagaagggcgacgacgagtgtcaactgatcgggacagagatatggctgggcatgaaaatggtagggcaccgacaacttcttggccctcttactccatcaccaacatcctcgtcacctccatcctcctcctcgccatcccctccacggtaaggtagtagtggcggtgggcagccagcgaggaggagggacgcagcgatccgtggcgaggaaatgggaggcaagggaactggagagatcgagatcgccattcccttcatgtaaggtggcaacaacgaggaggggcccaggagtggtgttggcgacggtgcggtggcagtgttggtgatagtgtgggagtcgaagatggaagagaattgtcgtcgggatggaggagaaccgccaccaccagcgctttgtgacgtcatgcgc

SEQ ID NO: 36030 - DNA, 671 bp, Oryza sativa
agtctgtttctacccagccatgatcaatcattcacgaagtcagaagctcagagcacaacaagtaaacctcaaaatccagctaagggggtacagagaaatacaggattcacgtcgaattttccaaaatgtaaaatctggatgcttactagacgaccaaaatgccgtcttgtccctgcacaacggtaaactttaccttggcaggcaaagaattttaccactgctcctactaatccaagactagactggtacttttttttttgccgggacggccaaaggatggccggccaatttcattaagataggagaaaagactacactggtactgcccctataattagccactcaatagcatcaagctttttgaacagcctatcaatcatgttcccaatcatgaattgaaacagaggtagtactatcctattattcataaacaggtattactattaggacgaaattaacatatattttgttcactgagccaaacactaccaccgaaaataacatttttttttgctgaaaaatatgaaatatagatttcatagaaggtgatctctttaattacctcaaggtagatatccaatgccctgtacacgccgtcgtagcattcccgagccgagtccggcaggctctcggcgacggcgaggaacttggacaccctcaggccatggtcc

SEQ ID NO: 36031 - DNA, 623 bp, Oryza sativa
cctaatgtaataatatgattgaaaatctccatttagtcagcaataatgctcgggagtaaaattatttacacgatatgaaccatgtcagttatgttccaaaaacaccgtaatctactataaaatccataccatgcagtaaagtactattattatttttattagatacaaaatacattcgaaaaaaattgtagagcagcaagcaatagaaaacgtgatccttagcacgccaacgagggatgtaactctacgtcatatcgtagttctatttggctattctttcattgcttactaaacattaaacattatccatgcccatttggagatcaacaagcaacatatattcttacatagtactaaataattgtatttgcacagtcaatcatgccatgtaaaagccaacaagatggtaaaatcacccaaatccacatcacatacttcataggatcaaacatatatcgcatacaactcttttaatgatgtttatatagtctggtagtgcagccggaaaagtttactttgcatatgaaatttatgtcaccaagtaataaataggcatgtattcaaacaacgttgtattaaaatacaagtgtgtttgaggatacaataatacacatctccatcat

SEQ ID NO: 36032 - DNA, 597 bp, Oryza sativa
aatttaaggatgaaaattcaaattttagctgataagcataagcataagcaaaaagatgagaccctttatatgtatacgtataaagtttatgtttatacgtgtaagtgtatttttttatctttgtactccctccgtttcagattataagacattttgactttaatcaaagtcaaaacgctttataacttgaaatggtggaggtagtatccaacaaaattatatgtataaactttttcatatgtgtatacactatttagacataaaaaatttgcacgcatatatacaaagtttgtatgtatacgcacgtatatacgaaaaaaaatattctgttggcccataaaatacagacggatcgagcccaatacaatattgaagcacaccatctaagaaatctgaagtagtggtagtgaaataaagacctaacaaataggggtggaaaaaaagctcggattcgtgagctcagctcgggcttggctcgagcttggatggcttggctcggctcgtaagccaaacgagctaagcccaagtatgcttttcagctcgttgctgaaatgagccgagcccaagctggctcacgagccgtttgttttggctcgc

SEQ ID NO: 36033 - DNA, 665 bp, Oryza sativa
ttttcaacgcgacaggtgagaagtttcgacgctgagaatccgctcggatacgtggttgacgcaagcaagcgcacagatacggccttcctgcaaaagcacacggaattcgcagctcctgacgtgccgaatcggcggcaatggcatcaagccatgaacttttctgtcgtgaagaaaatattatccaaaaaggagagagggagggagcatgtgccccagctgatgggaccacgatacggggctaataatttcctgaaacttttgtcgtgtagaatatcaatggagatcttctagcaactggtcaatggagtcaagtgtacatataacacatcgcaattaataggcatgggcggagtcagaaaatctctaaaagtaggcacaacttgcttattctctactactatgcatttatatgggtaaataactttttttataaactatgcatttatgcgggtaaataacttcatgttcaaatagaacttggcagaaaagaccttaccttattcagatcggggtctgacatcttctattctcactaaacaagttagagaaattaaacgagtaatatgcaagtttaggtactgggatgacacagtcgaataagtttgaggatctaaacagtcgatttgcgagtttagggaccgggatgacacaacggtacaagttta

SEQ ID NO: 36034 - DNA, 709 bp, Oryza sativa
aaccgaaaacgttcttggggattaaggataaatagatcggtgtgaatcctatttcacaataactaaacgattccataaaaggacatgtgatatgaacatcccaaagtctaaagcggataaatcacctaatgctacctaattaaacagggaaacatgtacctaaaatcatactaggggtacgatgattacagtgatcactacttgaggtttagtgtattgtatggtgaacaaagaaataattacattaaccatattaaggtcattacatatgtgaataggcatggataaataaaacatggataacgcgggaatttaaataaagcgacaatgcactaatgtaaattaacataatactataaactgggattcaatatgttcaaagatgatgtgacttgccttgctcgctttcccaaacgtaagatggaacttccacgaagagcggatctttctaagctgcatcatgtacacaaccaacggaaaagaaaaggcttttactctgataaactccgtataacaagcagaatctaagcacagaaatgggttcttgacttcttaaggaataattagagacttggacggtccgcttcccaaatcaaatggccaagttatggccatctgaaaggtatatgctctttaaatgaatattcgcaaatcttttctttaaatatgaatgtaaaatggaattattccgccagccggagggagaggg

SEQ ID NO: 36035 - DNA, 711 bp, Oryza sativa
taaaatagcttaatgaaaatttcgttaaatcaaacgggtttagggtgattaattaattaattatgttgttcgctttgtgattcttaattggagttagttggatttaatttgtatttcggaagtggagctcaatccctaattcaaattccatccaaatccaatattcctttcaaatcctaaatccttcccaaaaatttcaaatactttatatttggaattttccagagaagtccctgtctttttccctttttccttcctctctgtttctctattctgcccttattcttctttctttttctttttcccccaccttcttctacctccagctctctctctccttcttgagctgcaggcccggggaggccaagccccgagcccacgtgccgccgcggcccggcctcctcctcctctctatgtcgccggcccaagccgccgccgaccgagcccgcgccggccgcgccgcaagcccacacggccgacgccaaatcccgcaagccgcgccaccaaattcggagccgccgcttttccaaagcttgcaccgtgcgccctaaccctagctactccctcccctataaataccatcggccaccgcccctttttcccccttttttcaaagccgccgccatctccaccgtgagcagccgccgccaccgttgcttcgtgccgccgtcgggagccgcgccgtcgtcgtcaccatcttcttcccgtgcc

SEQ ID NO: 36036 - DNA, 592 bp, Oryza sativa
cccgagatgatgagctcaactgacccaccgcagattttagagcccagcgctcatttgaaacaaaacaatttggcttatgcttataagctaattttgaattttgaaaaagagttgattgtaagggtttttcatcgtaatttattttcgagcctttgctttagattgctaagaacatgtatataaaagttttgtttataaattatttttcgtttataaatataccgtttcgcttattccattaataagcgaaactatggcctccttttacaacatcttcctcaaaattagttcaattcttacaaagaattataaattcctttcatttagaaggaagcctcaactgacttatcaggagccaaacataaaaattgaaaaatctgactatttgagccattgtgatagactcgcataatcccacatgtcatcctcacgagtgtaaatacaatcaaattggcaacatataaagtgtcaaatcatcaaattttatgatatatatatggagcccagcactcatttggaacgaagaattttataacacttctcacagagctagttcagttcttacagagatcttatatgcaattcctcaatt

SEQ ID NO: 36037 - DNA, 537 bp, Oryza sativa
tttgcatatctgcttcatcctaggctaatcgatccatgctacggtaacaatccaatgacctttataggttgctctagctccaacttgttcatccgtagggtgagagtcccgagggagtcagtgatattatttattgcataagcatggtgcttaggctagataaatgtcattggatgtgggtgtgctctagtgaaaaatgaggtaggcagcaggtggtgacagccctatccgtcctttgtattccttcacgttcgggtatgacgtaagagtgcgtaaataccataaccatgctagcagggagtggtctcttgataatacctaggtgcctaggttgtaagcatgtatatgttaagtttattctagacaagattagaatagaagtatagatgattcgtagtttccttaggctattttctactggatattcttatagaggtgaatctcgtgtatgtctactacctcatcaattactccctttgtcccacaaaaaaccaacctagtactggatgagaaatttcctagtaaaacgaatctgga

SEQ ID NO: 36038 - DNA, 704 bp, Oryza sativa
ccagctttgttatgtttttcccataagtgtccaaattaaaaggtagtagtggttagtacttgatagtcaagggtgacttatgcaagttaaatcttaaccaacccatcaaagttaaagtggtttgagtgataaaaggtggaatattcttaattacacttcagggtgatgctgtcacccaaaacttcaaaaaatggtgaactttcatataccggagagtctatcaagcatgatgcataggtgtgttttatagcagccgtggtgaaaactcccaaaccttaaaacaatggtgcatttcttatatttaaagcactgtcaagtatctagagaaagcctctgcgaaaacttcatcttcattattaaaaaaaaagaagcacaaggccaattaatattctgagttacgtgtgcatcagccaatttaccaaaaatactgctatacatacgataaaatttcttatggtcagagcgtatgatacttattctcttgtgtgtgcggcaaatatggggctcgggatgtttcaacccaatcgacaatcatggaaggtagtgtcgtactcccaccaggatgataatacttgtcgttttagacaagagtgaggtcaaactttagaatctttaattatgaatcattttaaagtattcatctttcaaatacagtgactatatatatatagtcactgtatttgaaagatgaatattttaaaatg

SEQ ID NO: 36039 - DNA, 1062 bp, Oryza sativa
gtgtttgtgagagattggggctaggggtatagcgcccccacacatataaagagtgagatgtgttcacgcggatgtgtgatatagagttatatgagaggtgttgtggtgaggggtaggggtgtgtatcattttcatatctaggggtatagtctcaccatgtgaattttgtgaaaaatgagagagattgtgtgtttgagaccccggggcgccccatgggggtgtgatataatatacacatatatgtgtatatatgtgtgtgtatatatatatgtgtatatgtgtgtgtatgtatgtgtgcgtgtgtgcgtgtgtgtgcgtgtgtgtatacacacatatatatacatatatatatacacacaacacacacacacacacacacacacacatatatatatatatatatatatatatatatatatatatatatatatatatatatatatatatataggaaaatgcagatttgcactcgggttcacatgtacctacaatctacaccgttgatgtgttccaagattcgtgctgcaaaatgtacctaaccataaccaaatgaatgcttactataggagaaaatattaggattaggttggttcacaatatgtataacatatatgttgcattttttatcaaataggttttttcaataataatcatatatgacatttatatatctagtgcattgtatttctctaacccttatgttgtttataacatgatatttagtcaaaatgagaaaacaatatatctaccatatcaccaaattgtcatcttgcaaaaatgatacttccaaaatgatatatatcctaccatcaaaaactacataaacaaggtaatttatataagcaaggtaaactacataaacaagttttgcatacaagaaatacaaaaattacataaacaaggtattttacacttgtaaaaaatatatatagaataaacatcatgcatgttacattttgttagcaccaaatatacttgccctaagattcgtgcaagctatatatagggtgtagatcgtgggtacatgtgaactcgcatgcaaaaaatctacaaactgtacca

SEQ ID NO: 36040 - DNA, 1190 bp, Oryza sativa
tgctatatacctagaaccaaaatctaacaaaaacaagtccaaattcagttcaaacttggtttgaactcgttagtaaagtagttaatgttaatacctaaacatttaaaaaagtttcatactcatttgaattgggtatatactcaatttcaatcatggtacccgggcaccatggagcaccaaacaaatttactttactatatatattttacccctaccatgagctccacatataaaccttttagaggtagaataataaaagatgcaacactatgccctgagtgaccgagagtatcatttgatgaactttgttttaattgtaaaaatttttgaaaaccagcagaatgaaagttagagagtgattggtgctcaatgatccattctgttccgcaactacccaaggcaaggagaagctacaagccccatgaggactaaggtaataaatgtaaaactattattgccaacttattcaaattctaagtagaaggatatgttgtagacatagtactattgtgaaataaaatattggtagcaactcctgatcaacattctaaattttatctttacttgggggtgttgttgacggtcgctaagtaccaattttgaccaccaacttgcataaataaagggaaaattagcatttcttacacgtatatcaataataaaataatgtagttgtattatgattggagaattaacttagatgcaggaattatagactaaagtgaaggagaaatgaggccggcaagcaaagaaacacatctccggcgaatcacgtgcaagtttatggattgagtggcccacaagtcagctaaaaccgactcaaagtggggccaaccaccctggaactgccttaggggcgcacaagacagtcactggagaaaggtggttgcgaggaggtgggaccaagggttcggttcggccgaaccgccatcagctccactcatcctggccctccacgttgtgctcccacattggcctcctaatggcagttatggagggtcggttgcgataaccgtcatacaaatcgtcattaggtggttataaatggagttctactcctcacttcacaatacacactcaacgagcaattccctcttccactttgtattatctgtagtttctagtaggaataaagcttaggagattcggtattatagtcttctcggagttcttggcatgtctctcttact

SEQ ID NO: 36041 - DNA, 743 bp, Oryza sativa
aacagtttatgctaggtcttaggtttgtgaaatgatatttgaaaactcagctttacgcaaagtaaccatagccactccttgtattatcctgtacattactgcattttgtgtggtggcttgctgagtacttttgtactcattgttgctctatatatcttttagcagagtgttgaagagaagcccttgttagtatgcttgcgtacctaacaagatgatcggagtgtggttccattctaggtctcgttcccagtcgactgcttgtggcatgtcaaccgggcccttgtattattttgtcttccgctgttgttctctgttagttgttggcctgcctggccctaatgtaagcatttaactctcttagcctgaattcattcgtgatatgttgtgatttggctatgtatgtgtgtaccaactactgatccagggattggtactgataaacacagaagatttccgagttccaaaatcgggggtcgacagagctggtatcagagcatatcgactgtagttcgagaacctagatagaatggtcgttagtttaaggactctatatttttcaaagctatttttaaatgctaaaaaaagatctgtgaaaacattcaaacaatttttgacgtcatcttacctttcttggaaaatgtctgattccgatgcaccgaaaagaaaaattattttgataccttacatctcaacccttcctttgaaaaggcaatcttacagctcgatttgataaaaagggggat

SEQ ID NO: 36042 - DNA, 1094 bp, Oryza sativa
ttaaagcaagaataatgtatcaaacaaaggcctaacatatttagatacagcaatatcttgatataaagggcagatttaacatatcaatgaggcatatagaataaatatagttaaatcagatacgatcggctgaaactccgatgctattctaatcagcaactagaaggcaggctagagatcgatattctaagcacgacttaatagatcaaactcaactgatgcagcattaagtatgaaaaaaagaacgatatctagacaatcaagccgctagaagtttcatagaatggtagatatctcatataatctagatcaacattaatatttaacctaatcggctaccctctattaacagatattaaccgatggcaggttagatgatgatattgctagtgattatataagacatatgataactcgacgaattacataaacgggattagagtatcataaagatggaagcactaatcctaagaacgcaatccgtcataacgaattttacctcttgttgaagatcgaaatcgatgcagctcaacccaaaagcaagaactcgtcgaaacaaaactaaagcaaaaagggtggcgatgcgccaagattgtattgaacgtgtgttgttaaaaattacatagggctcggggtctatttatacccaagaattacaagatatgcccataccggacacgactattatctctaacaaactctaagattccataagactttgcggcagacttttgcccatatttatctataaggaatttacataagatatcctaattaatagatacaattgccttcccaggactctatccgtgcttggcaatcatcttgaagcacattaacttgaacccgatgtcgtgtacaagtcgtattgtcggaatcggttgtatcggcttacttagcccgacttagacccagtcgatcctaaccgtagccgatctggactccggccgattcttgctctgtttccgaactcgatctccgcttccgacttcgttttgatccaatcctctttcctgacacagatgttactaaatttagttgttaacacatgccccccaagtccgagatattcgataatgttccgggtttgctgt

SEQ ID NO: 36043 - DNA, 868 bp, Oryza sativa
agagcttgttcaacggatggatctagggtaagcagatcatcggttggcttggttttctttgtcttcttcttcttagttggggctacgaagcttacagccgacgatctggttttcctctttttgccggcatcggctggttctctgacgagcccttgaagaagagctgaggtcttgggggcatcatagccgataaccggaggagatagcccacctccatttggaattaaacctagggtatattggatgtctttgccattgttgctttgatgaggaggggaggattctgttgtctgcaagtcaaaaggaggattagttgagattaattggccaaacagttatttaaatgaaattgagcaaagttgaagacttacttgagggacaacatctggaaagaggtctgtcatatacattgaaactggttggtggaataaatgcagtttccattcaccccaccacctgtcaaagcttttgcttctgaacgttgccagttctatgttgtcaatactacccagagggggtccttgaaggctaagcagccgatccatcatcagggtcgatgaaattcctcctcggcattggatcttgtcggcaaagaataagccgattgggagttggcccattccaagttgtctacctgagctcattggatgatagaattcataagaagcttcgatgtttcttccttgatgaatgccaacaggaaggatgcatgggctaattgcagttgagaaaatttccctggatgattggtatagttcatggttgatgtcttcaaatctgaagtccactgggtgttcaagttcagcagagttctcacaaagaaaccaaactcaagcatctttttgaaagccttcatagaagttgcaaa

SEQ ID NO: 36044 - DNA, 585 bp, Oryza sativa
ttgtaccactgcataacaatactattgatgcttcacatatgttcatttaacactcataattcaaccattactgcatagatcgcctgcacagtgccgaaattaatactaaatcatctgggaattgggaatctgtccaagatcaatccacataggagtacataggtaaccaattggatgcgatccgcaattaaaagttttgacatcaagaacatctacttcatctccccataataattgggctgtagctcttgggagtaaaggccaggatgctatttcattccattatctaaaaaaaatctccccccacaaattaccggtccactgttcccgcatcgggcatgacttcacgcatttatatagggaaaaaaacgcagaaacgagaagagctcatcgaagaagaacaagagcgcacctggaggcggatgacgtaccactcctccctctcgatgtagaagtcgttgagcttctggagctccatgtcgaggaccctggcgaaccagttccccagggcgatgcccccatccccatccccatctcccgcaggcacctccgccgccgcggcgacgggagggggatctccatcgg

SEQ ID NO: 36045 - DNA, 543 bp, Oryza sativa
tgggcgttacatttgcactgtgtttttttaaaaaagaattcaaaagttcaaatagacagttgaattaattatacttgaatattgcgtgtgtccactagcttgtacacctaaacattttcatacttcggcgccgtagaccgtaggatacgtatagtactctcgttgacgaataatcacactcataaatataaatgcacctatacttttgactttgaaccaagaagcttaattttcaacgaaattattcatttattattttgccccgaaacaaggggcaggccggctaatttggagagtacaatcagaaatccattaaactggagaaaattacaaacaaaagctgagaccacgcatcaccaaacacgcatttacaaacttaatcccatgactatagtcgtagatatcaaataaaacacacgtaatttaccacgggtaattaaaatttttaactggatactctaaaagaaatttgttccggatacttttcgtttagagatttgttccggtccaaataaaaagtatcacatggtactgatacctcac

SEQ ID NO: 36046 - DNA, 660 bp, Oryza sativa
acctcggctgattcctggacgaggattttatgcccaaataaatttggaaattactagtaatttcccggccgtaaccttccttcttccgcttggcagccgggtgagggcccttcggggcgaacccgcgggatagcccgagggggtgacgccatgccccgagcccccccccgcggtttcacgactcgcgtgaacccccaaatggggcttacttggcaagtcacgtcgccggaaggaaagtaaccctctacttcacatacccccgggtccatatctccgacagtagcccccgacgctatatcaggtatcgatttcctgagatcgttctgacatggtgcctcacgactcctcgagctggggttgtgggcccggcagggaatccaaaaggatatcgccgcgtggccaggttggcgtgccaaccataatagcggtttgaccgccactgaccgcgctcatgatgaagatgcttgaggcgcgataacccggggggtcagtcagaccacgcctcgattctcccgctcgctactcctgcggcggtagtggtgacggtttggtcaacttgcgctcataaccggtgtgcactccacctcgagtgtgccactgacagacgcactaaaggcgggagcggatacaacgggcgacgtgatgagtgggcgcaggatg

SEQ ID NO: 36047 - DNA, 657 bp, Oryza sativa
gcgttcatgctctcgaggtcgtccttgagctcctggatctcgtgccgaacgccgctgagagaacgtacttgtcgaagaggaattcgccgagcttcccgagaagaatgtgcaccacgccctcggtggagctcaccacggcggcctccatggcttcctagccaagtgtaagtttggtcgatgagctcttggcttcttctggtaggaatttatacagacgatccgcgccgaattggttgagctcaaacactgaagtgataagactgatagatgctgttcaactgggatactgtacttcactaacaatttattcaaataattcgtgtcaaaaaaaatattcaaattattttacaggttcaattagtagtaatttttattggggttgttggatcagccatcatgtgataagttggggtaccaaggatgtaggagtatcaatcaatacattacactgtcattactcttaaaaatatgggaatgattggttcatggttagtactatttttcgccttataatacgagatctctcatgagagtgttgtgtagtactctctcaagtaacgaaactatgttgtttcagacattttagaacatacttactccgtactcataaagtaagtcgtttaagataatgtttaagtcaaaccttgggaatataaa

SEQ ID NO: 36048 - DNA, 582 bp, Oryza sativa
tcggcaccgccagctgtcggtcgttccggttgtgctctggtagcagctttctcgaacgcgttactgagattggctacagattcccatagtcgttccgtccatcgtgcgagatcatcattaagcacaggtcatagggagcttctctcagtattgcgttgacggtgccgagatgttgggctggcgtggccgtctgattctccgcctctgcgttagcctgtgcagacgtgctagtcccaccaatggcaaacatgtcacgtggtgtactggaagatgacgagccatagtcttcgagcaagtgtaggactgatggttcacggggattgatgtcgattactccaatgaatcgatctgaggttatcgtcgctccttgttccttgtttgtatcctcgagagaggttcctgactgctggaccttaggaggtgtcgtcttcatggcgcggaaaaagaccttgcagcttgagaagtcgtgattcttcgtcttgtgaataggacaatagacatcacgagttggagaagtacgctggattccacgctctttgcaagcacggatttcagcttgtacattgagaaaaacccagcaag

SEQ ID NO: 36049 - DNA, 1390 bp, Oryza sativa
cactaacaatttattcaaataattcgtgtcaaaaaaaatattcaaattattttacaggttcaattagtagtaatttttattggggttgttggatcagccatcatgtgataagttggggtaccaaggatgtaggagtatcaatcaatacattacactgtcattactcttaaaaatatgggaatgattggttcatggttagtactatttttcgccttataatacgagatctctcatgagagtgttgtgtagtactctctcaagtaacgaaactatgttgtttcagacattttagaacatacttactccgtactcataaagtaagtcgtttaagataatgtttaagtcaaaccttgggaatataaatcatgaataactcttaagttgttgagtttgaaaatgtaaaaattatatgaatagatttgtcttgaaaaatattttcacaaaagtatacatatatcatttttcaataaatacttttatagaaacaagaagtcaaaattgtattttggagaccgtgtcgctgtccaaaacgacttcctttacgagtacggagggagtacttcaattcaaactttaaaaagtttgaacaacaatatatttataattatttagaatggatgaataaaaatcgtatgagtaaatttcttggaaacctactttcatattgctaccattttatcatgttatgaaaagtagcggtcaaagttgtactattttagtattttacaaccgttctgatgcccaaaaataacatgcatgttttttttaaattccgtttcatggaggtaagtcccataaatacagaatgactatacgaatcatcgtatcgatagatggatcccaaggtgttaggaaaatgagcaaagacattttattgactgaatcatttttttttttgtcaattcaaagttcaatctttgtaacttaatttcttgtaccaataatattttgaaatgttttactatatattttatcttttgtttatagtctccacgtctcttctaaattgtgcatcgatcatgcatataaagtctaaatttgcataagttaaccgcaaagtttaatttactttgcattttatttgctttgcatatgtgtgtgtacttttatgcttctctctaacccacctcataaaaagaattgccattgatgatagagattcaccaaattagaattgtttgaaggaaggtagaaggtacctaaaaccaacccactttgttattacaatgtgatccccacacctgggccacctctgttgttctgttattaatttgttgtgacaatgccaatgttcaatgggatcagtatctataatcctagcttaatttccgtgaagcatctaacacaagtctccttcggtagatatccatacgtggctacgtataatgaa

SEQ ID NO: 36050 - DNA, 1111 bp, Oryza sativa
tttattccatgagtccaataactatattttttagaatttggttaacaatagtctattgtttgaatgagctaaagatgctgaataaaactacagctactataagctgctcaaacagggtacatgaagcataatagacatatgaggtgccacaaccatatgtccatactaccatatagatgttactccctccgtcccttcgtcctaaaatgtagcaatctaaaatatgatgaggcctattctaaaataaaaaaaaatctggacataatatgagactcatcctagaacatccatcagattgctacattctgtctaaattcgtcatcctaggttgctaaattctaggacataggtagtaacaaagtacagattgcataagagcaagtataatatagggctataaaaaggctgaatgctgatgtggatgagagaggagaggagagatgataagcgagctgtaagtttgcagccggcttaggcacagaaaccaagaaaatttgtgagacagacaggtggaccatatatttatagtgaagagttaaccaccatatgagtgagctgagagataggctataaggatctgtacagtaagcagttggttgtattattagccttgctctaagagcaagtataatagtatagtcaattattggctttaaatcatctataatcaatttaatagccaatttatacaatagttacatatacacatatactacataattaacctttggtatcacctgtcatacacacatgtatcttgagttcatgttgcagctggctacagatctgtagcccgctattcttacatcttttcttttatcgttttaaaatatatttatagttggcttatagtctgctattgtaccaaactataagagcacccatcagtgtcagagtttagctgaagttgctcaggcgctgagcccaggaaaacggtatataaaattgtgattcgaagaggccagctgattgactctacactcgggttgcggtagctgcggcaattgaccatggaagccgccgtggtgagctcgaccgagggcgtggtgcgcatcctcctggccaagctcggcgaattcctctccgacaagtacgtcctcctcagcggcgt

SEQ ID NO: 36051 - DNA, 585 bp, Oryza sativa
cgtcgatcacctcgtatccccccaccgataggttcggccccgccgtcttctcgctcccggcgttgtccagcaagatcgacgcgtcgcacccctgcacgcaaaaccacacacacaaaaagaagaaaaccgaccggtcagccaggcgccattgacacgcggccacaaacagctgcgctttgcagggtttgaaaaaaaatcgcgggagcaagggggccaaggccggtggtgtggcatggcccatgcatggcatgcatgggcgccgtacagggcgcggcagctttgataagcttagctgtcgcgcgcgatgcatcggctcagcgccgcatgtgagctgcacggcaacgcaacgcacgggccgcacggggaaaaaaaatggggggaaaaatacgacaagattcggcgtgctccccccctgtactaggcacgcagtatttttcccgtttgtctcgttgctttggcgcgtcgcgaccgcctcgcccctcgcctcgcgctgccgcgaaccggggaaaaggtgccgtaatgcttacgtatatgtgtacaggcacaggcgaaaagcaagataatatcttctcggctggtcctccc

SEQ ID NO: 36052 - DNA, 591 bp, Oryza sativa
tctccctttcggacataagatgttatttggggcagcatttggagattgggggtctagccttctctgagctctgaagtaggcaagaaacaaacatgaattaaactagtgatacatgcaaaccaaatatgttctgtttttgagtgatataagatggaaagttgtgtgttcgttaatgtgctccaaaataacatagcaatattcttttactactccaaaagagagttacatgcctattgattacggattctctactagtaccaataagatcaaagttaatgattttgtcggaactaatatccagtgatagttcttttcaacataggttacatatgtagtaatatgtttcttcataagttgaggagccatggaaataataattgagaggtgtatggacatatggttagtatggttagaggggtaaaggtaaaggctaaattgctttgattagcagctgggatttgtcttttagcgcctgatttgtgttgcatttcaatatgggtgcccatattaggctaatacatgtaaatctcatgtggttgacttcaacattgttctggtgaggcccttttagggtaactgggtgctgaggtc

SEQ ID NO: 36053 - DNA, 560 bp, Oryza sativa
caacgagagtacatacactcggtagtttatagaatagtggtgtgcaaaagattgtccccgatagaaattgcactgtagtttatattaactgaatgaaaataaattttctgctttgtcatcatcatcaacgatgcaagtgcatgcacggttacctttagcattagcggcccataataatgcaacttctctcttttaagtttttatttttcaagaggacatcctcttatttattgcacgcaacctaaatagtatagttattaagaatttagaaaaaaaaagttttgatgaagcaaattagtatgaaacatatcactccacaaatataaaagtccgaattcaactttcacaagttgtaataaaaacgtcaaatataattgtgaattcacgttaactaatttcaacttaatttgtacttttttcttataacttataaaagtcgaattgatcttgcatgtttgtgtcgtgatatattttatattaatatatcttaattatcattttttttattttttaataattatttacgtgatatgtaagaaaggccagaatgttccatcaaa

SEQ ID NO: 36054 - DNA, 540 bp, Oryza sativa
caaaatttaacttctacatgttgaaagaaaaaaataaatttgactataaatgtaagttaattagttgtaatgtaatttattatttttacttgtaaaatttgaattttaacttaatgtttatagaatgatatatatatatatatatatatatatatatatatatatatatatatatatatatatatatatatatatatatatatatatatatatatatatatatatatatatatatatatatatatatatatatatatcacatactaatatattttctcaatttttttaatattttaactatttaagcgacatgcaaataatgagaagaattctctcgagagtgtttaaaataatctactctcccactgctgcactactatagcaaatcgaatgtgttatacattcagttgcagttacatttagggatgaaaacggagcggatagtttccgtccgctccggagaaaaacaaaaaacggatacctttcggattggatagttcagatacggatacgaatacggatattttttcccagatacga

SEQ ID NO: 36055 - DNA, 625 bp, Oryza sativa
atatgccctatacgtttccctttcacgaaggcgtcaaatcgttcgaccacgtgatccactggactctctctccatccaaggcccaatttaccgcctacaaaggcccatatttgaatgggccctaaattttgatcggccttaggtgggcctcgcttatgagagcttcgagagggcccacgtgtccactctctctctctctctctacagcgacggcggcggcggcggcgaggtgagaggaaggagaaggggatcgaggaggaggaggcaagcgcagccaccatgggagtgatggagaagctcaagatcttcgcggtgaaggagcccgtcgtcaccgcctcctgcctcatcgccggattcggtgcgcttccctttctctctcgatcctgccgtggccgaaaccctagtagtggcctggtcgtgattcctcgcccccattgaggacgctggtgttgccttgcactgggcgcctctgtttagctcgaattcggtgaccgaggattgattctaggactctctgggctggggtggatgggttcagaacgccttgatgtgattttttcgcttgctaattttctgttggatctagggttctaaatcgcttcagaggtgttcttctttgcaagcc

SEQ ID NO: 36056 - DNA, 1237 bp, Oryza sativa
ccctccgtatgctagctgactttaatttttgaaggacccaacatgattcatgacagctgacttagtattaacgagaagaaaactgtataacttgccctgttgtgcatgctaaatgtgcagaggcgtgttagctgataaaaaaaatgactctgaaactatctaatgttcgctgataaatacatgtgctggctgctgttggacacaataatcatcagaactgtgctatgatcagtgatgttttctttacagaaactacagttttcagtcaagtatgtatgtactaattaagtttcatatgtccttaccacctcagagaattcagaaacatagcaggagggttctgacagatgttcaggactatgactatggaggacccaaccctagacatgaaccacgtaagaagcctggaaatggacactaatcgcctcttctccacactgaaaccttgacaaagataagtcagatactcagatgatcccaaatgctacaatcaccagaccactatcttactgtaatgtactagaattaagcagaactgttaggtactattgtgtcgttaattaccttgtaatatgttggtcaggtgcatggagttcaggtcattttagacagtacctgcgtgtattcaggtgtgtgcttatataactagcaactggtaaaatacaactactgaggacattttgtaagttgagacttcagatatgtgagctatcttgtttgcaaatcttcggttgtgttttgaataaaacgagcattttggctccgtataaagtttgaatgttcagagtactcgtcaagttgagagcgttgctcgtaaaattcagttaagctgtatgtattaccctccacagccagcgaagatgtaagaatatcagtagcaaaaaatctgaaacacatcttctctcttaacaaatgtgcccttcttatatctgataaaaaaacaagataatatttcacgtgtaacagacatccttagctgctgaattcagaaccgagcagtcatactcatctgcagtagttcagcagcagcagatcctctcgtcctcttctgaaacacaaaacagacaagcttctctcgttactccaccctacaccatccatttatttcttcattcacctcgtcattaggaagccatgcaatcctaactagtttagaccaattcatacatccaaagaaaacgctccaatatatataatatattcaggaagcatcttagtacttgcgacaaactctgaa

SEQ ID NO: 36057 - DNA, 522 bp, Oryza sativa
cctgttatacacatactgtgtcttagagtccgtgctatagccgactacaaatttgtagcccgttgctcttctctcttcttatttatctccctaaaatatgtttgcagctggtttatagcctgttattgtacctgctctaatcctcctgagtggttgggaatttgggtttgtttggtttagtgtggtatattttgaagggtagtattttaagtgggtgtgtttagattatcaaaatttatgttatggtggagaaaattttagaatggtgccaaattaaccataggcattaccattcacttggctctaaactaaaccattacatttactactccatccgtcccattttaaatgcaaccattagtttctgtgcccatctttgatcgtcctgtcttatttgaattttttttataattagtatttttgttgttataagatgataaaacatgaataatattttatgcgtgacttatgttctatttttttaaaaaaaaatttcaaataagacggacgatcaaagttggg

SEQ ID NO: 36058 - DNA, 716 bp, Oryza sativa
aaaaaaatggactagtagattgagtagagactcgtggcatgcaactgtcggaggcggcaacccacgtaccggcggccaagcttccggaccctcgcgcggcggttgcggccggggccggccggagagacgtaccggagacgcgtcgcggagacggagcccccaccgtctctaaatgccgccgcccttttggtactttgatgctgcagacgtacgactcccaattcaattctcatgctgtttccatttaattttcgtatacagattgccagggattctgattaattaagtttgtggtgatcttaattagccccccgccctgctactgctagatgttcctttcaaatacagagaaaaagtcgcctagtagatgcgaatgtgatggaattttgccggaactgaatttaattatgagttggtacgcttgagggggggatgatgatcaaatgctgtaaacactgtacttaattttgcatgttgagtggtgctgtcgagtgtaaactgtatggttgctgtgctatgctgcaatggacaagagcagtaggatgtgtcttgtgaccacagttggtacgtagtacgtgatcctttttttctgatgatatgcatggctgcaaactgagactctgacaaaagagataaaactgcgcatatgtttggagtaatgtgctatatatgtaagcgttatgctgctaattaagctcgtgtgaaggcacaccaaa

SEQ ID NO: 36059 - DNA, 1573 bp, Oryza sativa
tctcataaagaaccaacttagtactatatgtgatacattctactactataaatctggatgtatatctgtctagatttatcatactagaaatatgtcatatccaattctaaattcgttttttatggaacggagagagtactcttcgagtcttgataactcagccaacacagttgacggtgaacacacctggagaggagaaagcagaggtgtgcactgtatctgtgtatcaatcaggccgagaccgacgctttgtcctctcatatagacactgatcgacgtctcgagattgactctcgactttgccccgacatgcagtagagcgttgggcagtgacgtggcttaatctctggccgtccgtgtaccgatcgatggccacggatcggatagaatatgccggaacacatgtcgtcaggttggttggcatggatagaagatagattgtgtcacgtcgcggtaggcaaaattttcgcttctcgagtggtccagtggacgttgccacctgcgtgtgtggcacgcggctgagtggacggtttgtacaaggcgatttctacagttctactggctatggggcctatggccaattgaccatgagcagctggttggtgcccagttcaccggagccgccaatccaaacggcttgatgcgtcgcaactgtggagctttgcatgggtggagtcaaatgtggagggtggttgttgaattcgttactactactactggtgcatgacaagttaaatcgggagagaaaaagaccttacaaaagaaaatgtgagaaaaggtgagagacgtagccaaatacctgatgaactgtgacgtctgaatatatccgagtattctgcccgtttgacgtgtcataaatcttatataattattagtatatcccagtattctgttcacttgatagaatgatagcttacaaagacacaagtatttactatttgtgctgactagtcactcagtatgcaaaaatctgcaggtttggtagagacaacacatttaactttggacagcaactaatcctagcatcagattaatgctgagaatgagagctcagtttcatccatcttgggagtcatggcctcatgggtcacctgcatgggccaccgtgcccaagatcctaaacttgctcccaaatttatgagtagtttttttttccgaggtcagagaggcataatcacaattcacaaagatctcaatcccaaacgaaagagacgcccgacccacctctcctgttaacatcactgctcacttatctcatctcacctcttgatttgaagcagacaatgcatgatcctcagtcacaagataattctgttaaggcaaaaatcttgcaactatttcacagtttaattcattaacaccacatatataagaaatctcttgattgatttagcattgctaagtagtataattaacagggagcttagtgagcttgctgtgaaattgcaaggctcttgttgttcttggcgagtgtggctagctactgcttgctgctgccgcggttgagcatctccttgtagttgagcagcgagttgagcctctgaagctgcagttgctgcctgaatttgttgat

SEQ ID NO: 36060 - DNA, 804 bp, Oryza sativa
tatcaacctccaaatgttccaatcacatctttgcttccaacgcaaccaaccatcatccaggcaggctccaccagatgacctttttaatttaccttcaccgtttaggtagtatgcaactttggaacgatctcttcagattagccatcttgagcttgtacgttatagaaaaaaccgtttttctgatggtgatttggtgacgcagatattctcgtggagtgacgagaggatgggactcactgatggagcagcgcagatcaggggttcagagtgacacacttgcacacacatttacatttttcctagagatggcaattgtgctacagaagttttcgtgtacagcgtttttatggattcagagtgacacgctggtggagcacacgacttggtgatttgagtccgattacagtcggcctggaacggcactgtgatgttaccttcagcccattctagttgggccagaaaggaagtacttaaatgtggccccattatacttgggcctgggagggaatacgagtagggatggcaatgggggggctacacctacaaggctacacccgtcggattttgctatcctgtcccgtccccgtagtagaaaaaaaatcccgtccccattcccatccccgcacgcgggggagtgttttcccctcccccgttcccgcccccgtgcgggtatggggcaccgtcgggtgcccacacccgacaatatctcaatagatttggtagcagcaaagcaagacaagaaatagccaaacaccagtgaataagcaccaaatcttaccgtaatccaagtatccaggctatcaa

SEQ ID NO: 36061 - DNA, 596 bp, Oryza sativa
ttgtgaaacgataaccctctctttccatagagatccaacaagtagggggcttatgccccttagcctctgcgctggatccgccactggtgcagcaccaccttaggtggatgatggggaaggggatcagcaatgtacacgacacgaggcaagaaggaggggttccgttgaggctagtggtttaacaaattacttatacgccattcataatttctccccactacaacaaaaacattatataaagacacttttgtagaggcattttgcaaattgcctctaagatcatgagtttatagcgtagagacactttatagagacactttcaaaattatctagaaaatttttactctagagacactttagaaatattttcaacacattttattagattatatcttgtagaggcattctttcggcactttaaaatgtgtctaacatgtaaagacgtttgcttgagacactttaaactctgtagagacacttcttacaataaaaatatattaaatgactaaatataagtaacttagggcataaacatatacaatgaatgacatggggttgagttggttagtgccttgaaaataaaaatgatttgttca

SEQ ID NO: 36062 - DNA, 922 bp, Oryza sativa
tgcacaccgacaatccatgggttcaccctgatatgggataataagaagtggtgtcttaccatctattactgatgagaagaaaatttatgagaggaccgttctcacattggcatgataccgttctggtatgccgctaataacaacaattaatatgtaatttaggctcatagctcgatatatatatggatcggaattaattaatgtaccacacgtaactagaaaagtcagctaaaatcaaagatgacacgagaaactaacgtacacatgctaccttaccactcacgccatagctaaaggagtactacagtgtaaggccaaaatatgccgcatacgcttacacttccatcgccggctagctgagacaacggtgcaatgcagtgattaccggccggtactgcgtcaattcaagccaacacacgaccaaacatttccatgtaggagtataaatttaagtctcgtacatctgattaattgacggtcgttattctagctagcagctggctctcaaatctcatcggttcaattaattcgtctacagtatactaactactcgttgatcatgcatactctctccatacttgtaaaggaagtcgtttaggacagcgacacgatctccaaaacacaactttgacttcttatttctataaaaatatttattaaaaaaattatatatgtatacttttatgaaagtacttttcaagacaaatctatacatataatttttacatttttaaactcaagaacttgaaagttattcatgatttatatttttaaggtttgacttaaacattgtcctaaacgactttctttatgactatggagtagtatatatctactcgatcagagtctgcatgcatgtacctactatataggagtatatgttagcggctagtctctctaaaaagatgacagagtgttagat

SEQ ID NO: 36063 - DNA, 701 bp, Oryza sativa
  unsure (1)..(701): unsure at all n locations
tgctcatcagaggagcactctgcatgcttctatcaaataggttcagctgatcttattatttgcaatttcaggtctttttcttccagcagttgtcagaccaatgttggattcttgggagacagcaaaacaagttcctccacctgcgctgaatgatgtatgtgattcctctctgttttttagtacatcagaatgatctgcaaccatatcttagtttctgaccacatcatttatcatgtccttattttgtcatgttcataatgtgccacccaagatatgtgcaagcactagacagtcttatgaaaattatgaagtaaacttattctttgggcgttgttattattntggggcaattgcaaatttaccactactttgaatcgttattgcaaaactgccactagaaaattgcaaaaatgccattagaactgtcattcgagtggcatccttgcaatattaaaaaaaccagtggtaaatttgcaattgccccttacttattatttcaagtaggctgtaaaattccaggattgagcactctgaatattcgactggcaacctagactgaattgcacaggacctttaaaagattgtgccatgttaccgattcctttgttgacgactttgccatgcttcacctggttatctccagattcacattattgaagtactggaatatcaaccccgctccattgagaacaccagtattt

SEQ ID NO: 36064 - DNA, 936 bp, Oryza sativa
gggagatgatgaagtcgatcgttgcggatcagtctcatggaaccaagaacgtcctctgcaatggtttgcacgaggtaaagttaaaaagtgtataccatgagttgacacttcttattgcatccattatccgtcattctacctgtggtggtggcccttttcatacaaaatgggttactgggattcccgcagactgagatcccgttgaagtgctgccatgccagtatacatggtatggttgttactagtgaaagaataattttcagttaaaacactgtaaaattatcctaacttaatttgttggatatccttgtctccttggtgttggtggtgtgaggcatctctacgagcatgttcaatcttgttggtcaaaaggggtcatttctggcaatgagtgaaaaatgatgagataataaacaaagttcacacttaaactaccaattttattacctgaaccagccatttatagaatcagatcattagatgtggtagttagtaactagccagtaagcattgaaataaaccaattattccattgaaatactgataaactaccatttatttggctcaacgacaactatttggaaaaataggatgtttggattctgttggggctattaacaatgtcgtttaagatgtgctaaagttagctaatattgaataaaggtaaggacgtagggttttgtgaatacttggtcttcggtgccaatgacattggcgcctatcccccttcacataagtggcttatcttccacggggaggctaggggtacggtgccaatgtcattggcgccctcatgttggaccataacaccaatgacgttagccccacaagaaaggtccattcccggaataaattctactggggtctatccgtcaagtaagttttcaaaaaggaccaaaaaggaattacaggcttataatcgttgataaccactca

SEQ ID NO: 36065 - DNA, 730 bp, Oryza sativa
tagcatttcttagagtagcgattagcaacatgcttttaatctacaatttgcacttaggcttccatcccaaatgtatgcactgttttattgaagcacctattgaagaatatcattaaaagatgggaaatcgatgataaatgttggttatagcgatttactttcttgagaaaattaggtatatacaaaatatcttccctctttagataccattgtaattgaaacagttaggttcactttaataacttcacaaatctcctccaagtaccttcccttgcctcctatcactcctcctaacgcataaaccaaccccttccccataaagagcaggctgacataatccccaagcaccttgacccaccctcccttcccacctgcttctctgctgagagcacacgccactgttgtccccaaggaagttctatcacaagcaaacaccttcctgttgatagagtgccagcactgcttggtcattttagcattctagggatatatgtggtattactaggaattagatgcaagcattacaacttcactaagcttgcacctcacttgtagagttcacacgatcaccgttacagcgcagtcatccagaaggacaccatgaggtgtgtatcgtggtagcacgtccagatttcgtctgataggtgctctctcaaatggtatcggcagtgttgtatttgtagatagtgtcatgcctcggcaaataggttccccattaaggccttgtttg

SEQ ID NO: 36066 - DNA, 1313 bp, Oryza sativa
tttctagctctcgttttctcagggacacttttctagctcttgaaaagcatcaaatgataaaaacatccacatgagaacattatcctgcttctggcaccttaaatgagtggctcaagcgaatctaagcactcagttgcttttgtcagataatctaggtgtaggtgacgtcttgcataatttctaatcggagtatttgagatgcatttgtctgattctagttttgatccactgaactcagttaaaaatgttattagtgagctgaagccttcgtttacaatatgagaagcagaagcatcaggtaaagaaaattcagtacgtacttgctactgtacggttttgcatttacagacataaaccaaacacacgctcaaaagtccaccttcaactaccaaacagtgcagtactgttctatgtgctaagaacacagaattatttggccggcatccatcttcatgctgtcaaaatgcatccatcttcatgctgtcaggactgagagtaactctgttactaggaacagaatcatttctgcattgaaaacactagctgataaagagccgcatagatatccagggttggcattgctaaatgctctcctcttttgcgaattatttggccggcaagtttgaacacgatctgtccttgtgcaaatggcaaattctgaacaaaaacgttcagctttctgactcctgaatcttcaaaggaagcagctcaccatcatcgcaggtgccgtgcttcagaagggtgctggaggatgattaatgccacgcgtaacaggaaagaaagaaagaagaaaaagacgaagaaatgccattcattattaatccaaattacagaaaaggccaaacaagtttcagagaattcagaaaacaaaaaagttgattcacaccagctgaggagcaacttgggtagcttcaggtttcagctctccttcgtcagaaagaaaaaatgagtttcagtttcaagcagcacaggcataacgcctgccaaattctgcactagcacatgaggttccaaaaaaaaaaaactatacaaaaagtggaggaaaaggatattgcagagcaatttttttcccagataacacaacatttagcacgtcgttgcatatgaaaaagaaaatctgatatcgtccgaatagattaattacaagaaataagattatcaagctctgcagatgatactccacggacacattcactgttcacatgaaaaatacttaatagttcatagttgcttgcacgtcatagttttctagtgctaatcacctacttgacatgaaacaatttacaagataagcaaagaaactatatgaaaaa

SEQ ID NO: 36067 - DNA, 2382 bp, Oryza sativa
ggaggggagggagggggaggctggcatgagagggggagggggagggtcgaaaggaggctcaaaggaaggaggagatcttaaattggtttttcaattaatttaattgattaaatgaactttgtgatgttaaaattagatgttgagctccaaaaattcacagaaaaatcaagagagtatattagggcatagagaatattataaaatatttctggccaatgatttttaaaggaaacttttaatttcctcaataattcacttgattaaattgctttaacttttatttaatttgtagaaaatgatttattaattgatttttaatcccgaacgaaaatcggagcgttacattagccaccgccgctgccaccacgggcgctgccgcggctgtctcaggccacatccgtagctgtctcagccgccgccgctgtcacccatcaccagccgcgtggtcggccaccattgtctccgcgacggcggcagggtgcagggagttaggaggtgcaatggaggtggaggaggcagaaagccatggatgaacggtgcggcgagctggtgaccctaacgtggagagcggcgcaagtggcagcactgatgatgtaagagcatttcgaagaaagggctaaacaggttcctaaaaattaatttttgggattttggttaaaactaggtctgttaatcacggttctaaattttatcccctcctataaaatcgataccaatctcatcagaatttgggaaatttgggaagcagaacgccgtcctaatcgcaggaatcacgccaattgttttactgtcggcgccaaaagttttttttccgtccgcttccttttcctcgtcgcgccgttttttttcgagaaattttttttccgcccgcttcctttcccttctcgcgcctttctcctctcgccgttttctttttcgcgagaaacaacagcgcccacgccgccacgccgccaggctagggttttggggctcctagcgccagctctgtcccgagcgcccgtccgtccagggctctgccggccgtccgtccagggctccgccggccgcctatccgggggaccgccggcctgccagccgtccgtccaggggcagcgccgccggccgcccgtccagggcaccaccacctcgccatcgaccgtccatccaggtcaccccgacgacgacgtgtgctgctactgctgattcactttgaggtattttcagagaaactcatttctacctgtgctcgtatggtttatacgcactgtacaagtgcttgtgcctgtcaccaatcgttgctgctcgctgccgttgcctggttgcttatgccgccggcgctgacagaggaacagctctgcgtgcgtctgcagcactgtgtccttcgcaaggttgtctggatcgggatattaggtagtaatgttttgctccaagtattatcgtatcgtaatattggaatactatgagattttctttttttaagtttaattaatattcatattaattacatatatattatgcaaatatagacatttatcatgagaaaccacgttggttttgatatatttaactgatttctatatatacttgagcatattcatttacattatttccaaaccatcttattttaaataatattttgtagtaacgtagggatcgtagaatcgggataccacttaagatttcgtaggatcgtgtagtaatgaatagtaggatcgagatactatgaaaattaggatactaggtgggatcggtatcgtttcggcttggtaggatcgtagtatcataagatactagaatacgaatcaggatactgacaaccggacttcgttcgatatcatatcgctgcgccttatatagcctcacgaattcggacgtcaaagggtttttaagttgtatttggacgtcaaatattaaaacacgtttcttattgtataaggacgtcattttgagaaaatgaaggaagcatatactttacacactgtaattatatacataccacgttttgatattgtatttttaggttaaatgaaatgaagaacatttaatcaatgttagctaatttgtgttcaatgaaattttctacgtaaattatgtttgttttcgtggctgcgcacgccgcgctctcccttctagtaaaaataagattatatcatattggatataatgtgctcacattgtggaaaacttaatactaatatttgagtttgtttatattattgctgtgacatataatttgggaaacacacattacaggtgcacgatagctggtggaagggaaaggccaaaagggagaagaaaacgagaaaataaaagtttcaggcgccgcttcaaaatcccgcctcaaacggtcaaaagcccctgatccccctttcccctaccgggcctctccgctgccgcctcatc

SEQ ID NO: 36068 - DNA, 773 bp, Oryza sativa
  unsure (1)..(773): unsure at all n locations
cagcaccatgcctggagagccttcacatccatattaccccttgggatgacgagcattgtgatgaaatcatttggaaaccatccactttgcagcatgaaaagctgaaagagctggttgtagttggcttcgagggaacagagagacaggtttactttgttaactttgtgatggaagtatcaacggcattgcagcttgttgctctgtttagatatgggcgtgttgaagaaatggggcgttgggactggaaaatcgtgaggctccaacaccattggagtgatgaggagagatcccagattctgaaccagtttgcccatagagattcttgctccacaacttcagttcaagtagttctagagtgatctcttatattaatgtgttacctgtatacaaggctttaagttatactgcatgcattttgatcttacggagtcactgtttgtcttatgtttatgcgcattcataccgcttattagcaactaaactggtaaaacttttttataccgttttagcctagttttccctaagtaactgttcactgtattgtttgttctcttttcctcattaaaatgagacaccttcttctatatatanaacgtcgataacagcctgaccattaaaaaaaagacatttttatatatgttattagcgattcaaaagcaaatgttgtaaaataaaatatgatgaagaaaacccaaaagcaacttaaaaaattagttctaaaatttaaattttgacttttaagtataagcgaaaatatattgctcttaatttat

SEQ ID NO: 36069 - DNA, 689 bp, Oryza sativa
cctcttttttcaggggccgcgtctttacttagtcgctagctggcgtatgtattctctccctttcccacccccagtgcttggttgtaaattgatttttttatagcttctaatacaaatgacatgcaaagtttttacgtgttcgaaaaaaaaaactactatgtacaaacctgagtggaatcactatgccttcctgttcaattctggttgttccgatggtttttaatcacataatgaccatttcccgtctatttatttttttggttgctttaactgtctattactgaattgcctggcagactgcacatcttcttataatccatgatactgcatttcttctgtgaatgcgcaaaaatcttacgcatcgatatattagcaaggaaaaaaaagattttacaactatgatctttggggggttacagggaaaagggagggcacagtggactaactcggaaagataaccggactcctgaaaataacaagagaaatggagaaaagagtttgtgtcacatggtactgcatttcttacatgtgatgtgagaactcacgagaactgtattgttatttattctatttttttgttaccgcttgagtgtcaaataattatttggttctgataaacaatgttggaaaaaaaatgtacattgcgaagttgtggttactggcatttcatacagtgattgagaagtgtc

SEQ ID NO: 36070 - DNA, 834 bp, Oryza sativa
atatatatccagattcgtagtgttaggatgtgtcacatccgatattagattgattttttttaaaatggagagagcatagcctaccatggctgatggtaaaacatataacgaaactacccgaacttgactcgacagtgtgactgcaaggaccggacatatatgttcccgcccttcaggagcttgaagattattacgttgggttccacctctagatttccgtgtccaactttgactgtccgtcttatatgaaatttttttataatttgtattttcattgttgttagatgataaaacatgattaatattttatacgtgacttgtctttttaatttttttttataatttttttaaataagacggacggtcaaacgttggacacggaaaccatggtttgtctttttttgggacggagggagtaccctccaagcctccaagggctaagagtgtggtggcgactctggtcaatcctgttattttctaattaagattcggattttacatcgttttttatttgcatagttttttttaactactaaacggtgttacgtacgaaaactttctatatagaaattgttttaacatattaaatatgttaatttgttaagtttgtactccctccgtccaataatatagcaacctagtattggatgagacacttcatggcataatgaatctggaccgcaggagtgtctcgtacgttatattatgggacggagaaagtaataattaaagacttaattatatgttaaaattgttttcgttttcgagctcaaactccctccctgcgcgccggccacgagctcggcctccctgatgcgtcgccgcattcacacc

SEQ ID NO: 36071 - DNA, 816 bp, Oryza sativa
aacaaagagcagccgaacatacccatagttagtacatgcagtttattaataaaatttagaatgaaatttaaattctagaagttgttatttttaagacatgaaatactctataaagaataaaaacatcttaaggaagaatgtctatatatggagataaagtaaagtagcaatttaaactaaaattatataagtactaggtaggtagggttgtgaaagaaaccatatatcttgaccgattatcgcccctacacatgtgactcgaattttctgataagaatcaagctactcgtatactccttgaaggaagcataaaacattttgtatgcccacactagcagcctactacactagtgattaaaaaacaacgagcttgttctaagcaaatttcccattggttcattctatcaaaatcccttacaaacaatgcttttaactgtgattctttaaactcagttagaagttactggaaaaccaagatgaaatcacagtgctctaattatttgtatcttacagatagatgacagagcttgggcttctcgctcttggagagggggaggagttgggggtagcccacaatatcaggcccatctactgtgagatgggctggatatcgcactattaggcccatcaatgaaatcttgccaggtttcacccatgggccttccacattttctattatttatttttttaggcctaatccttcttccctaccgcctcgccgtcgccgctcgccaccggcgccggagccggccgctggatccgccaaaccaccggcgccagagcctcggcggcctcgcttcctatctttcctcctcc

SEQ ID NO: 36072 - DNA, 1263 bp, Oryza sativa
ttaacagcctttttttgcaatgcatgcatgcaacgcaagcaagcaaagaaaacacaaagtaaaattggaatcatgatagttctgatgattgattactatagctaccacccctacacatctctgaattggaatcacgccacatatgatgtgagaaaattggacaggaattgatcagacacaattgggacatgtacatatccatgctttgtgtcccttttgacatgatcatctcttcctgggtgttgttgctgtcgaccatgcatctgggcttgaaatgtgccaatgtgccattggaattggaatcgaaatctttgatcttttgccggctgcagggcactgtagcatcttgcatttgcacgcctttagctcgcttttttttgtgtgtgtgggttagctaattgagcttagctaggggaataacaagatgagaaacggaatgcatatgttggtgttggtgtatcggtaccaccacgctttgggctgcccaatgccaaaagacattccctttgggcctgacccccatgtgtggcagtgtacccctgtcccctctctccattctggagtactacacctcgtttgctgccaaagcttgctaccttgagaacaccaccactgtgcactgaccaaagctgctgctgcagcagcattcttcaattctattcctgtgtgctaatggcagtatgcccctccatctctttgtctctgaagaagtctgaaccttttctttcttttaaaccaaccgcaccaaacgagacaaatacgaggttttatatattgctatagtagaaaaaatataaaattataatcctaataggctaaatcataaaagaaaaaaaaacacaacaccacgaactgatgtcttctatacgtcagcttgagaaaagaatcgacaccaaaccaaccatcgctatgtgtgaccgatcaccaacatctctacaaccgtgtataggtgcactttgaagtctgaactttgaaatgtatgaggagtattattgttcatgcttctctctatctatctctgaagaagaagaagtctgaactttcacctgcagtttttgtggtgacatgaggtgagagttcgatgcaagtttccatggtttgatcactcgcatgcatcatgcactgccggcaccgcgtttttctgtgcgtaacaaactcgtggcgtcatggcgaaattaaaggccggcgaagaaattgaagggggctgttttgactggaacgatcgaatcagaattcagagagctgaattttgggcgtggctag

SEQ ID NO: 36073 - DNA, 713 bp, Oryza sativa
  unsure (1)..(713): unsure at all n locations
ccgtgggctgagcccnccctnnnnnnnnnnnnnnnnnnnnnnnnnnnnnnnnnnnnnnnnnatcgagatcatctaccgtgtccttggcgtagacgcttgaaccctccacgacgccctcaaaataatagcttgggttcttcatcttcaatcggctgtatatcagaatcggacacttttagaaaatctccaacccaaatcttcctggataaacaatcaaggccatccatctcccaaagagctagatcggcactagcaacattaactgacctgtcggctgtatatcagaatcggacacttttagaaaatctccaacccaaatcttcctggataaacaatcaaggccatccatctcccaaagagctagatcggcactagcaacattaactgacctgtcggctggtacaatctcaaccttgtcgccttgccattgaatcaagcattggtgcatggtcgaaggaatacaacaattggcatgaatccaatcccttccaagcaacaagctgtaagaacctttcccatcgatgacaaaaatgtggtagggatagttttacttcttcctccttcctctctttttcgactcgctcacccctcaacgagcttgaggccgncatggctcactcttttgactcctccctcaccgagcttgagtcgggcatagagatctcgccatgctcgagagaaagagggaggtggcnngtgccatgacnagttga

SEQ ID NO: 36074 - DNA, 601 bp, Oryza sativa
  unsure (1)..(601): unsure at all n locations
gttttattccaagtgacagctctactcatcatctgaacacacatagcctctgctgcgccgtagtggcatggaaaaaacacatcacaatagtacatgcatgatatttatgtgattttctttcaagaaggatgaatacatattatatatatacactagttttatttagctggttttggctggtaccctagaggtggaagaatacaaattatccatgatagaagaaaataattgggatattgaagggaagcaaaatagatttcttgttcacctgatttgcacttgtttgaagagatgaagagacaataactaactagtacacctcgcagacaaggttatcataagattaactctactaatgagtcctgactggctcaaaagtcgactctacggcacctgatttcagtacctacttaatcaaacatttcggagggatattgattatcttgctcatgcccgttatgttagagcattgaggttccaaatcaaggaacatatctttatgtaatggtagatgtgtaatagggtcgataagcttataagctgagatctcccnngctgtgnngggtgagtgaaatcattcaggttcaccnncgcgcgggcc

SEQ ID NO: 36075 - DNA, 641 bp, Oryza sativa
  unsure (1)..(641): unsure at all n locations
ccccccccgcgcggtcnnnnntttganatgatatcgactcgacgccnnnnnnnnnnnnnnnnnnnnnnnnnnnnnnnnnnattctcgctcgacaaccaaaaccatgcttaccacctgcgatgttgctgacacatataatagcaatggttcttgcggatgtgatgaagctaggaccccaccaccaagaaaaaatatcacttttatttttatcttgccgtaatttaggtttgttttgatatgctgcttgattggaatcaaattttcacctcttgctgctgctgctgctgcggaggggaagtaggaggactatttggtggctagattatgggaggaggggagggggtggtccaaccacttgatttgatgagccgactgatgtgtaccacatattccttcatgaacttccccgagtgcaacttttggctgagcggcgctcgaacatttaagaatcactatatcaatcatccgataatagaggacatcatccaataaagtgtatttcaaggccttataacgcaatttctgcgaagccgattgagatggattctgtaaatactgaaacacattatatcttcattcatcggctggaattgtagcaatctctatttcgatattttttggcattggcttatatcccgacg

SEQ ID NO: 36076 - DNA, 664 bp, Oryza sativa
  unsure (1)..(664): unsure at all n locations
tgatggcccnattgttgacactccgttagcatgcacgcgacgcgaggctatgctgacggagccaagcttatcgattacccaccccgctgggtctttcaccccttagctagaaaaagaatgactaactggtgcgcatgacacaaagtgttggttatgaaatatggatgaccataaaatcatgataaagtaagatccataagattggatttgaaaggcttgaacaagcgactggatccatactagaaaagctttagagaggagctaatgaaaatgttaaattacgatcaagtccctttgaaagacataaccaaaggtgcaattcattggttggagccaggaaatgggtacgctatatcctcgaagtttttatatcaccgaaaccacatccaatttgatatggtacttgacttttaaattaatttaaggtgttctccatcagagtacgatattaagcattggctttacaacagcttaagagtaaaagtgcagaaatcttatctattattctaagcattcggccatgtgtctgaaagagcttaaacaaattaacaagcgtagtccatccaccctagtatgttctagatgaattttttttgttgacttggttgagtcccatattaaactattttttagatgaatatgttttttgactaggttgactagg

SEQ ID NO: 36077 - DNA, 817 bp, Oryza sativa
  unsure (1)..(817): unsure at all n locations
agtgccattgttggatattcggcctgccacnnnnnnnnnnnnnnnnnnnnnnnnnnnnnnnnnnnntatcaacaagccctctgccgttatcacgagaagcgcatccgagcactcatactttcgatcggcgactatgtcctccgacgaggtcttcccccaaaagttcactttcgcggtgtcctgagctaaatacacacagttacaatgtcctgtagcaaaatttgcctaaaatatatggcaagttcagtgaggtcaaaaacctcacttcaagttagagccgattttttttagagtgaaatacatggccagtctttaaacttgaggggtggtatcnntttngntctttaactttaaaatttccttatttttattcttaaactttgttcttatgatgcaatctaatgttcttaggaacaatgctcctggtcgagttgctgcaagaatgtacgcccaaccacaacttgagcgctcaggcccatacttatataccctccctcataacttgatatgtcgactgcacatctcaaacccaaatcctgcaaataatcgtaaaatctgtccgattttcaggacttacaaccgcgtcagaagccttggaaatttatcgtgggttgccaaagtacattaacacaaaaaaaataattgttttaactctttggtcccaatgggacttaaaaagaaaacttttttttggggacatttctcaagcccttttacctctcgatggccacggacttcttgttttatcttgtgttaaacgcgtgtctggattgtccataacatataccctgtggaaaacttagatatctcccgtgct

SEQ ID NO: 36078 - DNA, 737 bp, Oryza sativa
  unsure (1)..(737): unsure at all n locations
cgcgttataaattctaagcatgctttcacgcctcggaggttttcggaatccaggttattgattttcaaccccgttggacccatgcctggaggattggatattaacgaaaaaattacttaataccccatttgggggtaaattgccaaacgaaattttaagcctaatcgctcctgatctggcaatgtggggctacaggtaacaattgctaatgacagaataaataagcttaataaatttgtctcacaagttacaggcggattatgtaaatttgttttggntattaagtctaacgtttaaataccttcaaaatggtgtgggtcagcaatattcccgatggtggaacacgcccaaaacctttaccacccctgggatctaaacgcagccatagtgacaatatactgatgtaattttctggtttcaaaaaagaaatactgatgtaatttctatttggactatgtattagtcaatattatatattccaaattgtacttttgggctaaccatatactcccttcattcanaatgcaggatgtcattgactttttacacgatgtttgaccattcgtcttattttaaaaaatatataaatttaatttattttgttaccactttgtttatcatcaaataaaatataatattaacctatagttntacatattcatactgaatttttaatgagacanatgatcaaactttgtgcgaaaagtcaacggcgtcatatattctaaatggaggtg

SEQ ID NO: 36079 - DNA, 540 bp, Oryza sativa
  unsure (1)..(540): unsure at all n locations
tgtcaattaggcctagaggggggtgaatacgctaattcaanaatcaattaaaagcggaagcagtaattttcggatatttccaaaattttcggatatatccgaaaattttcggagtcagcacaaatagcagagtaaatcctagatctagctgcctacaacaagaatatgctagcacaaacagcaactagacctatagcggctcgaacaagcaaagctagtggagagggagaaagtaaagtcaccaaagatgaagctcacgaggttgttcccgaagttcgaatccttaaggggattctactctccgttgaggagctcactaagagccgggtcttagctaatcctttcctcaagaggttgcactaagcactcctccttccactaagggtatctcttccctttcggaggtgagatccgaccttcacaaacttctcctggccaaccacaagtagatcagtggctcgggagcgacacctagccgcctaggagtcctcaacctccaagagtaacaaatgaagcaaagaactcccggagatgatgcaa

SEQ ID NO: 36080 - DNA, 2592 bp, Oryza sativa
ccactcattaaatttctattagaaacacatccgcgtgtatgtattatttatggacaccagaattaggaccttagtgggtgaaatattgtagacatgattacataaccacacattcggtgctttcccaattatcaaatgatgtattgggataaatctacttgtatacagtgactatagtcccattcacacagtttactagtactacctctacttctgttcacaaatataatcattcaaactgcttaaaatttgtctaaacaaatataagcatttcaaaagtactacttatcccatcaatcatctctcatttaacttattttccatctttatatccaaccatatccatcatttaataagtagcatttgttctctcatcttaatatctgccaaatacctataattaaattattatatttgtggacgaggggagtacatgctacttgaatgattatatttgtggatagagggatttacatgtgttcgacgatacaacaatgcatagatgagggtgatatagagcaaatgagaagatagagtggccgtacgtagcattcgtacacaagtgacctttgcagtcacctgttgtaattatttcatatagtgatagagtgcaaatcctctttccaaatattactacaaaacaacaattgaagtgttagataattggaaagaagatcagcactgaacttagaagcctgcatatgtgttttttttttaaaaagtcagccttctgttgctcctagtcctgctaaacagcaaaagtctcctaggattaaaaagcaaagcactcatctgttgcaatgagtttaatggtttcttaattgggtgagtcttttcgtttgtggctttgggtgaatgactttgacttcagtaacttatttttatttttcatgctcaatcatgcatccaactttggcagtttataacaaatgcactgcttgagttaactcacacacataagttttccactgatcactaccagaaattaattggcagtagttttgacaaaaaaaaacacaagtaagagaaggtacaatagcatactataaaccagctataaacacatttcgagaaaataagagaggagagagaagagcagcgggctacagatttatagccagctgcagcacggactccaagataaatgtgtatatgataggtaggaccaggtagtaattgtgtagtatactccctccatactcgtaaaggaaatcgtttaggacatcgacacggtctccaaaacgcaactttgacttcttaattctataaaaatatttattaaaaagtgatatatgtatacttgtatgaaagtatttttcaagaccaatctattcatataatttttatattttcaaactcaataacttaagagttattcatgatttatattcccaaggtttgacttaaacattgtcctaaacgacttcctttacgagtacggaggagtatgtgtataggtaactattgtataaattgattattaaattgactatagataatttagagccagtagttggctatactattaaacttgctctaatactactccctccttccctaaatgtttgacgcagttgactttttaaacatgtttgaccgcgcgtcttatttaaaaacttttgtgaaatgtgtaaaactatatgtatacataaaaatatatttaacaataaattaaatgataggaaaagaattaataattaattaaattttttgaataagacgaatggtcaaaacattttttaaaaaagtcaacggcgtcaaacattttgggatggagggagtactatttttcctctatatgactaatgcccttgagaattaatcaaattaaccttgatctcacagatttttcatgactggaaaggttattttttcaaaataagaacataagtaaatattaggaataaagtcagtgtatctttaaataaaatatatagccaatggtgatatcggtgaacaaataatagagcatatatatatagagctcaaatataatgttctccacaaatagtgtgaaaaaggctgctagctagcgtgatatatatttattaattctccaacatacaagtatagttttaacctaccaaattaaaatgtcaaataattaatataccttttaacatgtgtacattaattgcaggcattaatatatatgtcatgcaaaccagtgttaattaatttgtgattcatgcattgatgctagttctagaatttaaacctatacatgtatagggggttacattttatagaagcactcagaaagcaatcagattatcacatgaaggaatcacctttcaggggctgtaatgttcgacattagcacttctagttgcctttggttttatcctaagcctttaatatgcctatattatcttatcatcactgcatgcatgcatctactctcctttacaaaggtctatcctttgctaaacctttcatcaaaaaatacagcgaaaaaaaaagatctccatactcctgattcttgtcttagctagccgacattgcatatataattttgccttaactcctctcttatactgattgacgactggccagcaacatgtttttacagctttgagtttgttataccac

SEQ ID NO: 36081 - DNA, 3061 bp, Oryza sativa
agtcaacggtgtcaaacattttaaaatagagggagtatatttcactactttgaaggatttatttatacagggcctcagagcgaagatttgttaagacaaaaggaagttatggccacctccagctttaccagaattacaataaagttttttaaattttaccactttaggataaatcagtaaaatatcctctgatttaaaaaaaaatcacattgacctcctccaagctatacagctagctcctccactgcttacaatcatgaaatgtttacaataatgagatatatttatactaccaaacgaaatagttaaaaaaaagtccaaattaccccctccctccccccctccccctcttccgccctaaaaaattaccggacatttcataccttaaaactctttaaatcgtacgaattaaacccctagaactattttgagtagttttggtccaagctggcacacatagcatcacacaatagtaaaccaatcagaaaaaacacacacataagggccacttgtcatctatctcttccctcattccctctcctctctctccctgcccgcccgttccccctctcttttgatggggttaagtggcagtcgagctcgcacgaaggcaatgacgagcacattgctatctactgccaacgagcaccatgcgccccctcttcaagctcccgcctgcgacaaaggcttgggcaggctaatcaacgagcacctcggccctcgcggttaattagctccatgttcttcgtctccgcgcctctagctagagcggtcgtcagtgctgttggagggataagacgtcttgtgtttggatgaggtgggtaattcggacgatctcaataattcaggggtgatttagatttttttttctctatagctattgcttgagagataagtgtttcaagagatagataccatgggtacaaaatgatcaagtggagagttgtataaggagatcagcgtatgttcgtgctctctagcttagcttgtcgtgtcattgccatcatccatataacactggttgatgacgttcgagcgagagctaatcgttagttagttagcaataaaattatgtgcgcatgcatgtgtagtgcgtgtgcacgcgtggctgcagtctcgatcattaatccgttagaaagccaatccatgttgacatgcaatgtgtctcaaaaatgacccatacaagcatggtaagtactacaacttttgataggataatgtaatagtatcatgcatgcttatgtaagagcagatacaatagcagactattagccagctataaacatattttagtgagatacaagataagagagaagagcagcaagctacagatctgtagccggctgcagcacggactctaagacacaatgtatatatgacaggtggaaccatatattaatagtatagtaagcaactattgtataaattggctattagatcggctatagatgaattggagcttgtagtgggctatactattaaacttgctctaaggaccagtaccgtttgccattttgtaccaagacaagaattggacagtgtgcatatatctagttatgcagaggcccaaaataattatctttcaacatggttttgtataatcttcatgtaattatcttggtttcaaagaaactaactttatcaaagaaagaaagacacgaattagattggagcttgttcggtttggatgaaaagcaaaacattttgatttctaagaaatattttcctgtaagggtcatttcgttttaaggaatcgagtataggaaaaagaaacaaatctttgttcctatgagctgtaaaaagaaaacatagggaatttttcaactcaaatctgttgaaaaattctgcgtgcacctattccttagcttttccatttcgtacaggttcaaattcctcaagaccttcctcgtggtactgtgccaatgagcccaatgagctttcacaaacagttcaaatatacgcatatgtaggtaacttcaacacttaccaaaattaaaaatgggttcatatatacactgaatttatcaggattccttattaattagtatattactccatccggtcaaaacatgccatttaaaatatcaattgtcccctaattaaaatgtaggtttgaccactaatttctattgcagtatatttgattttaaaatctgaatttctacattaggaaagtatgtatttcaagacaaatctccatatgatttacatataatcaagttagcgaaagcggagaaaataacgagatgagtcggtgtcccttaaacacctttttaatatcattttctttatggtggcttcatcttaaattgaagaaggcctttatcacacttatgttttaaaacccagaaaatgttgttatcacgccaagtgaaatagttgttttttttcttgtctacctcctttcaacctactgaagttgcgctcactgctatcctaagccctaatgttgcttctcttaccatatattctaaatcaactgccctccattcaaaacatttgataagttttttatgtttaaagtattcatgctgttaagagggactagcccttaacattcaaatatatacagcatgaattgtttctaatatattcttcaattatttctgtatagaaacaaagttgattaaaattatacctacagaaactatggtacagatttataggatcttatatgcatgagaggtcaattgttggctgaggcacaagtatgcagttgtcctgaaaatgatgcttgttctctcatttgcaatagcaaagatagatcccctcccatacatttaagaacatatagatatcaaaattataatttgggaggtggaaaaagatttgtacatattaatttggctgtgcctcccttatcaaggatggtaaaaagatttttagaaaataagatatgctctaattaggagattgaatatttgaagctatctgatgcctcaagctagacagctgtgggtttttcaaatgcttatatgccaattttgaagttatccctttcacacagctaaaccctgggatattgttctaaaaggcaagttggaagaactgaagaagaccg

SEQ ID NO: 36082 - DNA, 3614 bp, Oryza sativa
gaccatccattatttcttccaaatctttctgttctttccaggggatggtcctaattcatttgcgcaccagctagaaatgaatcaccaatattatatagaaaattagttcaaatatagtggctacttttgttgtgctcaactgcttttgcaatataataccatataagtttagcagttaggtacttaagggcaaaagatctatttacaacttatttgcttttagcagataactcacaaaatttgtcaattggcaagcatatatagctagacttcctttctatatataagttacaaccacttgggctgttttctccaggattacaacagttacacacactttaagattgaatggagcatcagctgaaaataactgcaaatggtaaggtctcttgtgtcatatattaacagttcttacaaagagtctgtttaaatttatttatcgttttagctttgtagcaatcacttgttctccataattcaactaactatatattaaaattgtggtccatatatagctacaaatcatttagacgatggcagcatcttagtaatttatagagtaaatttcacaaaactataggtatttgcacaatccatcataaaactacagatttaagaacatgcctccagagccgtctctagaaatctggggtccagaatgaaatgtaaatggggcccttaaattgtgaaaatttcatgtataaataagcacatattttgtgtcaactatataattttaatgtgtttttacaatatttaaaatacatcacataaatattaatactaaaagagagtaaaggtagtactgacctcatattctattaaaaagcatcacccgtctagtgttttttgaaatgaaatcattaattatatcatcataattaagataattatccaaggcatcattttcaacacccaaatcatacttattatttctagaagacatgccgatgagaggaaataaatgtcttcctgttttataaacaaaagaaaagacaatcacattactttggtccaataatcaatctaatcggccattcaaaacactgtgatttaatttgaatgtaaatgcatacggatatatatctatcccagtcaatgaatagttgcaacgaggagaatatataaacgtagttgaatggattgataggcccgtagatgcagctagctatgcaactagagaaagcacacgacttcagaaaagaaaagaaaatgctatgagtagaaatggccttgtgaatgatgattcgagcctttgaggagattggattgaggattcaaggatgaggaaatgaggatggcgactcgacgaggagggagagccacagaggccgcacagccagcccccagaaggtagccgctagggctcgagctgctcagtgctcgcctcgccgccactcatcgctgcggccgtggggcatgcttggcggacagtggatcgatggtgttgcctgcgatacccacacgttgctcgatcatttgtctgctgagtgcctacgtctcaccgcatcagcagtcgcgacttgcaacctcacatcgttgtctcaattgtcgacctcgcaggcgcatcagcatcagttggaaattggactcacgagtcacgacggctcaacacacgctagcggcaagggaaatgacacctttgaccttctgtccctttgctcctctctcactttgtaggaggccaggcatgcatgtggccaacaccgaggtcgaggccacaaaaaatcgagggccctgtgcagccgccacgtttactcatggccatcgacaaccctgcttgtctcacaaaactacatatttagtatctatgttattccaaaactagctttacctgtttgatgcaccaacagctgatgtgtgggacctacctgcagacataggaggcttgaagatgcgcagttgttgattgccacactagaacttctttgaatgaaaaagctggttttagaggtagaaatatgaaggaatacatgcatacatagtacgattggaaggtttccatggaggaactgaagaaaaaagaattaacaagaagggttccatgcataatttgggatttttgatgtggcaatcaacaatgatgcatgttgaaacttcttggactgcagtggtcacacatgtcaggtgaccgtgaatctaacgggtaaagttaaaacttgcagtagttttgtgataatgaatatactaaatctatagttttgtaactctatagttttgtaactgtagttctatgatatattatgtagagtgcatgtggttttgtaaaattaatttactctaatttatatatgcattaaaatttactctaattatattaacatatgcatggctggagcatggagaaagggtcaaaggaaatttccttgtatacaataaattattattgttagttactgatgataacactatcacttgtcccttcttttaattttggctttgtttatcataaaaatgcacatctaagctgaggctggtaatcattaggctactctttttcagatatgattatagaggttttatatatgacatctctataggctaattaatagggttgtagctaacctagctagccttaaagccattaaggtagttagttacaagcgtgcacttgctaaaacccaaaaatatttccaagttggtaatttgttaatcattctttaacatgagttgcatgcatcattgtgtttgtacttgctacacgagaaaaagctggtcttgaaagcgatcgggaagctacaggccggccgcaagcatgtactaattaaatccctactccattagaagatcattttctaaagcaaagctccaacacttcttgtctctagaggctccatccatcgatccaagtagtttcatcttcctgttgtaaggtttcatatagcacttttaaataatacggaagatgcacaaacatatcgctatgcgcacgcacacatccacgagtgcatcctatatatatcttagcatgcacttaaaatatttaatataaaccaatgacaaacccatagttaatattaatttttttttggaaacacggaccacatatataatatttataaacagtaagatttaaatcttatatttacatttacgattacacgagtataccactgattcctcctctcgtgtgtaagcttactactatactacactaggacactaggagatactacctccgtcccagaaagatcacagttttgcaccatttttgtccaacgtttgaccctccgttttatttgaaatttttttattattagtatttttcttgttattagatgataaaacataaatagtactttatatgcgactaacttttaaaaatttgtttataaatttttcaaataaaacggacggtcaaacgttggacgcggaaacgtacaactgcacttaaaatgggatggaggtagtactacataatcctgaactgttaaaaattagttaccaacactacgtacgtgatatgaagttatcttgagccaaatctcaattgcttttataggggctgttatataaagatctaagtgatgtcaaattaatggttctcatcaaaccattagagattagttggttattatgtaagtagtacgtagtgtgctaattaacaacaggat

SEQ ID NO: 36083 - DNA, 696 bp, Oryza sativa
  unsure (1)..(696): unsure at all n locations
agtatgaaactagacatacngctnnnnnnnnnnnnnnnnnnnnnnnnnnnnnnnnnnnnnnnnnnattctcgctcgacaaccaaaaccatgcttaccacctgcgatgttgctgacacatataatagcaatggttcttgcggatgtgatgaagctaggaccccaccaccaagaaaaaatatcacttttatttttatcttgccgtaatttaggtttgttttgatatgctgcttgattggaatcaaattttcacctcttgctgctgctgctgctgtggaggggaagtaggaggactatttggtggctagattatgggaggaggggagggggtggtcttaatcaatgaacagtgagcagggctaccattaaaatttagctcctttaattaatccgtaggcacctgctgatggcgacctgctgatcgattactgatctttactgatgctcagtgtgctatgttctttaccggctccacatgattggagtgtgcctgtgtctggagaaaaaaaaggaggaacagagtatatatggttcgtgccagcatttatgcaataatgtggggacagttaggaggaggattgacccgattttgctttcgcaatatgaggccgcccttattgataagggaatctttccttatgaagataagtgcccttaatgttgagggcgcatgaattaaaggctcaataagaaacaaa

SEQ ID NO: 36084 - DNA, 693 bp, Oryza sativa
  unsure (1)..(693): unsure at all n locations
agccgttcgcgatgctacggatgatccgnctnnnnnnnnnnnnnnnnnnnnnnnnnnnnnnnnnnnnnnnnnnctttactttgccagccgaattcgggattgaccaagccgatgttgacgaacttactattcaccttcacaggataatcacggttaaagcatccggccaaatgatgaacaagcgcggagatggttgaattttgggtagcatcgtcaattatagtgtactattattaccaaggaacataattgaaatcatcattcagacagcttattaccattgtaggccagtatggttttttaatatcccagtccaattagaatttagcctgtgtggcttataagagttgtgtgctcatgtttagtaccaccttgagttatgtgctcatgtttagtaccaccttgagttatgtgctcatgtttagtaccaccttactagtttaacaaggttggaaccaacttataagacatcttccttccaatcatatcacttctaggttaacccttttacacgaagcgaggacgaaagtataagtaggttcgtaggcccgtccattggttgcgctcagagcctgtaagtggagtggtatccgtccattggttgggctcagagccgaccctcgcagtatgtttagtgggctcagagccgacccttgcagtatgtttagtacacatttctcaaatccaactttt

SEQ ID NO: 36085 - DNA, 801 bp, Oryza sativa
  unsure (1)..(801): unsure at all n locations
cagcgggtcaacggcaagcacggtccttttcttagccacttctcataggttgattccccatttggccccaaatccaggtcagtgtcagatccaggtcaatgtcaactttttttttaattattcaggtttgttgcatcatgagtctatctgattgagtttaataacacctgcagatttttcttgttcatccgaacggatatttggaacataggttttaaacgcatgtgcttctagagtcatcatctgtagatgcgggtaaagcgaagaaccggacagagcatctaatcacatatgggtcacagggtacaggggaatgagttgtttggggttcacatttaaattgttgatgacctgtattctcatgattcactttcaagttcagttgagcagtctctgtcttgcttgttttttagtgctcgctgtgattattttcttcatactcagcattcttttttttcttcttttgagaactctcaggttaatttggtttccttccattgttaacgtaaatgccatttgcatcctatcttagtaggatttgagaaccattcctcgaaaaaaataggaattacatatttgagttccttctgttgttaaatggcatccctcttcggtctngttngggtttgtgggggtcgggnttcttggggtctggggngcggcgctgcggggcgtgcggagtcagcngtgcctgcgtgnngaagaaacgtcannaagaaggaggcggaggagngattgaggagcgaacggggcgaggtannnagaatgaagctagcgnacccggagggaaggcctggccgt

SEQ ID NO: 36086 - DNA, 960 bp, Oryza sativa
gtataagtaacttcataatttatgatgtggattaggtttagagaattagggatgttagttagatttagagattgatttggggatttgcctacttgattcgggagaaaataaaaaggaaaaaagaaaaagaaaaagggaccatctgtatattgactctttagtccaaccgggactagagatcccctcatctttagtcgactagagatgtcccggattcttactcccgattggaaaaccgggattaaagggttcccaaccaggagtaaaaaagatggtttctccaccagtgaataccattttcattatttgttacatttgcaaaacatttttcatctaaatatttatttaaccgaccttttgcccttgtgaatatcttgattggagaaagagatattatccatttcctacacagattttctttctaaacagataactaatgtttgcaatacaaggtggaacaagattggcttcgagtgctaataatgaggaattatttctgattatattgccatggaccaaacaaaacgaaaaccatatgtggaacacacttttggtttcctctaatatcataaatcgtaggaatgcttagagaaagaatggcaaacaattcagccaatagagtaactagccactacgtaaccatttatatccatttatatcggggaattacttgtgcatatagctccttagtttatgccatgctctcatgcatagggtaacgtgctttcacacaatatttactattcatatattttgtatgacaggagaatatattggtgcaattttgagagaagtattctcggaccacttcacttttatttatcaagaaaatggtacggcctgctttaacttgttaaatactagatatattggacgaaccaatggctgccatatcttcgctaaaaaatttgaaacatatactattttgaaattttacaatacacagtcccttttgttgtg

SEQ ID NO: 36087 - DNA, 507 bp, Oryza sativa
tcgtcgtccccatggatcaactgccgacaagccctatggcccctcccttctctcgagacacacagtgtcgaccgatacattgacaccctcgcgccaaagagaccggatccacaccatctggtctttctcagcgccacgatcactggtagaaaaagcattttttttacgtggaggtcttattttcgctggcggacatgacgcttagagccaaataaccacctacaaaaatataaatcggcgcctgcgaaaattagtgtggtatatatatgtggcacatgcagctgaaatttttctaagtcttcttctcttccctcactctccccgccggcggaaggggcaaacggtgtggggcggccagcgggctccccctcccttcccttcagatctggccggagggggcaggggggaggccggcagccggcatcgaaacgcggaccggcagccaagcgcgggacggtgaccgcgtgtgctcccggcggcggcggcgggcggtggcggctgaaggcg

SEQ ID NO: 36088 - DNA, 650 bp, Oryza sativa
tttttttttaatttgtgatgattcactgagatgtatttgactgagaagttacaaatttgtgattcattgtttggatctgtgatttatttgtgtaatttcttaggatattgtgatgtatttgatttgtgtgtataagtaactttataatttatgatgtggatttggtattgtgaatttgggatgttagttagatttagagattgatttggggatttgcctacttgattcgggagaaaataaaaaggaaaaaagaaaaagaaaaagggaccatctgtatattgtctctttagtccaaccgggactagagatcccctcatctttagtcgactagagatgtcccggattcttactcccgattggaaaaccgggattaaagggttcccaaccaggagtaaaaaagatggtttctccaccagtgaataccattttcattatttgttacatttgcaaaacatttttcatctaaatatttatttaaccgaccttttgcccttgtgaatatcttgattggagaaagagatattatccatttcctacacagattttctttctaaacagataactaatgtttgcaatacaaggtggaacaagattggcttcgagtgctaataatgaggaattatttctgattatattgccatggaccaaac

SEQ ID NO: 36089 - DNA, 623 bp, Oryza sativa
tcctgcagcccagacagagtcaagagcgacgggggcttttgcttggcctcgagggcagttgagccgagacggaatgcggagcagagggaagtactgaaaatctgacgttctgatcctctcacaaaatttattttataattaaaccgtgtttaaaactatagtcaaaactgaacctcgagcttagcaccgagttatatgcttgaatataaaaaaaacaagcatatcagagaatagtgaacggtaggaacattaaaaaaaccaaaacttttagcagaaataaaagtttgcgcgcaggcggctgggctggcacggtgacggcgcaaggcaccggcgcgtgcacgtcggcctgggcagggcgcctggcggccggcggctggggtggggagggttggccggttgggatgggaaggggaggtgaggagaagaaatagggttagaaatgtgggcttttatttgctattgggtcaatggacctaaaatggtgggtggtgggagggttcagtttgggcttcttttaagttttgaatgggtataggtatttttcttttttcctatatatacatatatggaatatatacttcatatatgtattttttgttcaaaaatcttgggtattcatttga

SEQ ID NO: 36090 - DNA, 674 bp, Oryza sativa
agagagaagggggtagtaattgatcattaattaatatttcatggcttgtcaacccttggaaggtaaccacttaaccttaatcatccagaaaatggagaaaatggagagaggttattaggatagcatcttgtgttggacactgtttgcaactgttttgagtccatttctgctaatgccatttatgatcagacatgtgcaagacaagagtgtgcaactagtgttaatagctcaagaacccaaggagcagaagcaagctgaagagtgaagaggaggacagccaagaaagcagcagaggcaagcaagcaagcaggtggtgtgcctgccatggcggccgccgcgctgctagctagctgatggttagttgccgccgccgccgctgcagaggtcgaggagcttcttcctcccctcggcgacctcgtcgaataggtcgtcgatcagggcgatgacgtcctcgcacccggacctcagcgcgtcggcgcgcagggcgacctccgccgccgccgccgcgacgtcgccggccctgtccacggcgtccctggcctgctccaccgccgccctggcgcgccggaactcgtgcatcatcgcgcctccccctgcgtcgacgacggagggcgacaccgccgccgccgccgccgcggcgcgctgctgcgcgcgggcgagcgccgacgcgaacg

SEQ ID NO: 36091 - DNA, 626 bp, Oryza sativa
atgacgtgatttcataggaagaattcttgttgtccacctccttcgacatgaaaatttgatgacatcaattattaaaatttgtattcatcaaatattatgtcacgtggattgctgtaccagtgctttaaaatgggttgaatatgagagggaaagaaacaccatgctcctgtttattttatttggactatattatacagccctccctatatcctaaaatatatccacactaatattttagggtgaattattatattttagaatgaaggaattacttttactcaaaaaaagttgagtgattttctcttaaaaaggacttctaatagtagatagtatttctttcggatgagtgaatattattctgcagcgcgtaacgtttctctcgaaagaacccgtcagatctcacacggtcacgcacacgactcgcacccgttcgcttctcttctccccgctccgctagtcatcaaccaccggggtccgacgaaacaaaacaccacgccatcttcacgatctccgtctcccatccccgcctcgccgcgccgcgccctcctcctcctcctcctcccaccccgccgagcactcacccgccgcctcggtttcgtgcgcctctgcagcggcaggcccggggc

SEQ ID NO: 36092 - DNA, 604 bp, Oryza sativa
cgagctcggtaccccatgttgatgtgatgaaaaagcactgaagtttggattcaaactttagatctaaacacagcctaccgagagggaatggaaggaaaaaaagaccaagccaggaaagacttccgctgctctccaagactcggcacgctagctagctcttcgttccccctcgtttgctctgtacgaggcagcagctgaggtgagcgtcacatgccgctgaactcttctttttctcggtcatatggactcatgatgcggaagaccaacacgcgccgcacaaaaacagaagcgacgacgcatcacgcatactcctatagcctaggaaaacatggtccctttgttgttaggcctaacatgggtgctagtagtaagattttacgggagacggcgtgttttagcatgggtgcagcaactgtgcaagtcctaatcaccagtttgtgcttgtgcactcgactttttttgctgatgaccacgtctacgagagtccgggctatagctgtaatcagggagcgaaacggggaaagtgaaaggaaaaggggggcgaaaagagattcgccccacgcgcaggcaggcagcagctgcattgttgctgttggttgggaaa

SEQ ID NO: 36093 - DNA, 822 bp, Oryza sativa
aaaaggccgagaggacaaaggccgtattgtcgaggaaaaaattgataatttaacaatttttcgttgtccaatctatatactaatataaaaaggaggagttgtcccctccaatgctacaagccaaatcatccggactaatctggaccgtccatccgcgcgcttctcttcctccaccgcacgatttcacagccgaggattccacgcgcgaagacatcgctcctcctccacccgcagccgcggagaccgcgcgcttctcttcctcgctcactcctcccagcgtcctcgcaggagcgactccccgctgccgccgcggccgtcctcctcgctcgctcctcctgctccccgctgccgccgctacgccgcgccatagccggagccgccgcggccgtcctccttcttccccaccgctgcgccccgctcttccccacctccttcttcccagatcgtgcttctcccactcggatcagccgacggagccgactttggccccttctccgccgccggaaccgacatcgacctcagcccgcggccgtccttcttcttccccaccgccgcggctgtcctcctcacgggcttctcctccgtcccgctgccggcgctacgccgcgtcctcgccggagccgccgccgtatcgttcttctcccactcggacccgtacgaatctccgtcctccaccttcgccgctcgcccctctctctctctctcttcgcccgtgactccatcccctccctagccgctgccctcgcggcctcgccatcgccaatccctccatgccttctcgggctcatggtggaggggcgggggctgccttcggtggagggg

SEQ ID NO: 36094 - DNA, 646 bp, Oryza sativa
catgtacagcctcgagaggaggctggtgccccgccatctcgtggtgaaacttctcaaggagaggggtctgatcgagcaagaccggtgcttcttcaacgcggtggcgccaactgaagagaagttcttggagaagtttgttgtcccctttgaggggtgcgtcccgggtctcgccgacgcctacgagtctgcctgtgccgggaagacgccggtgcaagctgagtagtgaccggacttgggggagaacaatggaggtgtgtatgtgtgtgtgtctcacttccattggataacttcattctactgatcaactatagcagggatggcagattcaattcatggtcattttagtgtaggtttcttgcagttgacaaggaggtggatgtgtataacaaccttgagaactgttcagttgtggttgaacaatgttcagtgggttttcatataaaatctgtgagcattacgtctcctatggtactcattttctttggtacaggcttacactctagctggcttctggcatgatcagcgatcacgatgtcctgatgtgcatcttccaattccaagttgaacgagagaaagtgaagaaccatctgagccaagatatactagataaattgcggactagggaagaacactctacataaggaga

SEQ ID NO: 36095 - DNA, 522 bp, Oryza sativa
aatgaaggttgcaatgtaagataattgacagggactttattaggagtaaccggtgaaacatattgaccgttcctcccttggcatgaaaggccatcaactgtacttggatcatatgtacatgatataccagagccagatacctggtgaaatattacgtctcctctctccagatatagggatattttaagacggagggcattggaagaattatcatcatctctactatcatattaaatataaacattattttattctggattgtgggcgacatatatgacatggtttagccacccgacaatacttcaatacccctatccatgtttgaatgtgaaacaaactatcaactctcaactaattatatatcgactcatttgagaatagcttacagtaatacgagccagtattctagattacgatagcattactactggcacactcatgatgatggagcactctctggatcaactagtcacattctaggaagattactgttgccattgccagtgtcaattgacagacaca

SEQ ID NO: 36096 - DNA, 522 bp, Oryza sativa
ctggccttgtcatctactcatacaagccttccttcttcatctgccattgcttctgaacatgcacataagatacatacttcattcataccaaaataaatcaatttctgaccacaaacctacacataaggaattgatttattttgtgacggagggagtagcaaccagctgtgacgatgtcactactcaccactgagaactcttgcaagcaggggctccaaggaggcggagagtcggagacgatgatgaaccagcctccaataaggaggtctcgtcgttggttgctactacctcaaggtagtagtaggtaggattctgtctgctgcatctgcacacaattgtgctgtaactgaaaatgttttactatgtacagtgtgatagctggttcataggggcaaggtttggtgtgaactgtgatgatgtgtgatatttttactgtcagataagcaagatagggttaagaactagcataggtttactgcataatttaaaagtatacgtgaatcatgtctgattttactattg

SEQ ID NO: 36097 - DNA, 587 bp, Oryza sativa
aatgggctcgtgcgctgcccgctttgctgaaaatctcaagcttttttccggaattttaaacccttgggttaaaaggttggatagaattttttttgttttttggtttttaatatgcttgagggtgttgtgtcagcgtagaacgtgtacaggggaattacacgactgtttcatactaggactgatgaagtaacaatattggttgctgtaatgatcttatttatgctttcttctacggtgctgggtgtgtacaagaattgaagaagcgacttcgttttgaagaacaagaatggttatcactctttgttctcaacatcgtctcagcctctaacgttttcaattatgcatttttctgcagcgtattgcatgacttcgtccattacttgctctgcgccgaactgaaccatgagtatgagtccggatggcagcaaccctggtacagtagtactgtgaatctatgttactctatccgtcccaaaataagtgcagttttacactattcatcttcaacatttgaccgttcgtcttttatgaaaaaaattttatgattactatttttattgttattagatgataaaatatgaatagta

SEQ ID NO: 36098 - DNA, 603 bp, Oryza sativa
ctaataaaataaatggtcaaacgtgtcttaaaaagtcaacggtgtgatatattaaaaatgatggagtagctatttgatagtaagattgttcaattgtgtcattattttcttctcacttggtttagcaattatagtacaagaggtagtgactagttaaaacaaaaaaccttgtgagactaagcgaaagtaggggtggatatcgagctggctcggctcggctcgctctagctcgttagaataacgagctggctcggctcggctcgctatcctaacgagctaaaagtctgtctcggctcgggtcaattgtaagcttgagccagctcgtttagctcgcgagctagatttggacgacgcatgcccagagctgagctggatctggaagggcgagcgaacgacggactccatggccgacgagtcaagaaggagcaccacatagcagcgccggccagacctcgtcggagcagtggactccacgacgaccaacaaatcgagcaggaggagggccacatggctatggcgcggcggtgctggctggacctcgtcggagcgacgtactcctcgggcgacgaatgaaaacacgcggatgggaggtgatgccggcaa

SEQ ID NO: 36099 - DNA, 970 bp, Oryza sativa
gggaacccgcgcgccccggcgcgggcgaagttgccggccccggcacggcggcggacaaggggaagccggcggggcggagggtaacgaaggtaagcgaagggtgcccatctcgtcggcaggtggggagtggtgcgcggcggagtggtggactcgaggagtgcggcttggcttggcttggctttgcgctggcttgggaggcggagaggcgagaaaggaaaagaggggtttgggtgggggatggacgggcggggatctgctggtctcccgatcggacggtgaaggcgctcgagcgcgcggcgtggcaggaggtgtgtggccggcggtggggatgatgcggataaggaacggatgattgtgagtaggctgatcgagacgggaggatagacagaccgccactgcggcaacaacgtctactctgtccatcttattaaaaaaccaatctaatattagacgtgacacattttaatactataaatttagacatatatctagagacgcggtatggagatgaatctggatatatctctaaggacacggtgttgagacgggcgagtggattcttcagagatgggagcatcacgagaggctgcgtcacggaaggatgctatagctagaaaattgaagggttaattggatccatgccactgcaaatgtggcaaatcaaaaaaataccactactattcacgttatcgggtagatgccactgtaatcttctaaaattagaaccatgctactcccgtcactattttcggcctcctctctcacgtggtcatcctcctcactcacgtctgcaaggggaaaaggcgacgtggtgccggcgagcggcgaagatgaggcggtgccagcgagaggacggggagcaggcaagcagcgaggaagaggaggcgctggcgagcggtggaggtcaagaccgccgccggcaaggatgctcgcggggaggtcgtggaggggcgcggggagcgggcgcagt

SEQ ID NO: 36100 - DNA, 601 bp, Oryza sativa
attagtttcatcaaatcactaattgaatatattttcataataaatttttcttggtttgaaaatattactatttttctataaacttggtcaaacttaaagcagtttgactttgactaaagtcaaaacgtattataacctgaaacgggagtagatagtagtcatttaaacaattttttgtgtcctgcaataaatagcttaaccaagcattaaaataaaacggtgcaaaagaagattccaatggtttttaaaggaattgtttgttaggtaagaactaggatgtggatctttagtttggcatataccgactatataaagaagcaattgctgtaaaagaagtgattgcacggtttggtagccaaataaggctgattgtgttgagtgagcatcaaagaggttttagcgtatgaaacaatacacatagagcagcagaggcatgtggcttttacaaagaaatcaaaacagagcagcactgtttatatatgccaagttcatctgtaagtcgccttcctgatgaatgttcacatgccaattactagaagtgggcgttcgggctaccccgaaaattcgatctccgtcttcgggttttcggtcaattctgttt

SEQ ID NO: 36101 - DNA, 671 bp, Oryza sativa
atttgcgccgtccatctgggggcccacccaaaaggcaaggcgacgagggggcggcacacgccactaccacgtggggaccaccacgcgcggtgcctcgagtgggctgtggggactctggtcatttggatggaccgttgctgttaaaaactccaattaaacagacttatggaacagcagcaaccgggaccttcatctctcaaatattcctaaaagaacccaagtggttttctttcctccacaccaatcatctacatctactcattgaatacatgatcactctattacaagctagtagaagtatgaatgcttatgtgcacaccgtcggaagtaaacattgtaagcatatataaccatctaactacgtattcgaatgaacggggataaatcctaaaaccttgaacaacacctaccaaaagctcattgccacttttacacaaccatgttattgcaacttaaagtatagcgagttgtttttttaactctattatctctttttatgaggaactctattatctatgttatgaagtggttttataacccataaacattttttagtagcctatactacagcaagggtaaatatgagttgcagccatagctgagacaaagaccaaacaagagatattactcatagttaacatcatcgttctagtagtaacaaagcttgcatg

SEQ ID NO: 36102 - DNA, 603 bp, Oryza sativa
gcatatacacgaaaagaaaagaatatgaaacccggtaaccacttggatggcctatcatcagctcgatcttgagctttgggaagcaacccaaaaagggcaagactaatgagagacactagtaaacatgacaagtgtttcaaaatggggattgcgcactttaatcctcgtcgtcgtttgggtgatctgaaatgagaggaagcgatgaatcttagcacaaggagaccatgacagccaacctctttgataaaattaagaaagaagctaggacgtacttgggctctggcatgagcaaagtgatttcgggagttcttaccaaacagtgtatatgacttataaggtgcttttccccttttcacatccttaagggttgtattttctcccaatatatatttaatgaaagagcacaatcttatgctaattaattataatctaggaaaagaaagagctaggaaagaggtcacatgttttgttatcctaatgagcaaaaaaacacatccttttgttaaagctagtatgtccatgggcgatcctagatgcatgatacgtacatactcgtagagtcaaggagtagcaatgaactggtggctacagaagaggagattt

SEQ ID NO: 36103 - DNA, 1389 bp, Oryza sativa
ggatcaatggtatataagggaatagccaattttcagtggcatataagggatcagaccaattttcagtagtatataagggattatctctatattttgggatgaaaatagtatccatatatcatccagaaataataataataaatctatttatagtattatcttactgaaagaaagctacgaaagaaagctagctatgtaaaattcgatgaaaaactttccaatataactacacaataaattattgtaattacattgtaataactagcatgtaactagaatataatttatactaacttgcacttatatatcacaaattcccactagcacacaaatagttaccacgacgagaggagaaccatgtgtcccagcttcaattcccgtctagcccacgcgaatcttacctcccctctctcgtcatcacgtatcttgaagtatgtccaatggatgaaaattcaaatgtttaggggagaataactgtcgaattttttttcttttgcaatctaaaatctatacaatttgcgtgataaatctagatcataactctataccaaggtatattaataatatagttgtaaagatattacaatatgtattttatagaattaatccattgtaggctaatgaataaattgtgtcccttccttgttgttggtggctatgcacttcttccatccaaaataaggctattactacactcaagttgtctcgaaatgaaactatctctccacctacccctcatatctttgtttaatttctcattacctactttctcttcccaactaaattacaaccttttcctagtcattttcacctacgtggtacttcttcaattcacataaaaacctccagaaatgcttacagttgtaacaagtagttgtagcttgtattgaagcaaagaccagatttaatccattataaaaaaaaagaactataataattatgttatattttgaactaatgtgattatatttccaaataaattaatttcgctccgaacaaattgcatgggaaacatggtgatgaatagtattatttttgcagaggacgataaatgcatttatctagtataaatatatatatagcggatttggtatatggcatacatacatacatacatacatacatacatacatacatacatacatacatacatacatacatacatacatacatacatacatacatatatatatatatatatatatatatatatatatatatatatatatatatatatatatatatatatatatatatatatatagtgagcataggccaacttggttaaggtttcttgtgtggtgaaacttgtctactcaagtttagtcatagatatgggtggttatatttagggctaattatttgttcaacgataaatgatatacccat

SEQ ID NO: 36104 - DNA, 500 bp, Oryza sativa
ccttcttctcctcatcctcaatctgaatccgccgttattttctctctctaactcatgtaatggtttctgttcgtgtgagcacccaccattgccacgaatcgttagagatgcagcactgctaccattttttatacaactaaaatactaatacaattaattaatggctggttgattgtgacttctggctgtggtaggggaaaaccaccccaatgtgccgtgtctgaatccaatactgtagctttctttgacttggttgggacttgcccttctttcggtgctacctggctgtgaccaattcatacaaaccgttggtgcttgttcactctgctgtctctgttggtcaatgccactggccttcccagattttgcacatgaaccttcttcgttgctccttcattccgtaatgtgtccgtttacctatgcaacaggtggagggcagaaacacctatgcaacaggtggagggcaggaactgtcttcctgcggaggtcaggattggcct

SEQ ID NO: 36105 - DNA, 925 bp, Oryza sativa
ttaactattaaatacagttaatttactttctaatggtatttctctttatttctttatctattaattgtatttggaactgcactgaaatttagtaggatgatatatgcattatccattatgtacaacttaactaatcctacatcttaaacgcttttaaagaatttgttagtactggttaacaaggttgaaaactcctaagattaacttacacattgatattttaaagttcaagcaaaagttaaagaataattttaactttgataatggtgtcacctagataaatcagcttaaaatacgacttatataaagaggaaaaataatattattaaatagtaaaacgaacaattttctaacacttgaaaggtaaattgagaataagatagtttggggttaaataatctaatgagatagtacgagggagctaaatggattcttcttctttcgtcgttgtggtgcacacagcaattgttgtgcgcgtgagtgaccttatacagatgtaggcctgttgtgggagtcgtcagcccaatgggccagcctattcaattaaggggcccaatattattctacagggctcatcagcaccgtccatctcaatattcttctcctcacaagggacgacgtacggtagtcacaaaaagaaaaaaaaagcattttcgcccgttcaaaagcaatgtaaaaaggcgatactgttagtgttgattcttctcatacaattacattcaattaacatatcataattattattaaagagttcttatatttttcttgataattgcagtgattccttgcacaaagcactgacagagatgtgaagtgccctactccaatgcatgcttgaacttttcctctatgcttacgaataaaaccggctatatttgagactttggatatccttgcctagtgatttttcttctatgcttacgaa

SEQ ID NO: 36106 - DNA, 1818 bp, Oryza sativa
tcatgagccctgtccctatacagataacacaacaaagaaatagggataggaacatttatattgtttctgacatgctaaatgacaaaggcaacaactctaaacctgtcaagttcttgcaaaagttccatttcccttgaactagtctcctccaagtatttttcacgagtatgtcggataagcagcttcttttgtctgcgtgctataatttcctccctgagtttggacctttccctattgaagaagaacacaaactataagtctataaataagactagcactaaatttgaaattcttctagaattcaaattggtgaaaaaaaggacatttcacaaagataataaagaattttacaaggaactagagctaaggcagtattatatagaagcttatcgagcaattccaaaaaaaaaaaattccagaaagcaaacatgtattagtagaactttagttcaccttagcagacaatccgtgcctcctggagaaaatcacaggtgttatttttttttagctttttagtggtctacaacatgtatagttttttttttaaaaaaaaatccaaatgaagtataatataggaaagtaatgtactttctattttcacaaaaatatactctatgggacaaattgagcctatttactcattagtaggctggtttcttctcttatcagcatttttagacgttgaacaattgaaccaatatccaaccacttgagactcatcatacccaaaaggaacgatcaaaagccaggcatgagcgcatgacatgctgactgggcaggaccatatattattgcccataggccataaacccctaaagggcttggcagggctggtctattaccatgacagaaaaatagttcagttgaaacaaatcaggagttcagggcttacaaggaccgtatatcttcctgaatttgctggagctgcttattaacctcattaccatccttatagtctggaaatagaataatatcataacacatcaaaagtatatcgttaatgaaaggatgccttaaaattcgttagtcttacatgatgacatgtccggaatcatggtgtcctggggatgtacaataaagctgtgaagtgctttctcatttttaacaatctccaattcgatctctgcttcttcaagttccttaatgttatgattaaccaagtgtcagtataaggtgttcaaaacaaaggcccaaaaggaaagcccttgttgcatttctaacctgatattcctgatcagatcttgttgagaagaactcaaagtatgattcaacagaactcaaagaggacagcacctataaaagagagaatcatgaatcgagatagaccagcactgacaagatcaggaaatataatttacagcatcttctggtatagagataataaccttttgaacaaagaaactataatacaagcacactgcagtggaccagttgtgcctattgattgcatgacgaataaaaaaatccacaacaataatagttgtcatcaagaattattcatttgggcaaagtaattgcactgatcctgtcattatcaaattctaaaaatagatgctcatttggctcaattaggagaactagttagctaatttgcaagtattgtcatttatgttgtacagtttaactgtgcaagcacagtcagcagtcagcactgacaacctagtttgagtttttgaactataagcagtgatgtttgaaggcagaggatcaagcaagaaagaagaaagatagccaacaatagagtgccctgaagaatatgacctgaagaatcgattcacggatgcccttaaaatcagtttcaactggtttcgcagtaga

SEQ ID NO: 36107 - DNA, 680 bp, Oryza sativa
acattcccctccggcggcgagccctgccctgccctgccgtgccggagtggtagttagctggggcgtgcggcggggagctcggcaatgggcgggcgggcggcggaggaggaaagaggggaacggaacggaggcgtaccgtgcgttgcgcggggactagttgcgttgcccctctctctctctctcctctcgtgtggtgtcgtgtcgtcacaaacacacaaaaaaaaaagggtaggaggaggggtgggttgagacttgagaagatgatgaaacggagtccggttgcggtaggaaggaaggaggaaacaaaagcagccactccatctctctctctctttctctatttatttattatttatattattatatgctcatgttcttttcgctttatttgcttcgctgttctactggcaccggtttttcttttctttttctattattatatttggggtcttgcagtatactaactactactcccaactaggctactacagtagtataatactccactactactctgtttattatttttcactgttattatatattggaggaaaggagaaaaggagtagtattttccttttatttacttatttattactccatgacgggaaagggagaagagagcccgtgacggactccatccgttttgcgtttttgcaacttggctctcctctcctctc

SEQ ID NO: 36108 - DNA, 1467 bp, Oryza sativa
agatttaagggtgtaaaattgtaaagtgccacatcgagtattatataggatgtcgtatgaggtgtttagacactaataaaaaaataaattatagaatccgtcagtcaaccgcgagacgaatttattaagcctaattagtccattattagcaaatgtttactgtagcaccacaatgtcaaattatagagcaattaaacttaaaagatttgtatcccaaattagtcgcaatccataggattagttattttttagcttatatttgatatttatgaatgtcttcaaacgttcgatgtgataggatataaaattttagggtgggatctaaaattacatacggtacggtacctttgcctcccaaactacctttcctcctgtccattaactataatactgctccttgcctccttggtcactcgcggttgctctactttaaaggttttctcaaaatgattattttctctatttgtgcaaaaaaaatgaaatatgcatcataaaatgctctatattcaggtcctgtttagttaaaaaaaattcatgctgtcacatcgaatgtttagacacatgcataaagtattaaatgtagaaaaaacaaccaattacacgggtaaattacgagacgaatcttttaagcctaattgcgccatgatttgacaatgtggtgctacaataaatatttgctaatgacgaattaattagggttaataaattcatctcacggttttctagtggaaactataatttgttttgttattagactacatttaatacttcaaatgtgtgtccatatatccaatgtgataaccaaaaccaaaaaaaaattccccaaataaacatgcctcattcatgcagcaaatcaagattaatttctatttgttcaacccatacaacatttaaagtatgaatgagtttttatttcacatgaaacgacagagcactttagtcgatgagaattaattttaaaataatagatgtcttggtgttttttgtcttgatattttttgtttatgggatgatcaaattacggtagaggggtattaccattctcaatactcatacacaaggtaaaacacaaacacacacagaaaatattgttatgtagtactagtacgacagaccaaaactacgttaatttcagtatcagtataaactagggaaattaaataatcgaggagtatatactactagcactgtatgtcactacactggatcaggtcagcactgacgggctcaaaccatcaactttgacgggttcagctcccggttagagattagtggtcactgatgacttgagtcacctgtaacgggtgaagacccatcagaattaagagccacctcaaacggcccccaactaaaacccatcacaggtgagagttacctctgactggtcccaaccaaaacccgtcacaggtgagagtcacctcaaacggcccaactaattggggccgtcactggtgtgaaaaaaaaggg

SEQ ID NO: 36109 - DNA, 2393 bp, Oryza sativa
ccctagccggcccggcgccgccgcgcctcccctcgccacggcacagagaaagagaggagagatagagagaagaagtggaagagatagaggagaagtggagaagagggagccggccggccttatctcctcatgtgggccccgctgggagaggagacatatatatacagtggcagaagtcatctcaaacgggctgggacttaaaagccgtttgaggtgagtaaacctcgcctctgacgggctgtccggctgcgacccgtcacagataactagtcacctgtgacgggttaggacttaaacccgtttgaggtgaggtaacctcacctgtgacaggtatcccgtcagagatgtgaggatctggtgtagtgtgtataaacccaaaagaaagaatataaaagaggatgaggcagttggcatctggttatggcgtgcataccactagagtctagcagcggaaggtaggttggtggttgttaattgttgctgttggctggctgctcccaagtcccaactctcaacccaacatccttcaaatatttatgtataaatttcacatatacttttatcaatttagcacaaaactatacattttaagatgtgtacaacagatttaacatcataccttttttttttatgaaactacacatgtaacatcagttttatcataacactacaactttttttgaactctaaaatctgtagttataatttcatcatcactaaatctgtaatttatctgtaatttagtgatatgatatcttaaaactagtcatcctagctaagctatctaatcgtcctccctcgtgggggagatagaggtgcatgtgatgagggatccatgagagaagagccatctctgacgtgggctcacctctcagaaatccatcccttgaacttgagaggagcttcttcatgtgcacgcgggcgtggccagcaataacaagcaggtgtgttcggttgcatatgccatgccaatttcattcgttattgttacaagtatttttttgtgtactcctacatgtgggccggttgactagtggagtagtagtacgttggctagtggagcagcaccaccgcagcacttcactagcggagtataaattgttgccatcgccttgcaaatgcaacacgagcttagctatggaaaaagaaaacacttttaccgtggagacttgaaacaaattaagctggactgcttcaggactcaagaggagagcattcaggtctgaaaacacaaccccagcagtccagcacgcactcgccactctcgctcctacggagtggagtatatccatccatcttctgaaatgcgctctctcctgtaaaaagaaaaaaaacaatctttatttctagttacttaaccaacaaatatatagctaaaaataaaaccccattatttaaatacgtatgctagaaaaaaacatatgaacgaaaaaaaacacatgaatcaaattaaagtagatttttttaattaattctatacgaattgaaaacatatgaaataggaatagaagccattagcatatgattgattgattattaactactttaaactttaaaatggaattgatatggttttcaaaacagctttctatatattttcttaagaaaaaacagcctttaacatttgtttcaaaataagttcatttttatctttatacctaccttaagtctacaaatcaagtaatattatctcttaaatactccttacctaccgtactagtttattctcctaaacatccactctcttttttttaaaacaatccacacaaaacagtgcgacgtttctattgatagagtagaaaaaaaaaccccatccgtctctaaattagttcttttcctatcatttgattcactgttaaatatacttttatgtatacatatagttttacatattttacaaaagttttcgaataagacgaacgatcaaacatgtttaaaaaaagtcaatggcgccaaatatttagggacgaagggaatacaagctattgctctaggagattatagtcaagaaaagaaaaaagcaacaaccacaccacgcgtttacatttgatctagatgttgaaagcaaaacaagcatacaacacccctaagaaacgaatcttctgaacgatgctgaaagcatcgccgtcgcccatcctggggagctaggacgcggttttcacctaaaaaagcattgggaagaggagtaaacacgcaacaatgcccccaagggtcgagaatacgacacccgcaggcatcgtcgttgctagccgaaggctaggcttttaaccgtagttttcctaccctcctgcgaatgcctatcaggttcagcagccaaccaccatctaaagcctttcaacgcgcagccaccgcaccaacgtctcgctgttggccggccatcaaagcaggatttc

SEQ ID NO: 36110 - DNA, 1967 bp, Oryza sativa
tgcgggagaagctgtcgctgccctctgacttccaagcttcgcctcctcctccctgcgccaaaggtttggccctgccgccgtcatccttgctcgctgcccggttctcctagcggcacactacggcgacggcgagacggagatgaggaggtgaggcgcggcttccctcaattatcacactttttttctatgatgtgtccttttgctaattccttaaaaattttaaaagaatattatttttttatatattataggatggatgaagtagtaatgtcacctgtactaattttcttttttttcccagctatactagtctactgctactccagactccaggcctccgcctttccggccggctgattgcttttgtgtttcctgcaagacaagccatatttcttgttgtttgtgtgtgtggctccctcctctccaggcgccacagaattgtacagtacactttgttgagttggcgtgttgcaggccacggacatggccgtcacgtcgcctcacctcgctagcttcgtactagtgtactgtagcactagtacctacataaaaagccatccatcctttcctgcatggagtaggatcaggcagcaggaaggaacggaggacgtttcagtttggagcagcattcgttttcgtttcctttcctttgtgctttcttgtgatccacagaatactgaacggatatgattctctcactccgatcctagctttgtgggggaggggaggctgcattgcatgcgcgcgtatatgtatgtcgtggtcgatcgtccttccagttccatgtggagtaggaggagtatttatctctgggattcgattcatgtatatatgatgaacagagctcaatcgatatagatcgctagctaagaatcgatccagaatatactggactactccactatagtggtaggtactaaaagtacttgatacatatgcttccattccttttgcttttgcttttctacttgcattgctggccgcctacctaagcttgtggcaccaaataacccagcctcacgctccaaggatattaatttgaccagatcgattcctactacatgtgcttttgccatgcatcaaaccgtataccactggctggggcggatccaggaaaaaaaatagggggctcaattgtacagtttcttcaacctacagccatttaggaacctttagtttattattcatggtagaaaaattaaagagggtgcttcagaggtatccatagatcttgtgggtgtagaagggactcgagtcccccctgcagccacgttggatccgcccctgcactgccacatggaccggtttaattaatgtcatatcttagctgattatgctatatatatatatatatatatatgctctctctaagtagttgtagatcgatcctgatgcatgccagtttaattatttgacattttacactaccaaatattgatatatatacgtcgttactttttaaaaatgatgaagtgatcgaacaagcctaaacagaaaaaggcacatctaccattccataatctatccacgtgcgcgcgcgcgcatatatatatatatatatatatatatatatatatatatatatatatatatatatatatatatatatatatattgtttggtgctctatggtgcccgggcaccattgttgaaattgagtatatacccaattcaaatgagtatgaaactttttcaattacttaggtattaacattaactactttactaactagttcaaagcatgtttgtactgaatttgaacttgtttttgttagattttgattctaggtatatagcatccatacatataattagttaggtatgtaatcatggattgtgaaataaagttaaatttgagttgttttgttgataggtatagatatgaatcgaattattataactaggtatatactcacaatttgaaaattttgaaaaatttgagtgattttgtacattagataccatgg

SEQ ID NO: 36111 - DNA, 693 bp, Oryza sativa
  unsure (1)..(693): unsure at all n locations
ggcgccccttgaggtgcattgcnnnnnnnnnnnnnnnnnnnnnnatgccattcaccgtcaggcgggtttggttcggtctgaggaggcccagccgctctcctcttggcaggctgggcgctgggctgtaggcaatcacgggcctcctggctactagctgttccctgccgcgcggggcgtcgtcgcccttcggcctttcttttcgggtgcccgtcgtcggtccaaacgccgccaccgacgccggagataccgcgcaacgctaaacgctgagcgtcagcgatctaaaataccaccgccgcgacatgcaacaagacgtacgagaaaacctccgcacacactgagccgaaccgaacagccagcgagcgaccccgtttatccggccaaccaccatccgatcgtgctgcgtacgtgatgggtgcagttgcgatgtggaaaaaaagccgccctataatgggatgcagctggggcaagagggaataataacgaacagcctccaaatctatcgtctgaaaatttcttcgtggagaaagctcaaacccagccgctaaaactggtcaagatttcccgcacatgctgctagctgcggccgtttgacatcgctgccgatccatcgtcaggtattccgtcgagaccgcgacaaaaacgaaaggccgaaagggtgtggaatatcttcaaatcgaaggcatgcaagagcaa

SEQ ID NO: 36112 - DNA, 1535 bp, Oryza sativa
  unsure (1)..(1535): unsure at all n locations
cgtacatatcgttgtgagtctatataaacattactgtgctagtgtgtgtattntctnttctctatatagaacatcactgatctgngttatatgtgntttggtcgatcatactgtctacttgtccctatcnntnannnnnnncnnaagggnttttgttgaatggcctaaccntggnacacnagnncatcaatgccaattcacatcaacaagaatcttttattcaccactataagttacaagttatggtactacatgtcctccggcagcaatattccaagctagatgagacaatgaatgcagatatcttatcccttttcgatgcatttttatctctatctattttctcctctttacttgccttgagaatactacagattatggtaaaaatatatcaacgtataggagacacacaatattgtaagctggtcaataagatcctgctatatgcttaaaaagttgtggttactgaggatactacaaacagcataatattgaatacatgtaagtaactgtcagtctaagaattccaaggatataaataactgattaatcatatggctgctattatcatgctttaatgttctatactatttatgaaattcatatattatttagcccaatagcttaaatggaattatctgccatatcaatctagctagcaggaagcacaattaacccatagcttatacttaatctaatcgtattccagcgggctttgcacaaaatatatatccttcactgacacacgaactacatattcttaacaagatggacagggactgaagatacacgcaaaataatgaactagctagagactttaagtgtatacatcgatctaaatatgttgttttttaatcataacaatattagaagaaccaagggaaggccatggcttttttctacaataggaaactatgaagtcacaacctctcagcattcaagcaccttacttaatacagtagacaaaaagcattcgaaagaaaattacagacaaggatcccatcttagcatttcacaatagactggctttggctacaagcaaactggttagtttaaagtaaaatagatgcatcaacctgacattagcgtggatacattgaaacaacgctcacctccaaagatggctagctggctagctcgatcgggtagccggtgggtggtgactgccgaggatgaggggaagggggtggccggcacatgctctccttacagttggttgacctcgaaagcaaacggcagcgcacaaggatagtcaagtggaggaggggggagacactgtccactcacccataaataactcgacgaagttaacctttaactatgtataacttgcctaaaatgataattattggaaccgggtggagtatgtctttgtttgatgagtatggtagtagtgcggtaaaataattataatgatgtagctaactagttttttttggctaatttgatttgcatgggtgcagttccaaaatctatccacgtattacctgtgatgaacgacttgcagtcaaacgcgaatccactgcaatcatcgt

SEQ ID NO: 36113 - DNA, 771 bp, Oryza sativa
  unsure (1)..(771): unsure at all n locations
tgaggtagaacgactactactgcaagtacttcatcagataaagtgaggctgggagccgaggggcgaggagctccaacggaatcggcgcggaggcctatcccctctatccgcgatggctggtagcgcggtggccgtgtgcgtttgtggtcgtcgcgtttcgccccccaggtgatcgaggcccgagctaagtcgagctactagaggcgagcacggctttgtcctgtaccgccacgtactacggcaacgcagcaagctagcgggggtgtagttgttgttgagcagaggcgccgacgccgacgccgacgtggatggtgcgagattatgaccaagtacgtcgtgttaagctgtgcgcccgatgtgacggcgaaacggttaaccggagagggggtctcgcaaatgggctccaagcctccaactctccaaggtagaagttgtttgcctttaatggcctagcatttacgcgtggaatatggcaccgggttcgacttcgagtgagagctacagggcgggagggggactcgcaggcgactggacgctttaccttcacgctaggctgctcgagcttccggtcagctcggggaagagctgctttaccatggcagtgtttagttttcccctatttctgactttccatcacatcataatacaccaaaaactttactatacataaaccttttaactttttttccaaattcccaattttcttcaaacatccaacttttgttagaaataaaacacaccccatttgacttatcctactnggatcgtctc

SEQ ID NO: 36114 - DNA, 593 bp, Oryza sativa
ttatactgtttgaccattcatcttatttaaaaaaattaaaaattattatctatttttttacttactttattatctaatgtactttaagcacaacttttttgttttttatatttgtaattttttttaataagacgagtggtcaaacagtgcaatcaaaatgtcaaaatttcttatattatgggactaagggagtagctagcttggtagaaaagaatagctgtagcgatttaggccgaattcttatctccatttaaccaactcacctcactcgttttttacgcgcacgcttttcaaactgctaaatgatacgtttcttgtaaaaattttctatatgaaagttattttaaaaaaatcatattaatccatttttaaaatttattttagctaatacttaattaatcatacgctaaacactgctttgttttacgtgctagggagtgaggccctcactcctgaacacaagattttcttactaattaagtggaaaaattaaattgttattatttggaacgcccgtgtaaatcaccgttcaactttccatcatttaattgagaacatgcaagttatcagcggcttatcagtgctagaaattt

SEQ ID NO: 36115 - DNA, 603 bp, Oryza sativa
ttggtctgcctagtgtttctgtcaagattggtattcccttaagtgttagacatatactttttttaagagagtttatatttgtgatcttcatatactaaattaattgttgattgggataaaacaaaatcatgttaatacttattggttatatacatacagtataaaattatatggttttgtttcataggagttgagttaattccccttaatctcgatgacaaaagaaaaatatgtctcatattttttgatgaaagaaatactagacaacttacgatttacacggtcctcccagcaatatagctctttatgcatgcaagcagaaggagaagatgaaggtatgacatccactacagtctaagcgtgtgggaaccttctctcctagcatgtaaaaagaagcaacaatttaatacatgattaattattagaaacaaaacttgaaaaatagattaacataattttatgaagcaaaaactctgttttatataaaaaaagacaccgtttatcagttcgacaaatatccgtgaagaaaacgagcgatgaaaaagaacaccgaagccaccgatcgaaacagccattttcattagccgctctgcgtacacatac

SEQ ID NO: 36116 - DNA, 1451 bp, Oryza sativa
tcgagtgtgctgaccctgcatcttgagcataacagatcccaggtagaaacgtgagcgatgcgaaaacatcgaaaaagtccggataatatttttgcaaatccgaagttgacacgtgctagcgttgacatgggcctcctaggtatcaaccaatgttatctgctgatgtggaaaaaatcatgtgtggcatgctctatgataaaaacacgctacctgaccagtctttttcacctggaggctcattttcaaattcttgcaccagattctacccatctgccaagttattagagcatacataatttactcatctgtatcttaccatacttctataggattgacacttttgtaccaataactaataaataaagaaatcaattcttcaatttatttattttttattttgggttgactcttgaaggcatttaaatatactatgtgtgaaggtggtatgacaatattggtcatgttttctcactacaaaaggagtatttttccatgactatgcgcctttcctttttgccatcctaagttaatattgatgatttgctttgttacttcaagtcatgatttacccaaatttatgtgggatcaaatggttttgtttcttttaatgtttttcagggagttggtcaatctcttactcgttctcgtgcagcactgaagtatattgcattggccatatctggccatatggatgatgttctcacagaatataaagtacattcatttttcctcctgaaagtgagcttttccttggtgatttgttttacagactccttaacttgtattatgtaaatttacctactcaggacgtcaaacataagttacttttcattctggagatgctagatccttttattgatccttctgtaagtgttatgacagatgcaatggcatttggtgatgtgtctgttgtgcatttggagaagcaagcaagcgcttgcaatatttcgttaaatattattcgtacagcagtgaagaggcctgctgttctcccttctttagaacttgaatggcgtcgtggtgctgttgccacaaggttggtgaactctatatgtttacatgcttatcataaatttgccattaagattgatctgaacttgtcatggttgatgagaaccagaatagtactgtcattatttaattgtgacttcctctggtcacaaaattctccattggaagcatgcaattgaacttcatcattgcagaaaaaaagaatatcttggaggaactagttttgcctttagctaataagaaagatatgcacccaagtttgaaccaaagaggacttgggatgtatcatagaacctggtaaaccgtgtgactttagcatgcacatatgattgacggcttaaacattaaagcatttctctagctcagacctactttgtatgctggtaaaaacatgctaaatctagatttgatttgcagtgttattctctctaccttggatc

SEQ ID NO: 36117 - DNA, 822 bp, Oryza sativa
aaaattaagtgtataagcttttactccagttgatgataagtaattattaagagtaagaaatagttaattaaacatttaaagaagcagttaagcggatggatcggtataggttagtgatcgaatgatccaacgggtagaattaatcgaagaaaggaaggcgatgaatcggccaactaactgatatctgcccgtcatcctcccaactaacaacggccgcagcccgcaggcaggttgatcgatgagagtcgagagtcgtcgtacgtcttgttgattagtactccctccgtttcgaaatgcttgacgccgttgacttttttaaacatgtttgaccgttcgtcttattcaaaaaatttaagtaattattaattctttttctattatttgattcattattaaatatatttttatgtaggcatataattttacatattttataaaagtttttgaataagacgaacggtcaaacatgtgctagaaagtcaatggtgtcaaacatttcgaaatggagggagtatttttttctctttcaattcttctcttgtatggatggtttggtttgttggcggccacagcacagcgcagcttagcttagctacacaacacaccctttgaatgaagcaacaagctagtagaattgaagacacctccgaatccggccggctccaattccgattccaacccccacatccccatccgtgctctctctttgtttctttctagatactctctctcagagaggcagagtacaagtgtatatataaggttgctggagttggatgggtagtgcaataggccgctttatcatcatctatctcttcttcc

SEQ ID NO: 36118 - DNA, 1366 bp, Oryza sativa
cctttttggtttcaattgtagcctctgttatgttgcaagcttgctgagaaaggttcagacatgtggtctgtcttaccacttgttcaagctctgcttccaggtattaagtggaacatatacacttgtgctttatattttttactttttgatccaaatggccaaaaaaaatgtgaatagatagaacatttgttaccaaataatgtacatattcccccatgctcattcatatcttatcctatatataccaagtgatgacaggcctctgccaactggtgtaacataatgacacctttgtttttgtggattttctgggatttatcctttggcctctccgttggcatgggcctaaggctttgggatgattgtgattaactgcctgacttcacccattcgttgagttagagaaggggaattcctgcagttgcataagcgtacaacacagatggctttgttgactggtgtcactgatagtatgctttttctctctcgtgttcctgtagcacttcgtcctccacttagccctggttctactgaacagattgatggttgtcttagccaatggaatcatccaaatgttcataaagctctctctcaggtacctgaattggcactattttattagctttgtcatgcatcacggacatcacttaatattcctcaagttaactgtttctgcagattgctacaatgtcaatgtcatcatcagttcttcatcctcttctcagagcctgtgctggttatctttcatcctacctgtcatcacatgtttgttacataactctctcctacaaaaatatcccatttcttctgaaaattagtgatgtctcttattttcattgttaggcaaaagcagcctgtgttttgcttgacttatgcaggggaccattatcaccgtgggtacccatgatcacggcaaaggtctctttttatgatttttccccacacttatttctacaatccatatctttttcacaaccttgtatactctttaaacaggtagaccttgccattgaacttctggaggatctcctgggtattatccaggtatgtacaagttaaagaaaaaaaacttagcatggcataatttatgttaacctttgatgcatgtaatctggcatatttctatattgagtaagttgcccacgcattataagaacacttggctggctggagttttattttgcatgtcgctgaagatatgtgtggtatgtaatctggatcctcttggacaaaagtacacagcgaagtcagatctggatgcaccaccgtactctgctattggaatatcaatcaagtgatcaatcaactacctgtagtgctcttccctaagctcagcaattctattcctgttgtgtgtttctagtaa

SEQ ID NO: 36119 - DNA, 704 bp, Oryza sativa
ctaagtcaaacctcttttgtgaccaagcttataagaaaatatagcaacatttccacaaaataaatatactacaaaaatatatttaatggtgaatttaatgaaactaatttggtgctttagatgttagtacacttcactataaacttggtcaaacttgaagaggtttgactggacaaaactgaagtgacatataatatgaaaccgagggagtatttaggatttatgcgtttttcatatgggcatttatcttaattgctcctttcagtttctgaattctttgattccctccagacacaacctaggagatcacggagtccatcttctgttcagcctgcttgttttctggcatttcgatctgaaacagccgtactgctcttaaggaaagcacacagagacagagcccttggaattgtttgcctgaaagtaggttctttgatgtccttttcctttcttattgattacaaactcttcccctcagagggttttcatgacatgtatttattttgaaattaggcatcaaaggtcctgcaagaacttctggagcccgatccattgttagatgatgcttctgaccaagtactttgtacagactactctagtttgtttggagatgaatttaacttatcggagaattgctttgatgcctctattctgaacattttggatattgctgctgttgaagaaggcattcttatatactatat

SEQ ID NO: 36120 - DNA, 509 bp, Oryza sativa
tgacattgatatggaagcttatcaatatcactaaagacaatttcttttcgtaaattaagtaacgtgccaccagagacattaactggaataagaaccagcaaggcgacagtcatgatgggcaaaaatatcttgaggctgccaaagaaacaaaacaaaagggttagtgtgcaaaacatagaaactggttaaataaaatttgatcatttgtctcatggcacaaactcaaaacttttgctcacaggaaagtggggaaagggaaaaagaaaaggtccaaggcgctgcctgaggaactatggctgaaaaatcctcaaacttctagcacaagttagttagttagtttccccccacgtgatggtggagttatatatactttgttctgtacagtactataaataagagaatgacaagagtacaagtatcaaaatatgactagtacatcctgtataggtaaaactttttgagtaaatttcatgcaagttccaaagtggcaagaaaagcatctccagttg

SEQ ID NO: 36121 - DNA, 1796 bp, Oryza sativa
ggcatacaatggattatctctttttttatgtaggaatatcgtatctagtaaccaaaggagtaggtgattataataatgaagagaagcagaaaaagggtgggctgggatacgtgtgatcgttttccgtaggtgtcctaatcccaacagctcaagagtcgcactcattcattcgacgtgcatgcgtatgcgtatgcgtgtccatcctcttctcttcttcttcttggcgcagccacacactctcagctggtttgggaatgaaagaggaccttttgttgcggtcaagacttgccaattcttctcttggacacctggattgtactccacttatcaggcgaagcaagagttgacatattcagaagccacccacactagctagtagtagcagcttgttgttgcttttactctcaagggtttggtttggtttggtttgttgttgaacctgctgctttgcatgcttgcttctagataggctttgctattagtgtttgcgatacaaagagggagggaggttggtaagagggaaagccttgatgtttaagatgaccctatttatatcggtgatctttgtgtgagcgaaattgaattgcttgcacacttttgtactactaatacaagcactaggaggattggtggcgaaaagggaagtgattaaatattaaggtgtagtcactcatgtactagtggctctggtgatggcgaaaggtaccggccgccagccacccagccaggccatatatggttgagctgagtagaattgaccggccatatggtatagtacaagtatgtactatctccgttctaaaatccgtgcccaacatttgaccgtccgtcttatttgaaaaatttatgaaaaatttaaaaatatttagtcacacataaagtactagtcatgttttatcatctaatagcaataaaaatactaatcatataaaattttcaaataagacgaacggtcaaacgttaaacgtgaatagtgtaaaactgcacttattttgggacggagggagtagtgtagtactccctctgtcccatgatataaggaattttaagtttttacttgtattatttgaccacttgtcttattcaaaaaaaattgtgcaaatataaaaaacgaaaagttgtgcttaaaatactttggataataaagtaagtcacaaaaaaataaataataattccaaattttttttgaataagacgagtgatcagagagtgcaaacaaaaactcaaaatttcttatattatgggacggagggagtatattgatgagtagagtaacctccgtacttgtaaaggaaaatcgtttttgacagcgacatggtctccaaaacacaactttgacttcttatttctataaaaatatttattgaaagtgatatatgtatactttgatgaaagtatttttcaagacaaatctattcatataatttttatattttcaacctcaacaaactgagagttattcatgatttatatttgtaaggtttgacttaaattttgttctaaacgattttttttatgagtatagtgtagtactcggtaacatttgttgttgttgggtggtgcatgcaataactagtttgttcagctacttggaccagcgctactgccgtaccaatattactaatttgccattgcgttatcaatgagcggtgtactgctgtgccactagttgatcgaatcgatcagtgacgacacgcatatatgatagaatataataataaaaggatcggcatgatgcgaatcaagtgaattgcagattttgagtggaataataatacagtaatactaataaagaa

SEQ ID NO: 36122 - DNA, 557 bp, Oryza sativa
cctgccttgagcttgaggacgacgacttgctgcccccccgtgggccatgcctcgtgccagcttccaaagccgccgctgattctggatctccgacgctgctggcgtcaccacttccctcagcattctcctcataataatttcctcctgtgctagtacgctcgtcactcgtagtacgctctcgaggttgctgcagtattgtgggaaggttgcctgaaaatgatcttgtcgcagacccaccggcctcaacccctccacctcggctccttccttcctgctgtcccctaccgtcatccctttcacggtatctctccctagaccggctgcaaaaacacccgtcacatcacacacatggcaagggtaacaaacaggtcaagtgaagtttcatcagaagcagtatgaaaatttatttatggtgagacaatgaggcaaccgcctaccagcataacacacctgttagtattggctgaaaactcccgccttgatgaccgccccaactcaacttgatccaattctcgttgaagctctctctacaaaagcaatcagtatatgacatggca

SEQ ID NO: 36123 - DNA, 891 bp, Oryza sativa
tacattgtttgtgatttcgcatctcgcaaaacacaaaaaagaagggcaaacaacagaaagacggtggtgagacagttgcattttctcgaatctttttataaccatttgaatggcatttgaactttttgaagaaaggatagtgctcagagagacatctttcgtggaaaatgtggagtaggagacgcacgggtatctgagaaaatcaaagcaaggcatctgatacgagagaacaagaaaaacattgggtgaataaacatggagcaaaaacaagaatcatgcagcaaaaaagcaagcaagttgcatccatgacctggataaacagaaaaagaaccaaacttttttcatatgagatgctcactctggataatgacccgtctcggccacaaacaaccaatcacatatcacattcccaggaaatgatgttgatgatacatacatccatccacaatccacggattaataagcagatcgatatgcacatccccagcagtaaggcaagcaaacggaaaaaataagtactgatctacagccataaattccaacacaaatctagcatgaaagaggggttatatactacacaaaaacataaacagcacccaccatgaaacattaggattattctttaaacttctaacatcaaggggcggtgttaaaaaaaaacatcagctgggatggagaatcctagtgtgactgatgtcatcgattgtacaaagcagcttatgcaaattaccatattgaacgacctgaaacttcttacatatgctgcgcacaagaaatactcacagcattgttctgtaataattcgagttcattaaccggtaccaattttgatgcaaagagagctatggacattctccttaccataaccaggccttacaatttaagatggaa

SEQ ID NO: 36124 - DNA, 586 bp, Oryza sativa
attaattttatcactgtctgaacttcagttaggtgtaaatagggatctcatatatttaacgcagttcaccttcatttgctgcatcgtattatagcttaaaaaatgtttgaggtggtacaacacttcttagcgttggataggtatattttcaacacagactaacgtattcagcacctcgtggtgcttctaaggaatataggaatctctgtgttattatcgaacagatcatatacatacaaggtctcatgtataatcatttaaagaatttccaagagcaaagagactaggatgagcttgtcatttgtaaaagtgtaagattaggcaaagtactgtcaagagttaagaggggactcagttggatatagcgtaagaaagaagagcctaaaagagccagattgacctatgaggaatcgtttttgcattgaacaatagagaaacaacattgggttagtacattagtacggtataatcacagttaaggtttcacagcggggaaaataaaccagtaaccccacagaccgacaatatactgatacaagtttggaatgaatgcatttcaaaagaccgtttaattataaaaaaaaat

SEQ ID NO: 36125 - DNA, 3794 bp, Oryza sativa
ttgttttgcgtgagattaagacggaaattcgaggcgctgtaatgattttgtgcactgttcgtgtagaatttgagttagaaggccgctggactcttacatcacgcaggagaatttcattgctgaagctttgcattgtgcgttgcctttgcagttgtttagtttgtggtttgcattcttgtgtacttgtgttgtttggaaattggaaagttctagagtctagacatcttaagatgtcagatctctccactatgttaaatgcattttggttttgtggaagacaggtgcttgtaacaaaggtgaacactttaattacctagttgatgcgccgacactgtgaactctgtgtagaatcattgatgactaaattctaatgctgacaatgtgagcactagcacaactgttttgtatcttgtactcaccattctcgctaccttttgtggtgtagtttcgtcagagtggggccaggacacctcaatgtactttgcttggtgctttgactaaacctaacgatgaatatgaattaaaggtaaacttttttttatggtttttcattttgttcaaggcatatttgcattacacttgtgaattgtaagttgattacaatgggaaactatgtactgcagaagaatagcatgatatactaagtcggattactgattcgtaatgtgctaaattgaattatgcagaagctttctactaggtggcaaaagaaatttggcgaggagatagatcaagatcttttgtatttgatatcagtagacagaatcttgcacattgaagatttcaatgaggtaaaatacattattttcttctagttacttttggtttcttcatattctgcagtttgtcattttgggagttcttattctagtactgcagtgtttgttccgcattgattgcctcactttatctacttctatacaaacattccttactttatctaccgtattgggtgaaaaatgaacttattttgggacggaggaagtagaaggtgtctcattttcatgagaaaatgagatggaacttttagtgttcttcacacttcattctgttttgctaataataaggatataatagttaggtatgggttatttgtgcatgattttttgcatagtgtgagacagtaacaagatatgtagacaagagatgtgggttgaatttctttttactcgctgaagattgctgtgcagaacggtatcaaatagttatccatgacgctgaatggtgatcagtaaactagctgacgaaaatagcctcttaacgtgaaaatgtacattaaaagcatggagcaagataacttttacattctatcctaagaatattttcagttggaacatccatttcattaccttggctgtattggtctagttatcatttctgtgtttcaggtgtagtgcaccccttgaaagtgtctggccttctttttttgttataactggttttgccttctttcatattcggaagaagacctatttattgtttacattattcagattttgtttggctgacctgtattttacgaggataaatatatggagatcacttttagtagaatgtctttctcaatttcctttcatggatagcttcctgactttagaaaaaaaaacatcaagatattttagcacttaataaaatcatcaatttatcaattttcccccacacctatatttagtttattccccactcattgaatcacttccacacgaccaaattactacggaaatgaattgatataggttgctaattgaaccttgagcagctgctgaaatttgttcaaccaacatattaggtgctttaaatgttgtcaagtttcatctgttgcatttgatgtacttagttctatgtgagttgtgcagtttttattttctgatggatgtgtgctggtgagccaattacaccttagaactttgtagttcaaatgagactgatattcatgggatactttttctgttcaggatggcatgtgggtaattccatcagaatacagtgatgcagaacctgaccctcttcgaaattttgcggaaagcattgttgaggaaatgaacagcaaacatgctgaagatgtacataggatatacagtatttatgttgaatcagatttccaggtactgaagttattcctgtcattcctacaactttgcttcttacttcttgaaaggaaaaatagctaatgttaagataaagcacatgtttgtcttttcatagtttctttataatcacacagctgtagagattttttttttttgatgggaacatagctatagagaattaccaaaacagaaagatgtaatttactgatagtctgatagtggtatagtgattatgtgttatatatatgagttaggggcatatcaaactatgcatctttttattctttatttgaagaaaagtaattaaaaaattgttgatcttatcttttctaaaagatactccagctgattaatattttatgtgctatgtgataattcatagatagtgagatattatataccgcaccaagtgttgagttccgttatgtttactgaatgtgctaacagtgttcttttatggtgacaggcgacagaggtgaagatgatttgggtagacaggttgggttttgacttgcatgttcattccggggaaagtacctttgctgcccggatccctttcacgagagaggtctctgatgagaagggagtgaaatcatcattcaacatgatgtctcatcatgcgtgggaagtagagaagagttatgcggccccagagtttgagaaggtagagctcttgaagaaagtcagataggtactgtgatttctatggtgccgccttaccctgcatccgttgtcagtattttgtcattcatacgagtatagcgcaacttttgtcgcattaaatgtattgtgtgtacctccattttttgccatatgtgctataggttagtcgttcttttgtggagagctatgaatctagactgtaaggttggaactttagctgtggcttcttcatgagatgagattgagataattaaatcatgtttatacgatcttcagttgtaacatgcaacgttctacgtagtcagaattgcagtggagtactggctttatgccccaagtatagagcacttttgatgtaactaggaagatagcccgcgcacatgcgcgggcatcttatctgatgttgttttaaattgtgttaagaatgttttatgtgggtgacttttcttaaaattattctttgacactattgtaaacgtgttttttcactaatttgttttggattgctttgaattttggttatgattttcttatatttacccttggaagtttaaattctaaattaaaattaattggaactacgctgttttgaaactatgagaaaatatgttgtcataataatggagtttgttcttataaaactatcgtttgtactatgtgtatttactttttaatatttagcatatcttatctttttttagagttttttttatgtttctatgctttaagtaacaaaattgcttttataccatatatatttatgaatgttaggatatattaagtgaatatattttctattaaacaatatggctaataggaatgtttcatctaattaaaaaaacttctattaatttacttctactctcttctctttttttttcatatgttttcttattttctttgaaaaataaaattgatttgaaagaatagcacaatcatataaatttaattagtatgtgtaaagcgtttataaaggtttaagtgccatgggctaaattgcagttttgttcgatcaattctttttatcaagtatgttttact

SEQ ID NO: 36126 - DNA, 835 bp, Oryza sativa
  unsure (1)..(835): unsure at all n locations
ccggaggcggcgaggnagatggcgtgggagcagctgcacgacgactgacgagccgccctccgtgcgttcggcatgggcctcatcatgggtggcgacctcctctgcaccgagctggagtaagccatcccgcgggtggtgtacgaccatagccccggtggcggtgncggtggcgatggcgcgggagagaccgtcgcctccgtgccgcccgcctgctgccgcccaccgcccgcctgctgccgcgcgcaagagagagagaggaagagttagagagagaggaagatgagagagaggaggtgagagagattcggtggccggtgcgatgagatccacgccggcggccgctctccatggcctctagccttgagctccgccgcccacaccccttctgccctctctcactctctcgtataatcagaataggtgcctgactggtagggcccaccatttttattattgttatttccatgttggactgccacatcaatcaaactagtgccacgtgtgcgccacgtcaaaccaaaaccaccccggattgacttaggggggtaatttggccggtttgaaaattttggggtgtaaaataactggttttagagtctaagagggtaattcgaacgacccaaatagttcaggggggtaaaacgtacttttccttaaggaagataaataagtagagagaaggacagtgggctatagatttatagccagctgtagcacggactccaagacgcagtgtgtgtatgataggtgggaccaggtattaatagtgtagtatataactattgtataaatgagctattaaattggctatagataaattggagctagcgattgg

SEQ ID NO: 36127 - DNA, 745 bp, Oryza sativa
tatatgaaagttgttttaaaaaattatattaatcttttttttaaaaaatagttaatacttaattaatcatgcaataatacaagctttgatttgcgtgcccctcctcccgaacacagtcttagtatgaagttcccatataccatgcgtacttaatagaaagcaaagagagagaaaacatggcttgtacttcgtctattattttgttattatttagaggattaatatagtctctaaaacgtataacaatggtagtggtaaatatgattgatacattataggttatcccggtatatatggatcaatagtatggaccctatatataagcatacttatacgatgatataatctacatccattattttttttcatgatttgtcaaatctccaatgccatgcaaagtaccaagatttgtgaactgataaccgatatatagtgatataatttatattgtcatattttccataattttcatatccgtttgcattggattacatgaaaggaataaaaatgctatctaaaatataatttccctttacaagttgaaatatagtaaatatacataataaattattaatttaatggtaaataatataattatgtaaactttgttttaaaatgcggtaaagctaattgagttatgcttgtttgtaaagtgatttaaacaatttgctatatctgatagatgtttgtgttttttagactttctaggattttccctaatttattacagcatagttcatagaag

SEQ ID NO: 36128 - DNA, 509 bp, Oryza sativa
aaggaagatcgggaatcccataatcccgttgccatcaccgcctctctgcctttaccccaaggtcaatcctagagtgtgcaccaccgcggcctctgcctcttctccggtctcctcaggattgtcatgtagttcttcggagtctcaagtcatcgaggcaacaaggattttgcaagtattttttttgtgtttgtgtcatgttttggatcttgcaagttttgatgccaattttctgattgagttgtgttctttttgaagcccactgatttgtgctgctggggtttggagaggcagatggctgattatagaagaagagtcgggtcatttgtttcttgtagaaagagttagtctgaagtaaaatgttttgggttaataaccatagatatattactgttaatacacattttgcttcctgttgcaaccgagcatcattttagtttttatttttttaactgggtttttcacacctgtaattgtgatgggtcacaagttattcttcactcttattcttt

SEQ ID NO: 36129 - DNA, 1814 bp, Oryza sativa
taaaagaagacaggtaaatataataaggtaatactgggaagggtatatcatcttactttacatttgatagaacggacttagagagttcttaatggcccatctgtcacatctcgttatctgtggacttccaaatcagttgcagttgaacaatatgaagaaatgaagtatttgcctgcaccatatgaagtattcgagaccaaagaacaattcagctttagtttacacaagcagagctttaaatcacaacatatagtgcaaaatagagtaaatatgagataataataaggattcaaagagtaacatgagtgcacctcgaccatgcatttcatcaaacagttggtgtgctgcccatgggcacaacaaggaaccaccatgatagctgatctggaagacatcctcatcgtaatggaaggataccatccgcaacatgcagtcgctacagccgctgaaggcctaggtgcaaacatgaggctttcctgcgtggcttcagcgatggtgacatggaattctacatatctatcgaacccaacttttaaaacaatctatgcacttgtgtaatcacttgaacaccatgtggattagtttaatgataacaaaatgaaacacgatatataatcttatgattatacctagctgttaagtttgtattcttattggtccctgaaagataaattttcagctcctgcacttgaatcttgcatcatttatataggtaaaacaaattgacagctgcatttataatttcatttaggatttatcatgtaaattcagggtgaaagtgaaacaatacctcagaggtactgtcattgtgtgcaaggatcaaaaacaaaaatggccaactgataaaattatgaaatttgggatctggggcaatgacttttgttgttgattaagtacccaggatatcaatgatttacatatagattgatcttttcattttgtataatttccaaagcataatcaaacattttatcaaatttttaatttttgatatctattggaattgcattctaacatgtatcaatcaagcaaatttgccacaagtcaaaatcaatggtgcaataaacataccatttgagcgcacagctatttctcttatgcgccgaaccagtctagttatagagaaaacactttcgtctcaagatttccttccagataaagaatagaactgaaatgttgcaatggtacaatttacttgtgtttggggagtcaatcaaccaaagaattttaaaaaggaactgcacaaagctaaaaccttaaaacattattgccatgtcacttatatacaaattgacaactgcgaaagatagaccaatatatttagcttctaactacaagggtaatacagtagaacagtgatataatcacaaatgagaggtagagtaaattcaagtcgatagattgacacaagagaaaaaggcatctgccaatccccactcatgtagagctaaaggaatataccaaactctaccccaaggaaaccagtaacaagcatatcaagtataattataacagacgctttactcaccaacaaatcaattgcaacagagctatgaagttgaaccattgtaactaagaatctaatccaacatacaaagtctgaggttgtcacgctcaaacatcaggaaatgaccctttactacgtttacgcgatagctcgtctgcagaggcaacagagggctcaccaagtcttgacgtgcttgagcgcgaggctgccggcctgccgagccggtccgggtagatgcagacgcggtgccactgcacggagcagcgttcagcgtactggtgcggctcctcgcagtccagcgggcggc

SEQ ID NO: 36130 - DNA, 1558 bp, Oryza sativa
aaatgtatttttctaattttttttatcaggcctacttctgtaaatattttcgccggtacaatatttctgtaaatatttaaaaaataaaaatttaaaaatgaaaaaaaatcgaaaatgttatatacccgtaccataatagcgaaccaaaatagcactcctaaacagggaccggattgcaggagcccattgaatgggccgtacaacatatagtgatttatcagtgggccgttgcccaagcccaactaggcaccgcagatccgacggccactaacgcgcatcatctcaccatccccagcatccacaggggccgtcggggggtcggccgccccggacggcgccgccgcccaccgccgatcgccgttggtagtggtatggtgtggcagcagcggcggagattggcctcgtcctcgcacgccggagtcgccgagttcatcctgccgcggcccgcgggccctcgctcgggtgctcgggtcgggggaatcctctaaaccgtacggcgtcgtgtccgcgagggccgccgtaccagatgctgctcaagtagcccggcgtgcatctcgttagagatctatacgaaggggaggacatgaacagcttccagcagaggctcgcggggaggttcagagatccgaccacaccacattggtcatccctaagaaagcgtggaggcgtcgagctactagattttctgataatggcaattttattaggttcttaatttctccgtgtttcgagttcatacatggaaatgcaaaccatttttttgatgcattgatagggaacaagaagtcgatataatgtcgtcatgctaactcctggaatcaaaaccaaatggtgaaatggagaatcatagtcgtttccatgttcatagtagcatattgtcataactcataaattctgacaagtatttgtgtaggtctatatgttttatgcttcagagctgtggcatgctcattgacttatggatctatggataactattttaggtcagcacctagctgatgcttccagactgtgccgaagaaggtaattcctgtaattgattggcaaattatcaagacatcactgataatgcatccagacaaaatgaaaatcatgaagcatgtcattgaaagaaacattgtggatcatgatcgtagccattttccaattgctgttcaaattaaaggtttcaattaaacttttttttttgaaagatccagcaagagcgctggcattatattataagcaggagaaaaataaatacaaagtttatgtacatagacaaatggccacctcgacgggtgccaataggaaggtctaaattaaactcggatgatagttaagtaggatactaggattgaacctctcctaacatgtcaatgaaagaaacatgaacccaaaaccaattcatgcattctaatttcgaaataacacgtaagcaaatgaggatcaagcttaaaatatatggatacaactttggcagacaatatccatttgctaaggggctgtttggtttccagggacttattccaaatccctgtcacatcggatgtttggacactaatttagagtattaaac

SEQ ID NO: 36131 - DNA, 2281 bp, Oryza sativa
tgagtgcagtgtttttatccatttctgtgcgtgtacgatgtcgctatgaagcttcctcgagagtaaaaatatggtattcgtgaggcgtatgtacaggaatctcaggaccgagctcgccatttttattggggtagtgctccgctcatgaatcattctgacattatcagcagagaaccacgtgcaaaccgaagagagaatccaccagcagaatcaatcacataatactactaaccagatcaatcgcaaaaaaactgaaacatgcaagtacggatgccctgactaatcatgaagtttttctaataacacttgcaagaaatttcctcgtaatcctttgtccctgcacaatactatggctctagttgtgtacagatagtgctgttactacccacaaacaattgctaagaaattagtatcagttagctgtttcaataatttttccgatggttcgtgcttatcgcaatggaatcttttcgttttccttttaaggagcacaccactctgtttatgtaggtgctacaacctgatcaagctggatgtgttcatgcgtgcggaaagaaaaaaagaaaaggaaagggaagttgttaactgtcaaagaaagcaccatgcatgttagaagattccaaattcctagctcaaatccagcctcacatgggcggtacacgtgggttgatcccccacgcatgtaatgcaaatattattggggcccggggcgttcgctcgtgtgcatctccaacaaatttgctgcaagtcgccaaacttatgagacagggaaatgtgcaaggcagcagcacagggcgtgtatatgctcttctcattccaccaattaaaaggattgatttgtaatgcgggtctgggaagtgggaactgaattgttcataggatacgttgtttggtttgagtacgtcgatgatcaaaactgtggtttggcaggctgatctagtgctgtaaactggtgttcagtttggtattgataaggagttcctcttctgccaagactggaggaagcgttcgatgcttgagctgaaaagggaatatattgtagttcagttccttgtgcagattgggaactgcagccatgccggctagttgcctccttcctcattctgcgacgtgctcaacgccgtgggcagagtaggtatcgtggttcgtggacgccgttgggctcaacgccgccgccgtagaatgtcgcgttgtggcggtcgcggaagtaggcgtacggccgtgcatcgtgtacggtcctggtctttgctgtctccgacaccttgatctagtacatactgaactctcattccggctcccggccggcggccggtggtggaactgtcaaccgcgtcgcccactcccgcacgccggcggcgtcgacgtgggatttctttctcctcgagcggtcgtgactcttcaatgagcatctccctcgtccgatctgaacggagagcgcccacgacacgccatcctctgggttgaggccacatgtgcgatcgatctgcgagtccgttactccacccgtttcatccttttaatgagttgttatgattttttttctaattaaacttcttttatgtttaatcaaatttatagaagaaattaacaatattttttgacacaaagcaagcatattatcaaaacatgtcagatgtaagttttagcaaaattaatttcatgctgtagatattattttttttataaatttagttaaattttaaaatgtttaactaagaaaaaaaatcaaaacgagtcaaaatatgaaacagaaggagtactacaaagtggtcggcaacggaaagaccgcgtttgcattagtgcaatttatttatcctcggtggaaccaaacgtaaaatcgaaccgatatgaaaatggtaccggtctcaaaaacactaacggagccatcattttgcttattcgcaaaataagcgaaacggtatatttgcaaacgaaaagtaacttgtaaatacaaattatatatatatatatatatatatatatatatatatatatatatatatatatatatatatatatatatatatatatatatatatatatattcttagcgatctacaaataaatgctgaaaaataaattcgataaaaaaaacctcaaaatcaacttcaaatttaaagttaaaaatttaaattttgactgataagcataagcataagtgaaaagattaggccctgaaaaaaggaccggaatgaagatgttagaattttttttattttaaaatttttattttttaatatgtacagaaatattatatcatccaaaatatttacaggaatgg

SEQ ID NO: 36132 - DNA, 1006 bp, Oryza sativa
ttgaacggtcaatattggacataaacaatacaaaagtgcacttattatgggatggagggagtaaatcataacaaaataaacaacaatctctgtgtcacactattattcatatttaataatattattactatatttatatagctgcacgatcatctgagtgccaaaggtcaactcggcatatttaatatcggacgacttctgtgatagtggctcaggtgtctggaatggttgtctttccaaggtctggttgcttctagctgatggaatttgcaaaaatgtctaagaaaattaggtcacaatgttgtacagattttgctctagaagtatacgactggactgactgcatggtaattctctatgagcaactcagcatgatggttacgctcgcggctaatcatcattgtggaaaaagaaacgccgaacttaattaatatgcattttctcatctagtatacccgattggaacgtacgatgcgaaaaatagagaaatcgattttgcacgattcaaatcatatagggtagttccgacgtcatttggaattaattagtgggtgaccccaacattaatgtttttctttttaagttcctagccatggcttgtcctttagggcggtcccaacccatgatatccataagcagtgtctatgataccatttcaataagacatcacaacataaactacactttacaacccatgatttcttaaagtgggccattaataaatacatcatctctcttctctaccaataatatttattcttcatctattatgaagacactattctctcccaatgcaaaacttgatagcgttgaagctatgtcatgcatgagacccagtttcttcctctcttcactctttctcttaattaatatagtgtcatataagttaaaagtcctacatagcaatataattaatgtcatacacaccatcctaggtggagggttaggactgcccttaatagtaatgacaaaatatgaaaagctaagactattttttgtgggttat

SEQ ID NO: 36133 - DNA, 2279 bp, Oryza sativa
tccattcattggaccggctggcagaatctattatattattaaatgaataggaaaaggagtctacacattcgttctcatggtctagaaattcttacattaatcgaagaaaaagaaaatgcagagtctatatagaaatacaatttagatatagctgaaattcgaaattaaaaaataagaaatattagaatagaagactagagtccatatagaaatacaatttagaaatagttaaaattcagaattaaaaaataagaaatattagaagaggagactagagtccatatagaaatacaatttagaaatagttaaaattcggaattaaaaaataaggaatattagaagaggatattagagtccatatagaaatacaattaggaaataactgaaattcggaattaaaaataaggaatattagaagtagagtatagagtccatatagaaatacaattagaaaataatagaaattcagaattaaaaataaggaatattagaagtagagtatagagtccatatagaaatacaattaagaaaaaaatagaaattcggaattaaaaaaataaggaatattagaagtagagtatagagtccatataggaatttaaaactaactaaaattcggaataaacataataaaattaaaggtagagttttgagtctgtataaaaatataatttacaaataactaaaattcgaaattaagaaaaacacgggaagaagagtttaaagtcaacataggaatacaatttagaagtaactgaaattcgaaattaaaaattaaagaatattgaaagatgagtttagagtccacataaaaatacaatttgaaataataaaaattcagaaataaaaataaataatattggaagaagagcctagagtctatatagaaatacaatttacagaaaattcggaatataatttacaaataactaaaatttgatattaaaaataattaataactaacacgtatataaaatacaatatgaatattacacatttgtagtttcgtaaagttattgcaaaatttaaaattatgatgttattttaatatatttgaataatataatgagaaagcatatatgctattatatgagagaaaatataatgatgctagccgcgcaatctgcgcgggccaccatgctaattgtattaaaacgtttaaccaagatgttctgtacggacaaaatgtgatcgaacacgagctgaattcagagagagctttaaaaaactagtgcagtactgtactagtgtgttccgttgggactgcataaggtactcgtggttagctagttatagctgtttgacacggcaatgttcatgccttcattcacccacaaatttcttgactggaatagtggaatgcatggtctttatttttactttctgatgagcacttcatctggattaaccttgtatgaataatcagcttgacagctttgcagtagctgagtcaaatgccaatccgtgttaattagctcacgttctgagctttaccgaggaattcaaacttacatgtttaaacttttggaacttgcgaagattattattgtggtgggcacacctaacttcagatgcaactccgcaattacgcttgtaacagaattcagaattgagaaagaagagagaaagatgagtttggtgatgcagtccaggtcttggcggcaaattaaacgatttgaccggttatcagtggggcgaaatggctaggtgtgtgcattttgtttggctgactgggcccatccaatattccaatgattcagttaatgcctttctctgcacactacttaacgcattctacgcttttaattgttgcaccgcctgttcataggtgagaacagcagatgccactacgagaacatgtcttcaatgcaactactcccccgtcacaaactactaattgccaatagtcaaattaagttttgatagtttgactaaaagatttccaaaattataagaaatcatagtgcctaaacttgataaatagtagtagaagggatcagctgaactagatgaactcccaagatcggtcaaatggtcaacacacacgcatgtcttaggctggtagcctggggcgttctctctctcaaaaaaaaaaaagagagaaggtattgagctgaacctcaaaagctaatttttgcagcacatatagatatagaacgaccactatcatgcatgactcatgcgtgcaaagagttctagttacacctaccatttgttcctgaatcctgcatattttgtcaacacaaacatcacgagtagtgagtaccatgttctaacca

SEQ ID NO: 36134 - DNA, 711 bp, Oryza sativa
aaaaatgtgatcatgtgacattggtttgaaattgataaatgtgttgagttgtgtgtgtggtgatacattatgacttattgttaagtatggcaataagagattgattatgatggaattatgaagaagttaataatgaaacttaaaacttgtctttgttaattgaagcatcaactcctttacaaaagaattgcgaaacaaaacttgctttatgctgaaattgaactacatatttccttcctttgaatatatgccttacatgtagtatggtaggattgacttgtgcttgctagtacattaacttgtttaatgtactgactcttgctgttgatataaccttttgtttgcaggtttagacttagtctttgagtgatgcgggtttcgattgcttcttctaggatgagaacttaatggggtaaacccttagtcggtgtgcttgtgattgggtagtcaagcttccgctgttctctaataagtctatttggccggtcggcctatctaattattaagttgttgtatgtcttaagtttctttcatcttagttgtgtttgctatgtataatcatgcttaagatgaaagtgttaatctagtgcacatcatcctgggaactagatttacatgagtatgagttaggaatatttgagaggttgtagatctttagtcatttttgtcaagtcttctgaatgtgtaacacatctggtcgccgccttcgag

SEQ ID NO: 36135 - DNA, 651 bp, Oryza sativa
ttcctcctcctcctcgtgatgcgtaatttctatctcgatcacaagtaaagagaagaaaacaaaaaaaaaatcttcaggttgcaaccatgttcaggctacaaaaggcatcttttttttctttcacttccccaagcaaagtggcgatcctttggtttttagatgcggccgaggttccaaagttccaacaggtttgttagttacccttgaccggccatttcaccgtgggagtagctatatttatagcgccatatttttcactaaaaaatagtcggtatgtttttacattgtaagtccttaaattacatatgtaattttagtgtatttacaatgtaagtctcaaaattacatatgtaagttctaaaattacgtatgtaaatcccaaaattacatactaattacatatctaagtggtgtgtaactaccgtgtaaatttgtataaaatatgaaaagtgacatattcgttgcaagaaaactgtcgattaagatatagcaattccgtatataaaaccaaccggaagatcgggtggatacggttgccgcagcgtttgcatgcgaacgaatccaatggacatgaaaaccgactgagattagtgaaaaatctgtcgccatctttatagcaattccgtttcacgatctaccctataattcacc

SEQ ID NO: 36136 - DNA, 1115 bp, Oryza sativa
attcaaggtagggaatgcagcaaataggtcataactaccttaacccaattttaaataccaatatagtttaagttcacatgcaactttgcaaacaaatattttcattcctcaaatcatgggattcaatgcgttcaaaggatgggaggagaaacttgccttgatcagataaatgttagcacctaatccacttcttcaccgattatgcaattatctagataaaggacacgatatgcaattaaataccgaaagagctgaaaatccaaaatgctctaaaatgcatgatttatgcacagtgggttggtactgatctaaaatgactttaggtgaaataattcctattttattttattccatttgggagttatgaattttagaagttttatcggtttatagtagtatagtcttaggtagtgttataaaatacttttgtaaagtgatttttattatattagacttcacaggggtgtggagatgtgttttctaagactaacacatttggtttcacaatttttggagttataatgattttcttatagattttacaagttacaacgtgttttaggcatatagtgttttatatgttcatgacttttgagttataggttcagaacatgctacttcctgtttaagttgaataaaaggaataatttggttaactaaaacatttttatttcacatgtttatggtctttactactatggttcatattttataaactagagatgctctaatctaaactagcaatatattatattaacctagaaattgtcatatgagctaagttcttctaagttttagtggatgaggatggaactatggcttcactggtcaatcaagtttttatttaggtttaattagacctaaagtgtatatatacttatacatgtttatgtattacttaaacaacactatgtgtttaaattcttatttcactaagttaaggttttgatctatgttctctacaaaaggtgccaaattttattttactatgttgaagataactatttgctggttctatggaaactttgttcatttcatttggactaaaaatgaattttctacaagttttacaaattaaaggctgctctatgttagtaaatccttatatgaatatt

SEQ ID NO: 36137 - DNA, 1734 bp, Oryza sativa
aatcaaagccactaactattcagcatattttttttatttttttagagaagggtatttttttacccggcctctacatccaaccggatatatacgaactattcagcataatattactaactaccaagatgttccatcttataatattcagcatggtccaaatttagtagttagctacattgtcatcatatgctcttagggtatataattttacgtctatctgctcatgttcaaaattatttcctgaaaagtatataactaactgttgttacctttggttcatgtacgaaagccagaggggacgttacctggtcatgttcaaaattaatgcctggacagtgctgaagacaagtcctgcgtgtgggcatcatggactgtaataaatgcctgcataaacaaattaattctcagtaggtgatttcgattttttgtcattaacgtgacaaactgaacagatgcttcagttagtagtatgtttctgtaggacacatgaatgtgaagctcgtggagaaaaaaataattgttttaatccaatttctgcacacacatatgttctgcaagcatttcgatcaagttcactcggaagtctagcatttgatgtattttatgcagaagcagatgaaaaatatataacctcaaaaggttgatgatcgatttgactaccactactgttagacttctgtccattcaaatggctgttttcagtaagagcgttgacctggttgcaatctagtactactaattcatgcaaacatcctaaataagcaccaaaatatcaatggttgggttattgacgtgggcatgttggtgtgtttctgttcggtgcatccaccatgcatttatcccatatgtacatataccaggaccacaaaaaaactaatatcctcctgaatagtgcttggcaaatgcaccagaaactgtaattgtagtcttgtaaaatatagtaaggccctatttgttcaggcttataagccaacttataagccgaaaagtctaagcctaaacaaacaagcaacttatttgtttggctttttttaaagccataagccactctaacactattaagccaaaagctagattggagaagcttttttggcttatgtgaggttgatgtatgactccaccactaaacttaggacattaaatctaccggcttataaatcatataagccaataagctgacttaaaagtctaagcctaaacaaagagggcctaacttagctgaggtgaatcgtagatccaaattttactcctagccattcggttagggcagcagagaccttgcagccaccttaacgcattttttgattaaacctaacttttaaggggaccatgcacgctaatatatgtcagtatgagattagtttttttaaatgaaaaatatattctttatgacaaagtaattggagaatattaaggacggcgggatgggcgctcgctcgctgcgtccacgtcggattttgctacagtagctacagtacgcgcggggtggaaattatgtgaaaaagccctccgatttttcgtaataatgtataggtccctagcgtcctgtgtttgaagaggaataatcgcggaaaggggcttttttgtgatatgtggaagaagaggggcttttccgcaaaacagcatccactaacgcataccccccaaagccctagctgccgcctctccctctcccgcccccctcccgcgccgccgccgcctgcgcctaccctcgcgccgccgccgcctccgcct

SEQ ID NO: 36138 - DNA, 2199 bp, Oryza sativa
tttttattttttttaccgcgtcacatataattccttttttttatcggaaagttttttttcgcctttttttaccgcgtcgatggagtcagattcttttcagctttttccttttcttttatcggacaaattttttttttgcccattttttttctcctgtttttttcggatcggactatttttttcttttttcgcccggtcgatttttttaccacgatatatataattcctttttctttggaataggacagttttctttttattttttttaaactctttttaccgcgtcgatgtagtcggattcgtttcgatttttttcctttttttgctttcttttttgtcggacagatttgttttttttccacccggtttttttccgcccaggtttttttatcggacttttctttttttttttttttgctccacgatacatataattcatttttctttggaataggacagttttctttttatttttttaaactctttttaccgcgtcgatgtagtcggattcgtttcggtattttttccttttttttccttttttttgtcggacatatttgttttttttccgcccggttttttttcgccaggtttttttatcggacttttctttttttttcgctcggtttttttctcccgttttttgacggacgacagaagcacctagagaagtgttttttttcttttctccaatccaatacagatcggatctcttccagggaaatcagattttttttctccagggaatcggactctttttttttcgctttttttattcattaaacggtttgtctctcggactttttttccctttttaagggatcgggtgtttttttgccagggacgggtgtttttttcgcccggtttttttttcactttttttttggatcggactttttttttcgtccggtttttttgatcggacaaacttggttttttctgcccggttttttttcacccggtttttttgacggacgatggaagcacctcttattttttaagtagtagtagattttattttttaaaatatttaaaaaatattataccggcaaaaatatttaaaaaataaacctgtcgcccaagtggagagtcgcaaggtgacgtggcacacggcgttgtgtgcacgttttgcgctgaggtcccttgccgccttctgtaagggcggcaagggggtgaaatgcattttttgccgcatgcaaaattcgcatgcccgctcagcggcctctagcgcctgctcacacgcatcatcctgccaccctcaggaagggttgcagggtctatttctgtaaatattttcaccggtatagtatttctgtaaatattaaaaaaattaaaaatgaacaaaattcggcgattctgcacggcggtgagagcgctggaggttcctttccaaacgccatggagcgcttccaaagtctcccgatcacgggagaattaacgaacactagtaatatgcccgtgctaacgcaatggtgataattgataatgcaaaaaccaaaaggtaatatttaagattcaggaataaaataacgatagagatatttgtattgttctcatgaatattattatactgttaataacttcccaaagttgaccatgaatagagttctacaatattttaacatttcaaaacacaatgtttagaagtaaaatatagatacaaatatcacctgcaagttctacaggtgctattttttcaatacatgcatcgcctggaaacattctgcagcttctactcctcactggtcaccttcctccttatagagcacctcaagaagccacatgaacttctctatcgaacgcatatcagtagaagcaccatattgaagacagtgtgtttgcctaccacgaggcacacgcttataaagacatattcatcacttagcagtagtaatttaactcccaaaatatttggcaaaatatcccggattctattaaagcaaaaatatgtatcaaagtaaatatataggcttttacatggctccaattttgttcatgtaaatgagttgaaaaaggtaaaatgaacatgaatattttgttaaatctgcagataaacttttcggatcatggaaatgcatgtgtcaaatttcatatgttcagatcaaatttcattataccctacgaatacacaggacgcgtaaatcatcaatattgcacactaccaacaactaggcaccacagaaagcagtccgaaaaaaa

SEQ ID NO: 36139 - DNA, 551 bp, Oryza sativa
caagtcactgagtcatgcctccatctcctccagaccgagtcgcccaactccacacatcactctggagctgaagaagtcgagggagaggtcctcagcctctccgtcatcctcaacctcgccgccggtcatagtgacgacgaccttcgccatctccgtttgagtcaaggtcacctccatctctttcgcgttcccatctctccacacaatgccgagcatttcctcttttgacctaaacccctctcgtgcagtgcatcgctgggaacgcaagccacgctgacaacgccctggagcacgcaccggagcgccgccacttcaaccatcgtcgtcgtccggccattctcgaccacctcagagcaagccactgcgccatcgtcatcgcctcatcctcctcttcaatacgcctcaagaaccccagccggagatgtgaaggacttggagaacacatcttttcttcaccggcgccgatctagaattgcctccgccgtcatcatcgattaccgctgcctcggtgagccattgttcgattccttgcgcatacaccatctccttga

SEQ ID NO: 36140 - DNA, 694 bp, Oryza sativa
attcctgcagccctatgtggaccagaagaattagtgtagattttactggtggtagatgtttatatctagattccattttctttgattgcacttaaaaataatgggtagactgctcatagaaattaaacaaagacgggctattagaaagctagattgaatttttaggaggcttaaatagaggaggaaaattctagaaaagttatatttaggcatgataaataatctagtatttgaataaattattttccatgttcacttatgagcagttaaatgtacttttggatgaagtatggctttagccgattaaaatttaatttgattccttttagttttatgctttgactgattaatttgtggtattaaacttagttattaacttgtaccaatattatagtgaattgcttgtgctaaacattgtctatctaatttttttccatggtttttaacttgcacataatattttagagaattaggattactttactttgtatatgtgttcccacttcataattgcacctaatattgttacagggattacattaaacttcttttgggctgagaagatgatatttgagtttaatattaagtccacatgttatcacccaagattaactataggtttgtttagtaattttaacccttttagtttatgctcatgagacctattatgaaaagcgagaccaaaatccaaatg

SEQ ID NO: 36141 - DNA, 3262 bp, Oryza sativa
cttttatatgggatgtaatgcgctccaaaatgatctgcatatggcctaccatgttttgctaccactgaccattgcacgcagcctaccagttatatcttttgctttgcataggcatatcatgtaatattactaaccatgatggctatctgctatattgctcagttcttctcgcactgatgaccaagctgctgataagcaacatgttgtgcctcatgaggttgatgtttcttagattgcagctgcctctgctaaaccaaatactcaggttaagcataaatacaccactttccagctaatttagtggtcgaatttttttagtgacactggcaacctaattattcccgttctataggtcaaagatatcctaccaactgaagccaaaaagaaaaggtataaaactacatattcaagctgagaacgaataagaaaatccctatttttgtactagcggtggaagcatgtcacattcattgttaaatagactgcaccatttcgctttcgctgctctcccgtttttggttcttctagattaaccaggtgttcctctttgctttagtgttgatccaggctctacaggcacacgcaagactaagcctcctgtaccgaaagggaactaaattgctcaccttagcttttgtgctgatgtgagtatcctgttctgttatatatctatgggcatggcattagtttcacctagattgctgatcactttaaattatttttcaggggaacaataccctacatcagcgatcccaccctatgtctacatatttccttaatcttactgttggcgatgcagcttgacatggcacatcgtatcagacaatcttttgtttacatgattgctggcaccactgtgtccatgcatgtgcatgtttggtcctctacctgctgctctttcgccctttagtgtcagtgtgctttccataccgtagcagagacttcctatgaaacgctgccatacgactgcacatcaccccatcttttgcttgtatgttatttattgtaaccatgactgtcaatgtccatatggtgctctgtcagtcctatgaactcgttcagcaaacccccttctgttatggatcatattaatgcactagcgttctatctgctgttgttctgttcatattacatgccttgcagctgctttggatatatctagcacttgtgatacactatcgtcattaaaagcttatgtttcatgtgctatgtgcctgtgcaggaatttgaaatttgtagcatttccatcctacccagctaatgtgataagtaggattttgtgccatcctttctgtcctaaagaaagggtgggcaaaatttgcagccaaaaatagcatacgcgttggatcgatctgcattttccacttctacagggcaagccagatgcaaatgacatgcaaatgaccatcgatgttctgtagaccacacgtgaatagtcaatgtattcaggaccacttaccagctctactgccactgctatgttaattagtgttgcaccttaagattattatcataggtactgcagcaccttacaaatatcagacatatgtatgttgttagcgctgcaatctacttatctattgccgtctgctttcattacttttcccccaccaacactttttaaccgttcttccctggctatcagcttattgggcggcacacgtgcgtacaggcggcacgccaagggtgcgccccaacctctagtagtgttaataggtgatttaccacacaactggtcaaactgtgcatttagagctagcaaatacttcttgtactcatttcctatttattgcttctccaaaattattttctagatcactacagaactgaatctcaacaagaaaaaacacaagttaccaaaacctaaatttgatgtatacatccaccatgatctgaatccatacttacatccaccatgcatgaccctacaaatgaacacaaattgaccatgcatgaccctgtgggatgaaaatataccctgcaaatttcccagtgaaagaaatgcgtctgtctaggaaaggtcaggaaaaaaacagaataaatattgctactggcatttgaattttaaatccatgcacacaataaaggaattttttttgaccgaacgaggcattcaacaggcacccaaatgaaccggtacgtcctatcgctaaacataaaccaaattaaccttatcctatcctatccaacagccacccaaagttctgtataatcccaacagcattcacatagtctcctctatcatcaatatcagtttgaagaaaacaggaaacatgtgtagactaatggcattttttttttcgctgggccggagactaatggcattttcatttggctgggcaacgaaaatcctaaatgatagagcagaactggacagtgaagcacgacttggtcatcaaacatcagtttcttatggccgcaaggtctcaactaatttgcaagctcaacaaacaaaagaatcaatatcctctcagtttatttttttgacatgtacttccacaattccatattacgctatctagcttgacaaaagattaggcctgcaatctaaatcagagaaacatattaagataataactttctttgccacactgcccacacattcgcataataatttattttctcacaggtttatgcacgtacacacataatagccatgacactgtaataatgaaggaacgggatcgagcgacgattaccttgttcgcgtcacggtggagagggctaaggtggcggcgcaacggagagcagatggcacgagggagtcgacggcggcgtcgcagtatagaagggggtgcgtgggtgagcagtcccggtggcggcgcgaggggccgggatcgacggcccgtgacaacgatctacattgtgtgggggcattggtggcgtaaatctggaggcgggaatcgacgacgatcctcgtgagggacgctggcggtgtcatctggaggcgggaatcgacgcgctggttggggcgtcggcgacatcgatctggaggcgggattcgacgatgatcggagtgagggtcgaggtggagagacgggaatcgacagcgacgcgagggggcgccggtggcgtcgatgtgaaggcgtgatggggcatcgatggcgtcaatctgaaggcgggagtcgacggcggctcgatggcagagcgtgggcggcgtcgcacgcgatggcggggcgtcgaaatcaacggcagcatgggataaaggaggaggtggtggcgacaattagggttcgccagggggagtgcggcggcgcttgtg

SEQ ID NO: 36142 - DNA, 654 bp, Oryza sativa
aatgtgatctagaggccataacgaagcctttacactacttagagcctagccttgcaccagcacgatacgtgttcctccatcctaggcatacttggaatatacctagaaccgttaagtggcgggcccacaccttaaacttaacgccgtggtggcggacacgacgggaacccaccacgtggcacaataccgttatattggacacgcttagtcacctaaactaccacgtcggggtaaataggaagctcctctgaattatacgaactcatacacaccggcctaccagaatgcaaggctattcctaaatagattaatcagcttaggccatcccatactagcacatgtggatgtacgaataactttaaatgggtaacacaagttctgtccttatggacttgggcaaacactccccctatcggtatgcaactaacaccatatgcacaccacttgccgcccaagtataaaatcacattttacatattttagttcgcaaatacccatcatattcattttattccagcaaaggttcacatatgaaaatcacattttaattatagatggaatgagcatttgcatatttctaagcatggctaagcaagtagttgcacatagagcatatataaaccaatttgagcacaaagagtgtactgtaaccat

SEQ ID NO: 36143 - DNA, 521 bp, Oryza sativa
gagaccgcgcggtatcgcgcgtgaacggtctcgctcaatcaatcagtgagaccgctcaagcaaacagcgataccgtgccttgtcgatttaattagcgtcaggataattaatcacttattattactaattaatttttaattaagtaattaattactaatcaaatggagcccatcggacagtgtcactggttgcttgagcgatccgcgagaccgcgctgtcgacgtttgatgtcgcaattccgatatttgcatagtatggggatcgttggtgctagggtatacgcgagactgaggtaaaagagatagagacgaagatttttatacaggttcgggcccctgaattgtcaggtaacaatcctacatcctgttggccaaagccggtcgttgatcttattcaccataatcacaccagtataatatttggggtagcctatctaactgttatcaacatggcgatctgaaggtctgactcgtagtcgataacagggtagtcttcctcctcgaatctgtgcccggcaagat

SEQ ID NO: 36144 - DNA, 748 bp, Oryza sativa
tatgtcatatactcaccttgcaatcattcatcagaggaagagttctgcagtgaagctgatggtgtggaggattaggtgtagccctggtcaagctgcctgtggagtggagccgtctgcgccgtttattttattttccgctgcttagatccttattgattgagaggaactatctacctctgtaataacattttttacgcttatagagtagtaattgtactctattatcaatttgttattgtgtgcctcggctgattcctggacgagggttcacacacatgtaagcgtttggaattttggatagaaattccgggcgtgacagccagccatggctagcggcgacggcgcgcgtgcgaacgcgttgccggcgacggcaaccggcggcagaggcgacggcgcaaaagcgacgcgaaagcggcggcagcggacggcggcaacgaccaaaggcgacggcaagcgcgggcggcggcgacgcacggggaatcggggaagtaaaggaaaggggagggagtcctcaccgaaggggacggcggcgaccggcgacgaggagcgacggagggaagtcgacacgcggctgacggcgaccgggacgacctaaagagcgaaaagaaagagattagagagaaagagaggggccataggaggcgggaatgccggccgaatgcggcggacatggcaaccctcaccgtcgcacgacgggaacggctcttcggcgacggacctcgactaaggaggggtggaccgggtggat

SEQ ID NO: 36145 - DNA, 672 bp, Oryza sativa
aagagcataaataccttgcaacccatgttcctgagctaggacctaatgcatttcacccatcaaatcccaactgactgacgaataaatctcaacagttttactaaaaccctggactgacttgttttgacagatctcactgaaacgagcgaccaagatttttccccttgaaccacaagaacagatcccaattttcccggaacaaatccaattgcaaagaacatatgcaatgaaaaggattcagagggctcttaggtttttccatttggcttgtcctacggtcaacctggctctgataccaacttgtcatgcccagaaattcccgaatggaattccaagcagaatgtgcattaaaatccccgtccaggaccggctggggtacacagacgacaatgttgacattcagatccacgtcttacaaacattataaaagtcttacataaatgcagcggaaagaaagagagacaacatgagctaagtcttaactagagctgcagcgggaacaccactccacaggcatccttgacggcacggacgaagcctactcctcgggtaaaccttcatctgacacatacccgtcctctggggttgggaaaaaaatagagcaagactgagtactacccactgtactcagcaagtcataccggaataggggcatgatgcagggaattatca

SEQ ID NO: 36146 - DNA, 669 bp, Oryza sativa
ccgcatcaaaggaactttccaaatgtgtaatatttaaatggatttcacaataatttaattaacttctgtaaaaatcaggcaaaaaatatctaattagaaatttgacaatatatatatgcaatctattttcaagtacaataaaaaaaaatataccatctattcagcttatcatccgtaccaataatttcaattttaaaactgccaaaaaaagccacattgttttttatataaccgtactaaaagtattgcaaaatagagttgaccgtacacagtattaaggaattacatcttatacatagaatggaaacgataccattaaaaagaatggaagacaattgttcaagtatagtaataatatggatggagtactaatccacgacacataggttcatggaaactccacggactctatattcctatataaattaatcttacaacaatgctgcaataaacaatctactcttcctttcttccggagacaccagtcaggtccctatcagttctctccatcatcttccatcacagtgcaacttatagatttatattgacaaacactcacatatgcagttgatactttatatattttgacatttgattcgcagttgatacttgcacaacaaaaatataggaaaacacgatgcagagtggaaatcaccctacggatgatgg

SEQ ID NO: 36147 - DNA, 566 bp, Oryza sativa
ttaccgtctatgcaatgcaagttcttggcaaatgcattgatcatctaaaagtttctcgtttatcagctggcgctatgattttataattttttatgctatatcaatataaaaggtcgtactatcttgttcggatcatttaaaaaaattgtcagctgtctgaaaacgttgactggaaatggttgggcaatcaaaggatacaacggcttcttatttatattatatatattgagtttcttcagctgctgtcggttatgaactcaacatccaaggccaactgatcaagaacgtcatgggtcgcactcatgcaaggggcacatttaaatcgttccaccattctgcaggcaccttcctaggattacctaatgatctggtaatcttaatctcgcagtaattctgaagaaacagtaaacatatccattctcactgacctgataaaagaatcctttctttcttaccaacagagaatcacagaacaaaagcaacaaacaaaaaaaaaagatgatgagaattgacatcaaaaaaggaaggaaaaaaaagagagaggaagaagaaatacaggtagagtg

SEQ ID NO: 36148 - DNA, 607 bp, Oryza sativa
cagcagtacgggtagcgtttctcgcttttcttttatgttttcttcttgcttttatttttttttagaaaaataactgcccgcacatcttcttccttttatttaggacacggaaaattaggattggtacggaaatttaactacaacaaacttttaaattcaggatttaaaactttcaacttatgtttgaaaacttgtaagccaagatttgaaactttcaactcaatattttttaaaattttcatctcagattttaaaattctcaagtgaagacctaaaaacttttaattcagatttgaaaactttcaactcggatttgaaaactttctgttcagtcttgaaaagtttcagttcggatttgaaagttttcaaatcaaaatttgaaacttttcaactaaaatctaaaaaaattcaagtcaatatttgaaaacttttaacttaaatttgtaaacttttgtctcaaaattcaaaatattcaatttaaatttgaatttcgtctcaaaattcaaaacactcaacttaaatttttttaaaaaaataactcaaattcaaaactctcaagtgaaattggtgaaagattcaatttattatattattaaaacatccatga

SEQ ID NO: 36149 - DNA, 674 bp, Oryza sativa
gccggagaaggaaaggagcggccggattgaaaggaaacagcggcggcggctcggcggcggcgcgctagggtttcggcccgaggaggacgacgggcctgacaggtgggacccacctgtcagcggctgcgaagcgcgcgcgcgcgcgggcggctgcggactgggccgacttgggccgggggaagagagagagaagggttttgggccgactttcggcccaaagccaaaagaagactttttaaaactttttcaatttaaattatttcttaaatgcaattccatttattaaaaatacttccttagctcaaataaatcccagaaaaatctaggaattatagaattaagcaaagtatttaatgaaattttatctggccctttttatattgtaatttattaattaaaattagattttcttttcaagacttttaaaataaattctagaaattccattgaaacaacaatttatattttttgaatttttagggtgtgacaaacctaccccccttaaacagaatctcgtcctcgagattcggaagaactggcaaacagatacggatgagctgacttcaattcatcttctcgttcccaagttgactcttcttccgagtgattactccactggactttgcagaaacggataactcgattcctggtccttctctcacttgtttccaaga

SEQ ID NO: 36150 - DNA, 572 bp, Oryza sativa
aaaaaaaaaactcgcctggttggcattggctagcgtcccctaagtgccttgaagatgccgacgaacacgctgacgatggacaagatgacgctgatggccttgatgtgcttgtagaggaacttgtagaccatggtccttgccggccggttccgccggtacgcctcgatctgctccaagacgacgaagtagcggctgcccaagctgagatgctggccgatgcgcttgaacaagtccagcgtctgcgtgttgctgaaggtgctgagcaccacgcgatgcccccgcagctgctgcacgtcctcctccctgtccatcagcatcgccagcgccgacaggtacgagctcaccacaaagtcgccgtagacgtacgacgccgctgctccgctgctcgtcgcctccagcgccgccatgttcaccagccagcaggcggtcacgtcgttcaggaacaccggcgacagcaggaactcgccgaagatgcgcttctccctgactagtctcatctcatcatctcatgtccgcgaaccacaccgccgtgctggccgtcaggttgacgccgatctgggccagctcgacgg

SEQ ID NO: 36151 - DNA, 542 bp, Oryza sativa
aaaataaacaatcttgaaagaagaattcatataaaaacccattacgagatttattaaaattcagaataaaaaataaaataatctcaaaaattattagataggaatacaatggtgaaattcaaaaataaaaaaatatttaaagaacattataaggtattaatcaaaatttgggggaaaaaatctgaaattataaaagaaaaaagatttcatttaggaatacaatttataaataactaaaattggtgataaaaactattgaaagaaacacatgacgagataaattaagtaataggcctataaaggagtagagtggtggcggttgatacgacatataaaaattgttaataaaacaccaaatataatcctaatgacgattaaaaggagggacgacacacaggccatgaagcaaacggacaaggtggttgccgggacttctagaaagtaaaaaaaaacctcattgataatcatattcgattttaaaatctcaatgataataaaaaggaaaagcagcgggcgggcgtataggagtaagttgtacagcc

SEQ ID NO: 36152 - DNA, 1278 bp, Oryza sativa
tttagaaggagatggcggcgcggctcggctagggtttcgggcggcggcggcgcgacgaagacgacgactccgacaagcgggacccacctgtcagcgacagcgagggcgcgcgcggctgtggcggacttgggccggcttgggccgaggagagagagaagggttttgggccgactttcggcccaaagccaaaagagacttttaaaaacctttttcaatttaaattattcatgaaatgcaattccatttattaaaaatacttccttagctcaaataaatcccagaaaaatctaggaattatagaattaagcaaagtatttaataaaattttatctgccccattttatattagaatttattaattaaaattagatcttctcttctaggcttttaaaatcatttctaaaaattccaattaaacaacaatttatagattttgattttttagggtgtgacacacaacataccggaaagaggccgtgacaggacccttcgcataaccccctctaaccaaacacaccacacctcaggtttcacccccactcctcgcaaggcagcgggcagtcccctctcgtgcctaggtgaatccggaagccgcataggccgtcgcagggcccatccaaactccgtcacgcccacccttgcctggatgcgtcagctagaggaaagctacactacaagtccagccgttgcccacgctagcttgtggtaagtacgataagttcttccagggcatcccgcgaaccggtccttaactgccatgggtgcgaccagcaaaaccatgcacccacagcccaccatgtgatttattttaattaaccaacaccaaagcggtggcactaatccaacaataccattagaaccagcagtctaaacattaatagaattttccccattgtgcactagttgaactaagcatggctaagcaatccctagtccaatctttagtcatgttataaccccaagctgacaaagggacatggtacaacaatagcatggctatgacaataggtaaacatcccatagtaacattataaaacaatgcaatatttgaagaaaaacaatagagcatttgcaatataggatcaacatgttcaagtgacaagcatgacttgccttgctctgctgctggaggaacctcggtgactattttgaagtacaccggagcgtcgtatgaaccggaatctagcgacatacaaggcaaacattgcaaacaggctataagactactgaaacgaggaacaaaaccatttttaatggattctacacatttttcttgat

SEQ ID NO: 36153 - DNA, 601 bp, Oryza sativa
atacatctaaagtttatagacctgaagtttatagacccaaagtttataagtcaaaagtttacatacccgattcaaatttgaatttaaattatatcaggattcaaatttgaatttgaattcaaatattttctatatatagtatttttatgcatctaaagtttatacacttaaagtttatagacccaaagtttataagtcaaaagtttacatacccgattcaaatttgaatttgaattatatccattcaaatttgaatttgaattcaaatattttctatatatggtatttctatgcatctaaagtttatacacctaaagtttatagacccaaagtttataagtcaaaagtttacatacccgattcaaatttgaatttaaattcaaatattagtttatagacccaaagtttataggtcaaaagtttacatacccatttcaaatttgaatttgaatttgaatttgaatttaaatattagtttatagacccaaagtttataagtaaaaaatttacatacccatttgaaatttgaattttaatttaaatttgtatggtgtagtagtaagagaagaaggggaggtaaattagtaagggggaggggcgg

SEQ ID NO: 36154 - DNA, 943 bp, Oryza sativa
ctagtccataatttggcagaattaagtgacaaggcctattgcgagagcagcgatccaccagtggctgtaatcaacatactttaaggctctgttcgaaagtgagggatgaaaacctcacttcctagcatgcaaaacacaacaacatttaggtattatcaattaaatattttaaaataaatttaaaaaatcgattgattaatatgattttaaaaataatttttatatagaattcttttaaaaaaattatatcgtttagcagtttataaacgagagatgttggttggaaaagtgaagataaatactcagccgtgaagcctgttacaaatatgtaagccgaaaaatgctcttctggagttcatccgtttcaagccgagaaaaatgaacgaataaacattggttaattgaacccaccgagttagtgactcgatcaattttacggaccgccaaagctccggacaggtagcagcaacctgagctgtcgatgagacatgaacagggaacaagctaggcaccgcacaacacacaagaagcagagcacaacgattcggccggtaaatttaatttctattagaaattacttcacatacgcctagttagcatcatggattcatggtttccccaaaccaagccaagaacacaaacgaactgtacattcacaacgcggatcaacgcctataactaggaacttagggaggcccggagttgcgaacttgcgattcccaggaagaatcacttggatcaatcaatgaaatatgagcagagaacaaagctagtcacaactagaagcagagcacaacgacgattgaacacaaccggatcgaaaagcgcttcaactaaactatgtgttcacaaatccaacggaaattcaatttctagccatcatcacttcacatgcgtctgagccagttagcatatcatagtttccccccaaaattaagccaag

SEQ ID NO: 36155 - DNA, 819 bp, Oryza sativa
tgctttctagcatgtcgggccgtcgtgccttaggccggcctgataaagcacaacccaagtcccagctcccctcgcctgcacgccgccgtcgccgaggcccggagcggtggcgtcgaatgggaggagcgggtggcggcggagctcctcggcaaggaggtgtcggtggaggtagggatggcaatgggtcgggtcgggcacgggtagagcaaaaccatgcccgacctgatgcctaatattgcctgtccaaaccctacccactagagttagcgtgcaaaactccgtgcccgtacccatgcccggtgggcgcgggtatgtccggcgggtacccaatggatctcatataaataataacttaaaatatatataattaaagaaagaaaaataaaatcaataatttacgaaattattggttcaccaacaataattcgaattacatcacaacttagtatcagttagcattacaaatgaaccaatagaaagggtataagaattaagaaatgagtcataattagctaatacatatgtatcgagatcgggcataggttacccatgggtaaaaaatgaaacccgcctagttgcccatgacgtcttcgggtatagggtgggagtacccatgagtgaaaagtcacactcacacccatgcccatacgggtcgggtatctgtgaatacctggacccatgggtaaaattgtcatccctaggtggaggaggacggataacctctttgaatttgctcgatgcgggatgcggcgaggcccaagaagagcgtagcggaggagaagtcgaagggggagaggaccgggtaagaggcgaaggtgt

SEQ ID NO: 36156 - DNA, 923 bp, Oryza sativa
gtctgaccaagtcagacggcttatgggctgattcagaaatatctgaacatataaacaatgtttagatcatttgtttattagcaatttttatacgtagaaaacatttatgccatgagtattatgcacaaatgccaaaatatgattatccatgatactcttatcgctgtatcgcatggatgggtgaagacagaaccatatttcctcatcaaactttttgattgaactttgaaccatccaatgtacagttatacatcaaaatgtgtttggctcaagcgcaatgtaatttgatttatcttttgaacttattggaacagtcgcaacaagctgtgttttctgaatatcatttttgtgtctcatttttgtgccgtaataatatatgctgatttgattaaatagcacattaccgctaaggaattatttgctctatgttaacaggtcctggcaaaatcttctaagatgattccaggtgagttgcattgatctatgcatgctatgtaatgtaccttacagaacattatctacatctgaatagttcttctgatcattaatttgagcttgggtgggtatactcatctgagcagtttctgtgtaaaaaaaaaagtacactggaaaattggattttggtttggcaccacaatattggctgctttagctgttagtacgacaatacttgcattttttttgtcaaaaccatatcaatttcatgacaagagcatttccattagtgctgatatttggtggtcagagtggtgtaggtaatagagcaatcagtgttaagaataacttttaacagtagccctttcatgtttcatagtctgtatagtgatgtgcgcatatctctgaccaatgatttaatatgtacagtaatgctgatgggaactatactgtatggtgtcaagtacacatttccggagtacatttgc

SEQ ID NO: 36157 - DNA, 543 bp, Oryza sativa
cccccaccaagagatgcttcatcaggaaggtttggaaattccgtgaatgaaccgcagaaagtttatagcctgcatcagcatatggtcactgggcacaaatcaggttggttcgctttatagtcaatcagtggcggacgtggaaataaaaacaagatagaagtctagagggatgaaaacagatcagattcggatggatagttgtcatacgatattctatactatattttctaagtggattcgaagccagtgcggatgcggacggattatttctgattcgtatcctaaaccacaataccggatatctcgaccaccaactattaaaaccggtacaatttgactctctttacggttttaaagggcggtttcgatgacgtggcgtctacgtggcggttttgacatggtctttgttccgcgtggcattagaattttaaaatggaaaaactatgaattacaccactgaacaataacggtcgtccgaattaccccccgaaccacaaaaccggacattcttcaccccctaactatacaaaccggacgaattac

SEQ ID NO: 36158 - DNA, 548 bp, Oryza sativa
tttgagcccaacaaagaaaagattattcattggatgacagatggcatcatatactccgtgacatatgctaagtttgctgccattttggggtttccgactcgctctcgcaccaatcgtgtcaagattcatgatgagaagcccatggacacaaattctcttcacttcttgtaccaagatgtggactatgagttaggcaccatcaaaggtctccttcccttctatgcctatctcaacaagctcttgcgcaaaactctcaatcccaaggaaggtgatgctagcaacgtccttgcctatacaagaaatttgctttacaagatgaaggctcacccacagctctttgacgcctttgacttcatctttgaagaaatccggcttatctccatgatgcctaagcgaggacttggctatgggccttacattatgaagatgattgagattgtgtccaagaagaagtttcacaaggaggtggcacataccgattaccaagttcgtcccatcaaggttgctgctgtgccggctggacgaaccactcgtgcttcttctcgtgc

SEQ ID NO: 36159 - DNA, 568 bp, Oryza sativa
ttatctctttctctggtaggtctggggtggacagccaggtgcttgggcgctgcaaacggtaccacggccgagggggatcacggtggccggccgacgactcctcttcgcgtgcgcggctagctgggaaatcatctcctgcgcggcgccagttggcgagctccttccccgccgcgtggccggccgacgacacctctccccgggcgtgaccggcaatcgagctgctccccccacgcatggttggccaacaactatctccccgtgcacggctggccagcgagctcctctcccgcgcgtggccggccgggacctcctcctcagcacacggccggtcggcgagctcccccccctccccacccccgtgtggccggcgggcgagcaactccgccgcgcgcaaccggtcaacgactcctctccatatgcacggccggccgggagcttctctccccgcgcggtgctggatggcaagctccttccctgcgcatggccagccgacgactcttctccccacgcacgactcgctgggagctccttcatgtgtgcgaacgtacggttgcgatctcctcctcat

SEQ ID NO: 36160 - DNA, 681 bp, Oryza sativa
acatgatagatgtattatgtgaattaggcatggttaatccaaagcaggttattggtcacaagtcataaccagttattttcaaacaagtgcatgcatcaaggagcacaccaaacacagcttgtagtttgcagcagatagaagtgattgtaactgtgttggaaaatgatagtgcttcaaagtgagttggtggcggatcagatggtgttagaaaagaaaaggatacaacagactacgatggattaaacaactgaagtctttcaactgtatgtgcattgcacaacttgagaagaataaataataaatgtcagttactaaacccacagatcagttccttctttctttttatttttatgtgtaatatgaacgcaccaataatatgttttgacaacataatcaaaacccaccaataatatgtgaaaacaatgccagaatttttagatcctcatgtctcagtaggagcaggaggatgtacttgtatttttggatattgcagaatcatcagttaaatttaattatgtgttaaatctcaattattgtttagatgtatcaactacaatattaaactgcaaatcaaaattttcagaaaactatttcaatattgcatgactttcagttcgttatgaacttcatatacaaaaaacctattcagctctcctctcaaattatgattgcaatatcaat

SEQ ID NO: 36161 - DNA, 1468 bp, Oryza sativa
aatcgtgtcaaactctaaaacttattatattttggaacgaaaggagtatatactttcttaataaccgtatccaaccctaaaacttcttatattataggacagatggatatgcggatccgtatgctagagggtggtacggtagaggatttgtttcctgttggcagaagataagccaaggtcacaacatcattgatatacagcagactgatatggaggtcacaattgctgatggatgaaaagacatgtgtatgctgtgatcatattgttccagattgcaatgttgacgattgatatacaacaaagggatatacatagctcgacaatcaatcaacaaaggaattcgcacattcagatgtagtaaggccttctcatgcaactttgatgtaatggaatatattgccatttcattacctaattatgaatctgagtgaacaacaaatagaaacaaaactcgtgtgactggcaatatacagcagtaaataatccttgagtttgaatattcgccatgcaaatccatgatgcaattccagatgtcaaaatttagaagggaaaaagaagtgcctcatcatcgggggcaaataaagcatctagatcttgccagctaacagaaccaaagcaagtatacaacttacagaaaaagtattccacgttaagccgcagcaaacacatactatgaacaaaatccctcttgcaacaaccttcagaaaaaaagcacagttgtcacttaggggcataggctagctagcctgaaaacttgacgaactcaaggcgcagtcgcgcagacagcagaagtaacagccatgggctaatcaagtactcacagttccacccaactttccagcttgtcatcggccaagatgacggggcacggtaccatagaagtatgagggtgctaaaagggcttcagaaactctcactcgttccattaggattctccacttgaggtgctaaaccagggcttcacagaactcacaaaggtaaacatctcaagatggtgctgtcgacaaacttatcaccaggttggtcgtctgactagtaagtttctaggaaaaaaaatatgtacatatcaccagctgaccaccatacgatcaaggttgggacaaaggtcgggacaggatgaggagtagcacctccagaacttgctccctgctggtgatgccgtagggggagacgtgcttgatttcgttggggtcaagtggagtagcatcacgctcacatcttctgcagtggagtgcgaaacgggacagggtggaccagttcttgatccatgtccagagtgtctcgtccagtggtgtggtgtcctcggttgacatggcctcagaaatgaactccagaactggccttatccgtgccgcctcacagaaaaggattatcaactgtgtcaacgccttcctttgtctcttcatcattgcactcctcaagtccgcctccgcatcataattgagcagcacaaagtaagagtggcgta

SEQ ID NO: 36162 - DNA, 670 bp, Oryza sativa
ttgtcatttgatgttatcgcatttttctaagaggggttatcataccttttccctatatttcactaacaataacatatgcatgtacatgcactgtctgttgggcctaaaatgtgctaaaaaaattgggatatggcatttcttattgtacagttgcataaagtgaaaatagaaaaaaattgtgaaaaaattagcacaacacctcttcacaaggtaaatgttcccctactctgtttcaagcttaagatgtattttcgttacctatttaggtattcaccctcttgagatgagttctaaaatttgtttgtatattttttccttcgatgttacacatgatgccaatatagtatatatatgtaatcaataaaattatacatgatccaattttttatcttcctaggcatataaaatgattaaggctacatcttgaagatatggcagctttaatgtatatacttctccaaaacaagttttcagccttttgtacttagaatgaagtagccccattaattttgatgttttgcaaaagaaattatgccttttggtaagcattttttatattggtaagccatctttgaaatgtaaaaggcagggtatgcttcatacctaggacctggaataaattcaaattaaagtattcacttttaaggtcaagaatagaattatccagatt

SEQ ID NO: 36163 - DNA, 660 bp, Oryza sativa
  unsure (1)..(660): unsure at all n locations
tcatatatgaagggcaatatgtacttttatgaatgataatttcatccttgaatagagcaatagatcatttacaaacaaattggatggcaacatgtatatgagatgctctttttttttcatctggggatcattgtggaaatggaaaccatgatattaaaggtaatattcatggcaaggatattgcttgtaagatttgactgtgtttaaaaaggaatttaccttccgaagtaaagatggaataacacgtgcagagcccgtagatattgtatgatttgaatgtaaaggctgattaacttgtcagtaattttgcatagctggcatcacaaccatcaagctgcaacatttgtatcaagacataacttaacaggtagcacatttgaatgttgcgatccaaaaagaaaaataatgcaaaagcttttgtatgagataaatatgagtaaatccaatgtataaattgcaacagagcatctcctatgtatgatttatgagcctttttaccatacaacatttgggatttcgagggacgacaaagtgttggatgggaaattgctcatgaattatgggacatgaaaatgaaatganggatgaatggatataaaataaatggataaggataaggataaggatatgataaggatagggaataaaaaaatagaaaat

SEQ ID NO: 36164 - DNA, 652 bp, Oryza sativa
gggtatcatgtacacaggcaaatgagcaaaaatgaaatcaagcaattccttctgccaccatcttctcttccaattgattttgggagcaactagaagagagcatgcggcgtcatgctgcgcgaccgataaagtttcatacatagattgaacagccatttaaattttcaaagactgagaagagttgtatacaaaatgtgaacaaattggtgagaggaggttaattatcagtgtgcacagagagggccacatgtagtcgtcggtatacacagcgcgctcctcgaatgacattggctcgccgtggagcttcacccaggttgtgacatcgttcggccgttgtcgagcatgtaggtttcgtgtagtcccctgtggagaggaggagaccatggtgatatgacctgtggtgcatggtccaagcgacatgatgtggcagctcaaaaggttgcggtaagggtgaccatgtctcgccaatgccagccctggcctagtcaaccacctctaagctcggttccgtaagcaagcttgcaaattatgtctttgtggtaaatcttgctatcgagcttgatagcgttgtacttggcgaaccggtgaacactttccctgagctggtgtcagtgatgtcgctctcaacattgttggcgccgttggattttcc

SEQ ID NO: 36165 - DNA, 12210 bp, Oryza sativa
gatcatcaaaccagaatacttcaagttaattaaaacatgcattccatactaccgaaaatgcctaccaataaggacaattaagctggaagttgaaacattatatggaaattcataaacttgacctagtatatatgtcctgaacagcattagacaaagtcacataagagaaagaagcaacccataccagattaaacaagacctaggatgtgtgctttcctgtcaccaatttagttcaatttgcagaacaaaaaaaacacagctgctcaagcaggtttgatttataatcaaaacaaaatatccacacatcacatattgccaatttgctactaatgtgtatacacagctttacttgcaatatagttcccaactgacaaacaaaaacctcataatacttctgcaaaacacaagtctaaagcacatttctaggtgaacttatatatatatatatatatatatatatatagacatccaaaaatgccaatctatcatccgcacactgtcactgacttcaatgatcacaccagtagcatctctgcattttcataaagtgtattccatgccatcctatgctcccacttgtctgtcctatctagtaaaggcatacacaatggtttgtcaatagtggtctcttagcgttgctaattaggaatacttgttgacatggaagaaatagaaagaggagagacaaaacatcgttgttatgcataacaacgactcttaatcactaaaatatagaaatatagttacataagggtaaaaaaatggaaagaatattaacaaaaggaatattttttgagttaatgattgagtctttgtcgtcccaactattgtaaagacacggtctctaaataatcttttattgtttaagagatcatactcgtctctaccattgaacatgccctaatggtgattgcgcttgcggaggaggcaccgactctctaggacgcaaccagagacaagcagcgacatcgtgaaggcgccctgaagtagctatacactagtacaaaatactaatacaaaatattcatatttggttatgtggcctgctcgtgcttcatttgagcagtcttgagctagatcctgctgaaatgtctatttttctttactcaaataatgcaaaacaagtccaagaaataacagcaagacttcttgacaaagagaaatggtatcacctatgctatatgggtaccagctagtacgtacattgttaatcttaaacacaggttgcaagatatttatatttcctataattaattggtatgttttactatacattctcgaaaattgtaccagagaggcatttttgcaaatgttctcctaacataatttacaattaatggaaattataaagtgcacaaatggatggatttatgtatccacaacaaatatatattcaagctgggatctcaaagaaacaaagcctagttaagattaataaaaactggaaattcatttttattaaaaatagatgtaaataatttttgtatacaatacgttagatctatagtaataagaattgagtagtgtattcttagatggtctcatgcatgtatagcactgtccataacaatataacattgctctatgcaagttcagagaattatcacatatatttggaatataacataagtgaccctttgataacctaaagaatcatgactgaagctatcgacaaatcctatataaatatgcaaaaaggataaatacacaataagtatattgtattgaaatgagtactcaaagcaccaaaacaagaggatttctcacatcatacatagaaatatctttggttcatgtaccaagttgtatggaataaaatctgaagaacttctaatataaaaattaggttggaaaatgcaatatgcactcaagttcataagtatagtaggtcactgacaaacacaagtaatagacagcagacttgacaatgtgtacctatgtgccaagcagccatatcaaaaagttgtgctaaatacaactggataaaattgtgttcaataatgtacacagacccaaatggtaaccaagctttttaaatatgtaagttccaaacatcttgatacattttatttggtttatttgcaaaggtttttgcattcataaacagaaacagtgaatattgtggtataaaaatcaatatcattaatagtgatagtaactgataatcactttgttagaaagtatggaaacggccagctactatacttgaaaaatggaagtagcaaaaatggaagcttctcttttcaaatgtgtactcgtataacactataaagagccaaaaagaatttgtctagtttttcatttacctctcactattgaacatggcacatacacctatctattcaactttccacttaaatgacaaaaaatgcccctatgtgggggcatgttttctttttcttgtttgaaagaacaatttatgagttctaactgcctttactaacaaagtttcatatgagtttcacatagggcaaaatgggaaatgcctcttggttaaccatgtcgtgatatattactaaattaaagaagccatcaaagtgatattggccttgaaatttcctttcataatattataacctatcagtttttttaatatttagcaaaataaattagcgtcgaaaatcgcatcttaaagccatatgatgtccaaaacacaatttattgtgaccaaagggagtatatacttaaatatgtacaacctcatctcacacatcagtatcatagaatattataatagacgcatttggtgcatgaggcggcctagcgacaaccaatccacaagcaacaatattatttgcaaaagaaaacaagaacttgcagacaacacatgcaagttaaaattagggcttgtctattttgttaccacttttaactatatcaaaatacgaaaaagacaaaaagctattcatatcattatcattgttatactaccaaaaattttggtaacattaaaatatgtcaaaatttggtagtgttgatagtgacaatgaaggggccccgacaatgaacaaagcatttaaatacagtgaatgatattatcctctcttaaaaactctatctcctaaacgtgtttaggtcgtccaaccaacttgccgctattatatatgtccaataaatccactagccatgtagtcaggtgagtgatttttgggatctgtcatgccaataggtagaatatggacgaatctgatctcacaacaatttatagactgctagtaccagacaaattagtcatatataactaattatccgcaacgaatgcatccacaaaacttccctttctaaagcgtagctttcgtgccgcccgatcgcagcaacagtattcaataccccaccaatcataagtggatctaaaagcgcacacacaccaaaaacaaaaaaaaaaaatctgccgtatccacctggggcctcgcggttctaattataccaaacttaactaacctaatcaccgcctcaaccgcattgatttcgtaccctaaccgcagtaatttcggcgcgtgtcgtccggatgcttgcccaactagcctgatctggtcccgtcccgacacaattgaccgcttgtactcttaactcctcgctcgcctcacgaagaatcaaatgccgttgaatgattggggaggaagaggttgaggaggaggaggaggaggaggggtggggtggggtagcgatcgcaccgcgaggggatccaccgccagtgccatcgctgtcctcctcgtcggtagcgagtggtagtagctagcacgaagacctcggtcgcgtcgcgtgccaagaggacacaagggcaccaggtgtcgactcgctgggatggttggggaagaaaggatgggggaatggcggcgcggcgctgtgggggtcggggttaggggtttggtagggttcgctttcgattttgatttttcactttctctcttttcttttcctctactttttcaccgcgtaagaggggctcttcacacacgttctttttataatggaataaacatcccggcctttactcaaaataactacagccaattattacatagtagcactcaagaacaaagtgtaaatttaaatgaatagaacacaccatagagaataacaaagaattcagcctaacataaagagatcacaattattgaagtctatttgtaaatctccaatcataattggcaaaaagttgcataaccgtagtctccaactttcgacatgaaactcttcatcttcatcacacctttgtagttgtgcccaaaatcgaagccaatgagttgccctaaaaatgacctgcatataggaaaatgatggtgatttatcaaaaaccatatcgttcctacttagccatattgcccaacaaatggcagaagctccaaagtatcagtttgctttttttcttatcaattcccaaaagccactcattaaaaatatgagatatagtaactggaagattaaaaccaaaagagaactgaactgctctctatatgaactttgcaaaatgacaatttataaagagatgttgaatagactcattcttcaaacaaaaagaacacctcaagctgccattcgagttacgccttgacaaattatccttagttaacacatcccctttaagcaagtatcacatgaaaattttaatcttaagtggctattcacacatgtaagtgtatattactccctccgtcccataataggtgatgtttttgactttttatttgcaacgtttgaccattcgttttatttgaaaaattagtgcaaatataaaaaaagataagtcatatgtaaagtacttttgataataaagcaaatgataaataaaataaataataattttaaaattttttgaataagacgaatgatcaaacattgacaaacaaaaactcaaaaagacaagtaatatgggacggaggtagtattaatcagcgagctagctgtatgtttcaacaataaacagtaatatttcatttattgtgctgccgttcaaccaagaacaaaatcaataagaccgggccgacaggatgtacactttgcgtcgcattaactgcgctaattcattactagaaatatgtacaatattttaattctagattctattaagaaaaaataaaacttagggcaccgtaaaaaactatattacctggttcattattgtgaggttggcaataaagcagatagtaggacatgtttgattagcaattaaatttgccatgtctatccttagataagccacaattttgataggcagtatttgattcttatcacaactctattttgtctaactagtcatttggcccacatgttatacacttttgttactgtctaagctttagtttgtcattttgttccacaaaagcgtgacaagactaaacttagccaccttagttaagaatgtgtggcaacattagttaccaaccaaatatgtcgtatggcctcgtcgtatggccagatgctttggctgaggcgcgtaatatcatctagccatagaccggatattaaaaactaaacaaatacttaaaatattaaaaactaaacaaatacttaaaaactctcttcccttaattctccattcctccgcggacgttcatcttccctccaatatctatctgtctttttttctattgtatcatggcccccatcttactacccgctacttgttacatcttgttacctactacttttgtaccaaaataaaccaatctaataaaagatgagacatattctaatattataaattttaccaaaaaaattctagaaaaatatgcatgtattttcagtagtattacactgctatgtaaagtcttaacctcaatgcattattttaaccataacaaaaagataaaaattttaacagttttaagagtataagtatgatagattttgtcttcttttcttcctattataatgaatttgaagatgatacgtatttttataattttcttgatgacatttattagttcatgggcatattacgtaaaaatgacttgtatacatatcttacggatgcacccgtatcaaggtcgcataagagcaagtagggatggcaatgggtcgggtcgggcacgagcagagtgaatccatgcctgacccaagacccacgtgcccacgcccgacccatgcccgcaaagccaatcgggcaaaaccccatgcccgtgcccgtgcccatgcccgccgacggatatccactgggtcatgcgcagtgacgaagactgggtcaggtgagcggcggcggttgacgaagattgtggtcatgcgcaatggagacgacgaagtcgctattgcctaccatggtgaccgccgctcccgtttgttcccttgttgttgccaccacctgcaggcgccgctgtcgccgcttgtccccctaccgccacactgcacgcgccgtcgccgccgcaccctcctgcacgcgcgcagccgccgcttgttccactgccgccgcccgcccacctgcacacgcaccgcggcctcttgttcccctgccgcagcccctgcctgcacgtgcgccgccgccgccgttcccctgccgccgccccgcctgcgcgccgccgctcccccacctgcacgcacagcaccgccgccgttcccttgccgccgccgctgcctgcacgcgccgccgctttggattatggagaggagagaggcatccgggaaagatggggtggggaaatgaggaattaggttaggtttcattgagtgagtatatatatgtctcagttaatgggctaaatgggctaagaagaaggccatgggaattaagagatgggccaaatatagctaatatgtatatgtatcgggtcgggcatgggttatccacgggtaaaaaataaaacccggctgctacccactatatgttcgggtatcgggcggacatgcccacggataaaatattacacccatacccatgcccatcgggtcgggtatctgcgggtacccgacccgtaggtaaaactgctatccctaagagcaagtataataagaggttgtaagtcggctaaatgctaaggtggaggagaggagagaagagagagaggagaagcgggctataaacttacagctggcttggacacaagaaccatgaaattatgtgagagagacactgtattaattgtaaatagctaactattatacgtgtgggctaagagaagtctgcagagaaccttatagccaacaaatcgtctgtattattagccttactctaagcgagacatacgtgagacatgaataggtgacaggacatccaactctttttattgaaaattgtgcacatgacccggtaggatgatgggggtacttaggacatgacaggacatccaagccttttatagaaggaaccattgcacatacggaaagctaactatcaatttaaccctaaattattaacttcgcttatttaaccctctttttaaagaatgaacatgttgtttggctatattctaactagtgttacaaatatattttaaaaaatacatttagaaaatgataaagacctaaatacccctggagagaaatacacgcaccatatcttatcctcgtccctctcgtcttggagccttggacccacatgccctagggattgcagactcggtcggcagaggcggaggcaaggacggtctgatgggagctaaggcccttcacagtgctccatgttggagcgtttcttcatcccaccacgtagactgtgtgatgccatggaggagagagggtgtggtccctcacacctccacaaagcttttcgttcctcaacgaagaggcgaggaaaaggcacagacaaagcgcacaaagccgtttgccatgcctagtctctcgccacatacaaccactgcacatgagctcgacaacggaggcctccatgaccatcggatgagctcgacgacggttgcagcggggagctcgtcgactcgatttgcgccgctgacatcaatctccgcccccgccgcctcaagccaggcgactgtggcctcccactccacactgccgccgaggagctcgccgacccaatttacaccgccaagatccacctctgcccacgtcgctcagcaccacaccagatccggcgacaccgtcaagcttcgcatccgtccactctagaagccttagaggagagaggcgtcgaggatggcgtcgatctggtcgctcgattcacacggtttgtcacggagctcgtggccgtggaaggggagagaggacgttgtcgccgtcgctgctccgctcaacgccgagctcgtagctgggtcagggaagatgggagaggtagaacggcgttcggaagtggagaggcgccaacggggagaggggagaggccgccggcagcgggagttcatcgtagaggtgggggagtggggggacaccggaggcgagttcgtcgccggtgaacttgccgaggtgggggtgtgtggggggataggaggggttgtgggggtggatccggtggtgggtttggggtgggatttatattcttctctcaattttaggggtggttagtgtaaaatttggacttctttgtaaatcaaaaaaaaatatgtggatgaaattgaaaggggcaagggctgaaatgaaaaattaaagttattcatgaggccctttgcactgcgggaatatcaaaattaggacccgtgtatttagcctatgtggtatcttgtggtttcttgtttgagtgacttgcactgtaagtgccctaagcgcaggcgtggaggaaacccagcacacagctcgccggcgcatggacgcgctcgtggatagggccaggagggcgcgtagcgcgggcagagggaggcgcgtgactcccccaacgaccacgccaggccatagggttttttgaaaaaaacccaagccataggccttactcagcgccgatgtgctagcggagggagcctgagccctgctggattctgtttttttttcgataacaaagtttattgatcattataagcacagtcaatgaactacactagatatacattctccataactggagatgattccaaagctaccttatgtttgatagcacaaatgagatattctttgactggctattggaacaacattagttgaagtattctctctagccttttttgcaagaaagtctgttgttttgtttatttgtcttcaaacccacttggcaggaatacaaggctgggttgctacactctcacggctttgatgctcatgtccacagaagagtacaacatgtaatcaatggaacacctagctatgtcatttatatcctttgtttcaaactacaacattctatattcgtgttgcttgtcatatgaactaccttatttgtagtcatggacattatattgtgaactctattgtttcagttttgtgtggacttcataatgctttgaaatgtgaggttgttgaattattatgctatgaaatgttgaattgcttcgaagtccataatatagaaaaggttatgccggatttttgtattttacactcaaaagttagatttgtaagtattctacatattcttccaattatacctaatttctacacacatttaaccatattttcaatcaattacttcctcaccttttctccccaagctacccatggattttgtaggtcactctggcaccctagaagccactactcccctccatcgtggcatccgagcctagctgaagcttgaaaccatggtacaacctaaggtcatgatgttggacatgcccttactagtatatactgctaagggtgatgatttccctatcggtaatagggacaaaatcttagagcatcctcagcagatgctccatctgaaaattagcatatgggggtgaaaaatcagccaacaactgatacaccatcggctacgccaaaaatagcgcgtgtgctaaataggagagaggaacgtcaaaattggcgttcttctctcctcacaccatacgcaaccgccacatttcgatcaaactcctgctcccatacagagttccggatcaacctcccacagcatctgcgccagcggcaaatagaggaggagagggaggatgagttgcagctctagttggattggctccggttgtcggagaagggaggtagagaggtggcaccaacaagatctagggagtttgaagaagaagtagtccccttccgatgctgactcggccttccaccgccgctcccgccacctccccacctggccacccacgcctttccaccatacctccctttcgcccgtgccttccttcgcacctccccctcccgcagcgctactcctccacccggcgaccgtgccgcaccagcacggctcgcaaccccgtcgccttcgaaccgtccgtcagcccttcttgtcctccccgtcctatatatgaagtagaagagaggaagagttagtgagaaattaatataaaatgtatggtagttgaaagatattagtaaaataaaggatgatataatatggacaatttagtatagatgatctgttgaagtgaaaggaaatatggagagggaatctttttggatgagcatccaaatgggaatatggaagataaaatttggatgtgctgttgtgatgctcttatggagccgggacggcgggatgattttcgtcacctatgagtcaagtggtcggagccccatattggcatattcaaacggggacgtaaggtcacaagcggccaaaaagtttccacccaagcacgagaaatataaaacattgtcaaataatatattggatgaatggaagatctacaagatattcaagtccaacaacttcaaatggacctagcgccttcatgtcaactccggtttggatgatcttgtacttgttggaaagcggtgcgtcgtcaccttttaaatgcttctggtctcatatcaaaattcatctcgagtcaacaggaatttcaaaacaagacagtttgaaactgaatttgggctttgggccttgtaatagattaggcccatctcggaagtgcctctctccacctccacgaaccagcactaatcctagctttattttcctttataaatagctttgtacgccctaaaaagaacaattgggttttgtttagttgaattttgccaagagtcattcaccttgtctctagttctcgttcgattagttgacgactatagattcagagcccccaactgttgatgtgttgatttgtcggatcgattagatctatcacttcaatcgcaactatatatttgtgcttaattacctattcgcaatatttagattgcatcttatcttgttcttgtagtgttctctgatttgcattgcagggaacgtcaaccacgcgtcatggttggtacgatatcgtttgtggcatagtgattgcacgatgtcatgaacttgttctggttggtagccatgtcgcaaacatcatattcaatcaaagtgagagttatcccattaccaaaaaatgggccacgggagagagtgagtgtcatcactactgtagcaaactgttaccatggcttaaaaaaaagtaaaattaaggggttgttcagttcattgccagaaaaaagaaaaccttaccatttgttggtaatccaaaatttagtaatgccaaatttttgggaagatcacaatgtggaggtggtgttttgtttgataccttaccaaattttggtatagttttgtgagtagaagtttctagaattataaagtttgtagggattgacaagattgtaacaataaagtctcatttagtttgttgttttggaaacaaagtaaaaaagccctgaattatactcataacattccaaatcggtaaggaataagttcaccgggggtccctcaacttaacagtgagattttttaaggtcccttaaccacaaaatcagaaatgtgtacccctaaactcacacaaaccgtgcactcacggtcctatggcaatatatatgggtggtttagttgacgtggcatcctagtcagcaaaaaaatttaaaaagtacgtggggcccacatgtcagctacacattctcttttcttctccttctcttctcttttctctcttctctcttctcttcttcagggagggaggcttgctgcgggtggcaagcgagcgcggtaggcgggtggatgcgggtgtggagacgcgcggggaagaagtgggagatagggagaggaggccggctctcattgcttgtcaccagcagacgggctaatgcgggcatggcgacgcgtggggaagaatggggagagggggagaggaggcgagcacgggcgcggcagtggctgcgggagagggggagagaggcggtcgggacggcgggagcaatggg

SEQ ID NO: 36166 - DNA, 675 bp, Oryza sativa
ggggcaggctacattgtcactgcaaataggttactacaagttcacaggcacacgtgcattacaagttcatcacagccattggcaattagcaaaatacttagagaggaggcagctggcattacagtagaagataggtagataggctcctaactactctagttggtggtgcacttgaggatgctaggtctttcctcttctggggagtcttcttcttttttggtgtcttttttttcctaggtgtttttttcttctttggtgcagagcagcttgcttcacttgttgacactcctggatcatttccttgcctgcacacttgtctcttcctacaaaaaagtgagaatttttagaccatatggcaagcatacaagcctgaatcttagtgactacaacatagcacaatatatcaggagtgtaactaacaataattatcaagttgggttttttttatcaagttggagttaaagaacacaaaccgcttgcacaaagactaattaagaatggaagcacaatgacagcaatataccgtttttggggggtgcagtggctgctcatatcatctgcatctacaggttcagctagcttgcatgttttctcaaaatgtccaaatcttttacatctcttgcatttcactctctttcttccaggctcaagaaatccccttattctctgcactct

SEQ ID NO: 36167 - DNA, 728 bp, Oryza sativa
gtgaagaatatccggttttgtggttcagggggataatttggacgaccgcgattgttcgtggggtaattcgtactttttccttttaaaataaatatgtgtgggacccacgtgtcatcctctcgggatggccctcattccgggctggataattcgggattgatttgaggcccatgcaaacaagagtttaaggtttggttaattacaatgcatggcaagcgagtcagcgagcgacgaaattacgatgcatatgctctgcgatgcgaaattaatttcgctacttacatgtcatctaagttctcctcgctagcatagtcacttccgtggcgagcggcgacggcgaggacgacgcgtccgtcgtcgtcgggtaaccctcggttcggttgttttggttgtcatggcgaccggttggcgtcgagcgcagccatcgcttcactggaatgcagctattccttcaccgtcgctagtcacatcatccaagaaccaagagctctccgccttggacgtacacgccggtgactgtgagccttcccacgtcaagctccaacctgaccttgatcctagggtcggaccgcagccacccggccaccacctccgccgcccccctgcaccgctgccgccacggcgcccagcaccgcgccttcttctccgcctcgacggcctcctccatctcccccacgaggtcctccagctcgttcgtcgccccgtccagcctcagcttccactccacg

SEQ ID NO: 36168 - DNA, 579 bp, Oryza sativa
tgctctaataccttccaatcctatatacgtatctcaatataatttgcaccattttcatttccagatcagctcccaatcctatacatgtgtgctggtgaactgtaaaaccgtcatacagaaccccgaaaatatatcggtgtgaggatgtttatgattttggtctcactcatttcacctgcctcagtgtctgtatatatatctcttgagagtaaagttccaaagcatttatgcacgtaaatgcaaacaaggtttaaattcatcaattcaaacttgattcacatcaataaaataagagcatacatgcgatggccgatcagagcaaatgaggcgcgcgatggagaaaacaaaaataaaacataagtggggagatggaactgcgcggtgcggatgagggggcctcagccactgggccatccccagccatgcacctgggccttatccacagatcccctggcccattaggattggcctctgcatgtgaaatttaccattatagtgtaaaaatggcactaaatggctcttctgctgaagtttagccttcttttctgaacctgtttattacgtgggtgatacgaaaac

SEQ ID NO: 36169 - DNA, 765 bp, Oryza sativa
atcgatataaatatgagaaatgttagagcaatcatatgggggagtaccgtcttacagtacagtattagactcagtttattgttgatatagcagaggatccacatcccctattcttttttttagataatgacatcccctattcttctgaagcagaggatcaaatccttcaatctaaacagttactatttttatttttatttttatagagactagaaaaaatacctgtacgttgtaacgggtgaaggctatgttaatcttattattgctatactgtttagttaatgtgaaatttactgtggaaattcgcttagagatatattttttaagaaactagcaaaaatgtccgtgcgttgcaacgggtgaaaaaattctaacgataatttatttttttcatacataaccatgtcaatgataatgtttgtatagattgtttatagctaagacaatcaaaaagttggaacatcttcaatgtaatggcccaacctcaacgatgacaaccttaccgatgcctgctttacctaaaataattggattatccacgtgacagcatatatataatctaaaatactctttcaatcttattcttgcaaccaataataggattaatcagatactacattacctcgcatggtcaagtctacacaaaatagagtcactatgcactcttctctaaataacaattaaaaatatgtttatttttcagtattatttctatatcatatgttatcagaaatattagctatacttaacaaaaatagtctaata

SEQ ID NO: 36170 - DNA, 683 bp, Oryza sativa
cacggtttacccttcaaataaattttctaaaaggataacatttatcaaaatttcgccaaaacatacatcatgtctctcatacaactactctctccgtttcataatgtaagactttctaacattgcctacattcatatagatgctaatgaatctagacattattatatatatagattcattaacatctatataaatgtggataatgctagaaagtcttacattgtgaaacggaggaattacaagataatctaaaaaaaagaaaaccatatagcacagtgcagttaatctaaaagtgcaatataatctaaaagtttgacgacataagtgcagttgcatatgaacacttgcttgcgtacgtgcatggttggtttgagcgctgtgaacgcgatttgtcaacttcaacttcaaattaggggactaaacgaggaacaaatcaagcccacgagacgacacatacagtaatccaaaatccaaagtcaatcacaaggccggccagatcatcaccgctgtcgtagtcgtcagtcgacgtaaatcgttctctccattttctgcaggctgcagcttcgcctcttcttccttttttgtagactgcagcctagatgaagtggacatgcatcaatagaacggacaagagcaaaagttttgaaattcgaaccattcttctgcaaaacacctcaagcttt

SEQ ID NO: 36171 - DNA, 820 bp, Oryza sativa
taattattagcgtatgattaagaaaattagtcattcaccaatgattaattattattaattatttaaaattaaaaaataaattaatatagttttctaaaggaacttctctaaagaaaattttttttaaaagaaacatatcgtttagcagttcgagaaacatgtgcgcggaaaacaaggaagttttcttccctttctcggaacgaacacagtctgtgttcggcataagctggtcgagaggaaaggtaccccagtttttgcatacttcccgaatggtttaattgtgtgtttttaaaaaaaattatatatgaaagtttctttaaaaatcatattactctattttttaaatttaaaataattaatactcaattaatcgtatgctaatggttcaccttattttgtgtatcttctcaatcagcttctctcaaacatttgcttaagaaagtggggaatgacaactcgcagttgcctcaaatatgacaccgctctagtacatcaatgaactctcgaagttatatataaataacattttcaatatacgatgagttgtatgtgaatggattagaaaactggggtggttcaaagtgacacaaaagataaaagatatgtttacctagtccaaagtgaaaaatgttaggtaaaggatggttcaaacggaaaaattttctgtttataaatataaatgtgtgtgtttttatttggtgcagagtctaaaacgttgtacttcaatcgttaaaataaaagataaatgagtcgtaccgtgaagccattgctgtaaccctacgccaactagtcaaccctagtggtctttagggggaaaaaa

SEQ ID NO: 36172 - DNA, 645 bp, Oryza sativa
atctgcgtaagggtgaggaaccaattttaagtctgttttcacgcaccggatttttcggaatatttccaaaacaaaacaaatccgaattttctcggatttttcagaatatttccaaaataaaacaaatccgaatttcacacagcaaaacataactgcaaaagcaggctgcatctattcgatgcgtacgtcgcgcgccgcctgcccggcccggcaagcgagcaagcgcgtgtgttccccctcttctctccatctcacatacttcaagtggctaggagggcatcctccctaaggagatccctctctcctagaataagtaaggtggtactaaactcgctatgcatgccatcgcatgtggtggacttttctgatttttcaaagaattaaacttcgagtgggctaaggcccatctattaattccaacaatatgttccttacaacctacataatgtttgagcttgggactggtattgaaaactttggcttgagccaatatggatattgatttgtatttatataaaaaatgacatttatctcattagattttgttctcactttttgccaatattaataaaattttcattcataccctggtgttctcaccccgaagcaaagtctccactgggtcaagggatagcgagttcgata

SEQ ID NO: 36173 - DNA, 525 bp, Oryza sativa
agaagccttgacaagcaaagataatatcactcgcactttatgaatcctttcgccggagacgaagaagatggccaacaccaatgcaagaagctcgccagagaagaactgggcggccggcgcaaccttcttcttcttgggctagaggacaagtctccaaacccgagcaaatcagcggaactcctagttgtaggcgttgaaggggaacccagcaagtacaagagaccccgatcgatgagaatgccggtgaagtcctccatggccgcaagccgggacaagaagagcgaaaatgccggtggccttcttgagccgcacaacgaacgtgattaacccgactatgggagagacccaactaagctaaagctatacctattaaaggagaagccggacaccctcccctcttactggcgaccggagagccgccggattccgaaaggaagaggacatgaagaagcactagtatgaaatcgtccatctatgacgttttgctcgtgacgctatataatttcgtattgaacagagcatatc

SEQ ID NO: 36174 - DNA, 884 bp, Oryza sativa
cccagttcatccaagggatccgtgaatatccctgaagatgtatgctttgaggttgaagttgtaccaagaacatcaaatgggtcacttgccatgctagctggcttagacgttgacatggacacattcttatctttagttccaacagtctccctatgattcaaaaaaaaaaaggatgagggaatttatggtaacaaatctgtatatgattgacatattttagattaaaaagatccaaatcattctttaaacaaagcaatttcagaacctcgtagatattcttcttgcataactcactacatattccatcactataaagcgttatatttgaacctaaggtaatttgcaatcaaagttgtgcagcctatgaacctaccacatccggtcattaatgcatgctgaacattctctatgaactatgtgcaatttaaataaaccataataaacctagcatacactgtattatccacataacgcaatatagaggccaaagcaagtttgcctgagaaagtgcactggtatctttaggaaagtagggaatgcttataaaaagcatagcatatgttcctaggcgtttctaatagtaaaatcgaagtagagcccataaaattcacaagatgcccataagtttatccacaagatgccattgatattcaatggtcaacacagatcatacctaatggaaaatagcctataaattcaattaccaaatagatttgaagatataagccatcaatgaatttcctacctcaactggtataagttaccaattcaaacaatcgcacgtgcacattaacaagctaaaatctaagcaaatgcaacataaattagatatgggagtccataatttgtccaactcaactgaattatcacatggtttctcgttg

SEQ ID NO: 36175 - DNA, 1975 bp, Oryza sativa
  unsure (1)..(1975): unsure at all n locations
aggtccggaatacatccaaaagcagaaatagataaggcagcagaattcaggcagcggcatgccattgccacaggcaacgaccatactaagacctactggacgccttcgtcttcatctccctcntgatagtaggcatagggatcctccgaggcttcatctcccgcttctgataaattttatatttgcaaggatgagtaccaaccgtactcagcaagccaccacagcaacaatgcatatgaaagggggagttcaaaggatggccatagttcttttgcgcaaagcaagttttgtaattcttttcacaagcctaagacctagcattgactgatcaaattttagtaccagagtttgtatttaaacaacgacggttctgtccaccatccattgtgatcccaaggatagcttcccgccattgattcgtcatggttttctgaggacgtccaccttcccgcctctcaggaagtggctccaacagcataaaattcatcatgcaatatcccatcccacacaagttaagaatttagagtctagccaagtgtaatacatgtcccggtgctcaataaccgtgagcacggctattcgaatagatttggtttactcacactgcagtggatgtacactttacccgtactccgcaacttgcccaacacatgagcctacgtcccaacgaatgagacttgccacggcaaagcctttcaataacctcactttggcagtatccgctccatgaacttaggccctcatgcactctaggcgtacacagtttctagcagtgagaggagttttggcgctcccaagggggaaaactcacgcaagcctaacatcgcattctgtagttgaacccaatccacgctgtccccttttgggtatctccttgtagtcttgtagtcttgccaagtcagtctctagccatccgtatcgggtatccgccatttggccatccgtatcgggtatccgccagcagactgcttgttcgtccacacacctaagtgaaaccactatgcagggatactgcctccgctcggctatctactccgctaggtctatacccattcgagaagtacggctgtactgaggtcgtttcatgtttaacttcatggctcagtccttaactgaccagggacggcactagcctttaccggacaccacccaagtcctccagccgccccagtcgaaaacatttgtttaattttatttctcctttcacaaatcatgtcatcaacatcatggcaatgtggtgctcatgtctccacatgccgcatctcaattaccttcccaaaggtaattgcccaagcatatagcatttgataaatatgagtatgcatgattctagaatagcatttctaagcaattgtcataattgactagggactcatacgtagacatggttacaaagatttaagggtaaacaataatcaaggcatggcataatcccaagtaggatattcatcattgcatgcaattttatttataaacaaaataatttcgcaattggggatcaacatgttcaaggaatagggatgacttgccttgctcgaggtcttgcgggtcttggccttcacctggatccgcggctccctcggtctctatagttacgtgcgaaaattgatttgaattcggttagaattcaaataaaaatccaagtaaatccaaatggaagtcaaatgcgaaagtcaattcctttttattaattttactatccgcgaactatggcaaaccccaattttggtttaaattattttgcggttacaatattttgttgtcgtatgttttaatttaatctaccctagcattatatccatatattaggttagaaatttcttatcgcgagctaaatgtcggacggaatcctaaaattatcttataatattatacgactcaatttagtctatgattaaatataatacacggctaacaccctagtaattaaatccgaatcgctaccgttgatcgattatttatagagatttcccag

SEQ ID NO: 36176 - DNA, 639 bp, Oryza sativa
aaagtttggaaccaattgtgtatttactttagatactttgcaatagattgatattctcgtagtactatataaactttagatggatcgatgtgttttgtgatccatgttgcagctgggtgtgtatttatggtggttgggggtgggtgggggggtaagaaaaccatgcatggatgcacggtgctgcatggatatcgttggccggctttttcgttcggagctcttgtacaattgctataaatagatgcaagatggtgattatattgttattttatattgttaggtgccaaattccgctggttgataagtaaaaacctcgggaaagagggtgatgatgcaccgagagtagtattgatctagagattcattacaatggcctcgggtgtacatatttacacccatggatagatactagtccttgtaggacaagaaagaaacttttctaaagttaaaacggaaacataaagtccttattggacactaaacacactttcctaaagataaaagaaaactaacaaactattcctaattaatagataacttgccatgttgtatccttcttgaactcggtcacttctggataagcttcctttaattcgattaatttccttaaccgaatatagcaggaatccgactattggc

SEQ ID NO: 36177 - DNA, 633 bp, Oryza sativa
attcctgcagccctgttttctaattagtcattgattaaagggttaattggatccatgccactgcaaatgcctcaaacaaattgacgccactctttttcactttatcagatagatacctcggcttcccaataatagtgaaaccggagggctatcggataacggcctcacttctataaccaaatttgacactctccgtgatctttcaatggatcgcgaaaatactccatatagcaatcctattttccataggaactttaaaaataactcactgtcagcacacataacaactgcaaactaaccatatacttgctatggtggctgggaatatttcccgatgtatgaaagtatgaaacactgcaatacatggcattcatttatataaattaaaaatatacttgtttgcagagaactttgatttgtatgactactatcattttcttcgcctgtagatgaatcctgcaacttgtaagtgcatttggtcctactctgtgcttttaaccataagataaaccttaatcagaaatcccaactactgatttccttcagaagtgcataaaaacttgtgagtgggttcggttgcattgagaaattgacttctaatgcgacttgcatgcagcaaaactgcccaaactt

SEQ ID NO: 36178 - DNA, 558 bp, Oryza sativa
tatggaagaatcttctcccatcgaacgtccgacgtcccaaaaaaaaatcagacggtattccggtgaccaacgagtgaaacatcaaattatatatgactagtaatatacccgtgctaacgcaacggtgatatttagtagagtaaaatggacgggcggctcttaaacttgtagaggtgtatcatctaggtccctaaactcttaaaatgcatatccaagtatcagaacttgtcatagtatgttctctaggtcccaaatcgctacaaccttctggatcctacatgatactgatgtggcatgccatacgtgcatgacatggcataattttgactgacaaatgagacccatttaaaaaaaattctttttctttttttcttctttcttctcttttatttttcctttcttctcctttctctatgacccaagcagaagaaagaaaaaaaaaagaagaatgagaagaaaaccaaaaaaaagaaaaagaaaaagaaaagaagaaaaaaaagacccatcatgtccatgtggcatgccacattagtgccacataggatcttagaggggctg

SEQ ID NO: 36179 - DNA, 1018 bp, Oryza sativa
atttttcatggcgtcaacttatttttttctctggcggccatacgtgaaaaccaccagtggaattataacaagggttgggggctaatggccagcagcgaaaatggatcgtccttggtggccaggttaagagggccgccagcaaaaatagaggtatttttgcaagtggtgctcttaagatgcagccagtaaaaaaaaactattttttactggcggggtgttgggagcctcgcttgcaaaaatcgtgggagggaataaacatcacgtgctccctctttttttcctcgacccctcagatccaacccttctctctttctttctttctttctttctttctttatctctctctctctagctagtagcagcgaaggggtgcagcggcggcggtcaatgatggcggcgctcggcggcagcggcagcacgacttggccatgcttggcggaggcaaggagagccacgtagtggaggtcggcagcaccggaggggaggcggcggtgtgcttccgtccaggacgcgaccacgacgacgagacggtcgcactgtagggagaagctacggtggcccggctctcccctccctcctagatttggctggagggcaggggtggctcggtccggatctagcgatcgtgggtcgtgagggtgcagattcggcagcagcaggtcacgggggcacggatccggcggcgacgagtcacgggggcgtggatccggcgacagtgggttgcggcggcgcgaatccgatggcggcgggtgacgatggcatggatctggtggcaacgacttcctctcggctatggtttccccttggcatatatcctcctccatagcggcaaaggagacgggtggcgatagtgtaggggatagatctgactggggtggtgttcgataccactggatccgcctccacggcggcgaagatgaggggcggtgaaggaggtagatcaggcagcggtggtcctctggaccacggccgttgatcctgcaggccgaccgctgtcgtcgaccctaccctaccctca

SEQ ID NO: 36180 - DNA, 707 bp, Oryza sativa
tgaattgctccttcatctccggccccgactgtgtcgacagtggccatacacgaattgccaatatccaagccctggtatgccacctaaagctagacccagagataaaaaacagacgcaccttgtccacaaatcgccccctcacagcaaaaacagcctacgacttaagcttcttagggttataggatgaccttttcgctaagcccatttgggacaaccacgctcaagtcaaatgcaagatcttcctttgtactacacacaagaggcgcatcttcaccaatgagagacaagctcgatgtggattagtagcatccgcacgttgtcctttttgctcctctgttaaagatgtggagcacctcttcctacgctgcaccggagtggcaacaatatggcacacctttggcctggacgaacaacagatcgcctccctgccgcagcttgaaggtgtctgggacatccctccacccagacaacccgccactccacgagtctggcgctctatcctccttgccgtcatgtggaatatttggaaacgacacaacaacaaggtcttcaattctcttgatgaacctgctaagttagttctccggcgttgtgctagcgacattgacatttggtcccatcgatgtaaaaatgttaagagcaaacaatagctccgcaagtgggccttatacctctttgtaattaattcttaatttaattctccccct

SEQ ID NO: 36181 - DNA, 1010 bp, Oryza sativa
ccagattaggtttattcaaatgtagcattgtatgtattttgataatatgttgtcatgtgttgaaaacattgctatatttttctacaaacttggtcatacttaaagcaagtttaactaggaaaaaataaacctacttcatatataaagtcacaagaccttttatccaaaaattgaaactttcaactaaaagttcaaaaaaattatactcttggctcaaactttcaatataaaatccaaaaactgaaacttcccaaaaaaaaatcaaaaactttgtgctcttggctctcaatctttcgatacgaagttacagaatttgagaaaactttcaactgaaactcctcacgagggtgtcaagtagggatgaaaacggtcggaaacaatcggaaaaaaggctcaaccattaccataaccatatttttctcagaaacaaaaacgatatcggaaatatcgaaaaaccagaaagggcagctacgctggatgggctctccaatttattttaatttaataattccctcaataagaagaaaaattatcctcagtcaatttcttgaccattgttctacaatcttacttataaccaaattttacttataaccaaatatgacttatgactttatagtaataaaatcccgtaggctgcagcaacgtgttggatatcacccaacaaacataaaaaaaaaacatgccatgttctagtgagcatcttgatcgtggtaggatagctagctaaataaagggtcggatgcgatatggatgctagcgaatagagcttttctgaatcgtcattaatacaaggaaagagggaggaggaaccagaaggagaggagcaatagtttgggggatgatcccctccattaatttctcattctggatctttgctagggatggataaataatcttatcccaaacagaaaaggctagagtacgggtatgtgcttcacgtgaaatgggaaataatatactatcaatgacgactaatttggcagcatacatgcgtgcatgggccagtt

SEQ ID NO: 36182 - DNA, 620 bp, Oryza sativa
ccctaccacacggtcatcaccgccggcgacagctattccttgcttgcgctgaggtctgctcgtcgtcgggtgtgttcatgtagggaaaaggaggatgtaggaacactcagaaaagtaagaatggaaaaggaataggaggcgctgacatgtggatcctacatgttgattcagcatgttagactaagtcaatgagccatgtcagcaagaatcgctttcaaaaccaccgagtgattttgtatcagttttaacaatttggggttcaagatatacggttaaaggttacaaattagattagacctatatttgagggagtcaaagtggacttattctcacctagcaacacttgagtttcccaactcaatcctctcgttttctacgtgcacgtttttcaaactgctaaatgatgtattttttgcaaaaaaaaaaacctataccaaagttgctttcaaaattatattgatccatttttaaaaagaaaataactaatacttatttaatcacgccgctaatggaccgctccattttatgtgcaggaggatttgttcccaactgcatctaccgaatgcattcttattttgacaggtaaccagaaaggcaacaagcccggcctgctcctggcc

SEQ ID NO: 36183 - DNA, 714 bp, Oryza sativa
aatgtcttaacaaaggtaaataggcatggctaaataaaacagtgataacgcgggaatgtaaataaagcggtaatgcattaatttaaattaaaataattttataaactgggattcaatatgctcaaggatgatgtgacttgccttgctcagagagaacggccttccgaaccttcggcgacgaccacgaaccacgcttcgggaacctccggaacgatgaaagctacgcgaagcacacaagcaaagctacaagcctataaagaagtaataacaacacataaaaagaaagcacacagttctttaggttataacaaacattaagagacttgaacgggtcgattcggagctcgtatgaccaagatatgatcatctgaagtttaatgctgttatatggagatttgcggattattataattaagctttgtaattataaaacatgtgtaagcgctagcctggaaaagacaggagggctgcgccgttgacatgcggaccccacatgtcaacctaaaggaccgcggtagaccgagtacacagagacggtccacgggtcgacggaagcagatcccgtgtgtcaaccgaggcgagtgggcaacaaacggactccactagacaccacaccggctgcacccgtagaaaccacgctgctaccgagcgggcacattaacacggtcaccacacgcacaagcgaacgactaccgacaccggtacacgggtacc

SEQ ID NO: 36184 - DNA, 720 bp, Oryza sativa
ctagggttacataaatttatggcagcatattcaggattttattccaatagcgagtttgaagtttgtgcatcatgtttcgtgtctatgctaagttcacaccaatggtaagtttgaagtatggttcatctcttttctatcgagggtactacatgatgttgtttggagattgaagatttttatggaggacactacggaacgggtgcccgatttttggagaaaaaaattgggccccctaagcatgcatgcaatcttttcttctgggaaacctccacatgcatgcacgcagtcatttcttctcttccacatgtgaggtacatgcaaacttctcccatccccttgtctcttctcccatactcttaattagcaaattataaaccattttttcttatgaaatacttatccaatttgtgattcaattgcaccattgaatttgttgcaattaaatctttacaaagagatctcacatgattatattttggagaaataaaacatatgtaattatattactaattgaaacatttttattataagtgggacattgatttgtgacctctaaaacaatacaaaatatacattgaaatattgaaagaacaatacgtgcaagatcctaaatgatctagtgaaacatctgctgaaatgtccaaaaaataccacgtgtaaaatttcaaatgagctagtaaaatacccagtgaaacatcacaaaatacatgctgaaacatc

SEQ ID NO: 36185 - DNA, 565 bp, Oryza sativa
ctttatacgacccgtttaaattctaacggtccttatgggcctcaacgtctatccaagacgagcatgatcaacaaaatatatattttcctctggtttcatcttcctcatcaatggtgacttctgttcatagcacacctaattggatcaaattaaacaccacatccgaattccaaaaatcaactaggatgagccacatgatcaacaaaataatagcctttgggttcacacgaagacaaaatagctagaaaaaatgtgagccattggatagagggagtagtaatactttgtgaagtttcctcggcctactaagaaaaaaaatagttaagttgtgaatactccctctatactcataaagggagtcgtttaggacagcggcacggtctccaaaacacaactttgatttcttgtttctataaaaatatttattgaaaagtgatatatgtatacttttataaaagtatttttcaagacaaatctattcatataatttttatattttcaaactcaacaatttgagagttatttatgatttatattcccaatatttgacttaaacattgtccta

SEQ ID NO: 36186 - DNA, 506 bp, Oryza sativa
  unsure (1)..(506): unsure at all n locations
cttttgtgctctattaagctgaaacgaaaacaggtaaggaaaaagacaataattagtgcacccaatgtattagcattaaaacagtagttacttaattgtaatgcaaggacatctgaaaacaaataccagattaaacagatggggctaatttggaaattattttggacacaatatttggtctggaaactaattttaatgcataatatgagctaatactaaaatactatgttaaacttagacaagtgtaggtccttctaataaagataaggctcgtagatagtgtccggaattggggatgggaagaaaccgacagagaagtatctaagtcatcccttctctctaagttttcccctttttttaaagtttttttttttaaaaacccccccccccccccaaaaacaacagggctaagacaatattaataggaaagcaccatttctggaacacatgcagtgattatacactangggctnncnnnnnnnnnntgagnntactaccccttaaaa

SEQ ID NO: 36187 - DNA, 510 bp, Oryza sativa
  unsure (1)..(510): unsure at all n locations
tttcatgcctcccggcccgatctcggtcgatcatctgtcaatattgcttgatttctgaatttccattatgcaaacaagaatgtattttataacctgttgctatctagttacatgcacagttgtacctgtacaatccaactctctctcggccgtacgtgtctccttctgttatttttcctgtacattgctccgtatgaaagtaaatttaaatctcaatttaatgacataatttttagcaaataaaattcatttcatattatactaggttttggtcaaatgttttaaatgttgaatcttacaatgtgtacgcgtcttatattatgggatggagggagtaagaattaagctaaattaatttttttaaaaaaaaaaaaaattttgggagaaaaaaaaaaattttttaatatgatgtttaaagcaaatttatataaaaatatttttaaaaacataccatttattagtttaggaaacttgtgcntggnaaagatgaaataaaagataaaatgatgt

SEQ ID NO: 36188 - DNA, 1558 bp, Oryza sativa
  unsure (1)..(1558): unsure at all n locations
cccaagcattctataggggtcagattttgcaccaacatttaattcaagcaaggtcacacctcaaaaacccagtacacgaaacatatacaagcaagtaacactttaagtacatgcttaaaaaaaccccccccaccaaaaaaagggggggccaaattcccaaaantaatggcttcccaatttgccgtatgttcttactctgcttccatttgccgtatgttcttactcttcacttcgtctgattcttctaatttccttttccttttcattttggaacctttgattctcctaatttcatccccccagttaagcttcgctgccaaagcagtcttgttaaaagcatggataatcttagagtccctagcaggatcaaaaatatatgtagtcctctccaaatgtaccccgtcgacaagctattagcttcccatgactgatgattcgctcattgtcaatagtacgtctccccaaagccatcttctcgaaatccatggcatctccacagtaactttcaaatggatgcagaatcctggtcccttcaaagtcacaataacagcaacaagcttttttttaacagatcaattatattgaaccggctttgaaagaaagcccaacaaacaaacagagtcttataaaaaaagaccaaaaatagaaaaacacagctcaaacacaggctgtttttcccttgaagcacaggtacatgcaaacatccacacacactactccagacctagatgcaaaagagcaccaactgaactacatagctacaaatcttcaggcaatcgatctgccttcagttgtcccattttctccagcagacgatcacgccattcttccaagataccatgctcctcccattttagcatgatacatcatttctgaacaaaagacagagttttgtaaacaatatgcaaagggtatttaatcaacacattttcaaaaacccaatcgttcctaaccaaccgcaatgcccaacacacagtagccagaagcaccacccaaaccctatttattttcttccccttaaccaaatccaaaccctcactgatattacttggtcttttatccaagccaagagcatccctaatgacacaacacgcaaaactagctaaagggcacataaaaaggatatagttcgaggtttctttttttaccacacagcttacacaactcatctccccctctccacttccttttaaccaattgagtagcataaggtagtcttcctattcctgccatatacaagaaatgcttgatcttttgaggaattttactcttccaaatactcatcatttcagaatctttcacacctccaaaagttatcaatctatacatcgatctcacattaaagatcttgttgctggtataaggccaaaccactctatttgctcccccatccaaattatattcatttaaaaggcctctcaacctaattaaatcttgacctctgttatcatccaaattccttctaaactccaaattccaagtctcattctcccataaatcactcacagtcgcttcttgatgataatttatgtcaaacaactcagaaaaaacaaacttt

SEQ ID NO: 36189 - DNA, 615 bp, Oryza sativa
tggcgtgtgctcttgcatggtaatgccgttaaatgatgttgattccaatttgattaaaatgtagtattatatacgtcaactgtaacatgtaacacatgcctccgtgatgtgccccttgtgcttgctgtgacaagtacggggttctgatttaaaattacgacaatggcgatataatgggcttaataatctgtaaaatacggtcagctttgttttgcctggtaattctattgttgtgggaagtgtgggcctgctaactcagagttatgctatggattgccaatatgtagaaaatgcatctttctattctactgtagtataatgtggcatgtttttatcactgtagtctgcactctgcaaccacttgatctttaggaactgaatggttacagtttcttgtgtatgtccttatattagagcaaataattttcaacgtagatttaataaatcttctgatagaattagtaccaacttgttgtagactcaaggcatgctgcatttttcataggttgttgtgacggtatgtaattcatagttttcatagatttaatatttcttctgatagaattttttgaactgcttatgcactgactaacccagttttccattttcataggt

SEQ ID NO: 36190 - DNA, 519 bp, Oryza sativa
ctagtcctcaactgattaaatagcttcctttatttgatgatataattcaatctcaagaagaatttttcttcttgcttatagcattgacatagatagtatgaaattgatttccttgcagaaaaaataaaacaaatgtagatcagtatgagaaacatagagtggcgacaacgtttggcgtgtcattgcttaggagaactttccttgtgcagaaatgcttgttgacagactcctctgttggctcgaggccttctgcttccgcactgaagctcttcttacctaggttgatgaggataaggcttgggagttttgggtacaatatggaggtcatatgggctttgatgtaaaaaaaagatacaaaaataaaagcaagtctgatgacaagatcacatcctgcagatatgtatgttcaaatgagggtcgacgaacagaggacaaaagagatcatctcactaggtatcctagagctgaaactagaactgactgtaaagtacgcatgggtctcataataaatcgagaggt

SEQ ID NO: 36191 - DNA, 510 bp, Oryza sativa
atgatatgtcatcggcacctagccgattggctatcatttatagatttaaccacgaattctttgtttctatttcttgttgattacaggatcaaatcaactggcacgctcatacattcgaaggagagctttggacctgcactggagttaagcagatctctctggcctcgtgttttctatcaacacgcttttggcacgcccagtgggaccgattagaagtcagcaagcaattcttctgtcgcgtcccaaaacgaccctaaaatacatcctctaaattatgcctagaataattaaaatccgtgtgaaagcctccaacaattaaaatgtgcaaagttaaaagtcaaataaggcttggaggatttttgtatatttcctaaaagcctaaaatgcgtaaataaattttagtggaattttcagagcacaaataataattaagaagaaataaacaaagttaaaaaggttttataaaaaagaaaaaccctaaaaagtctttttccccccctccccctcttg

SEQ ID NO: 36192 - DNA, 1510 bp, Oryza sativa
ctatacaatgagttttgtgtgttttcgtttgcagaggtacttgcttgggcgaaagaaaagagaccaagcgtaactaatgcatggatgatcaaagaagttgattggagaccaaaccaagaccttatccaagcctacttctacctcaccatgtcacttttggtccatagaagacaatagataaagttctacacgttttggattcggattcggattcgagcctcctgatagcatcaacttcaaatggacctaggcgctgatctagaatgaatttcggggcccattagtacttgttggaaagcttatggagtctactttcagatggttttcgttcaacgtcaaaattcctaccgagctgtcaggaatctgtaaaacaagccacgtacctcatccagtcccaatctgattttgagttttgagccttgtaattgtgtcatgggctagcctgagggggtgtgcgcatattaattcagtagccatcatcgtttagagtggggttttgcttagattattctgtcgagaacagtttcgccgctagatcggtttgtaagaccccaacttgtgagcttaatcattcatctgcaattttggttgtattctatctcattcttgtttatgttcttcgattggcaaacagggattagtcttttcggcgaggtcattcgcgtttcgacacgggtgataactagaggagacgttgtgctgcgattgcggggctcaagagcgtgcgcgtttaagaagccggatcgatttgtgtcgcgacttcgcccaaatcgttgtttaatcgggaaccctagtgcacatcactaggaggaaaaagatcctgggagcctggtatctgtttagcaaggtttgcccctcaatccgctgttttattgttaacaaggcttgtaacctgaacaatcttgttttcttactcttctcctaatatattcggtaagtcttttgccgactttgattttttaaaaaagaattgaatgacgaagaagaaaatctcatgtacggtttcctctaaaagcaaaaatcttatctatctaccctatagttcaacaaatggttttactcattcatcattcatcgtgtgacacatccgacgatcgaaagaagtatggtgatttgcatcggacggcatccgctcctctccctccgcgcctcgcaccgcatccgcttctcttgcgcctccctctctcccgcacctctctccgagtctccgagatccgcttctcccgcacctcccctctctcgccgctatcgcctccctccccctcccgtcgccgccccagactgccctcccactgccggctccctcccaccaccactccaatccgccatcctaccgccccatcccggctccgatccctctcccctcctctctcttttactattgcaaatcctagctccttctggtcccccgtcctccaccgcaccccatgccatccgccacacagccgccgatctccgtcgccggttcaaagttggatgtcgccggttctccccgtcgaccgttgcccac

SEQ ID NO: 36193 - DNA, 585 bp, Oryza sativa
ataacgcaagaacataaaaaaatgtataaataggatgttgtataggattctaaaccataaaaataccagaagtagatttcataaaactacgtatacttcgattcaaactatcataaaactatatttaagatgttgatcacaaaactatatatttagcgtaaaatttctcacaaaactatatatttaagatggagtgtcacaaaaataaagaataagtagcaattttgattatcataaaactaaaggtttgggcaatttaatcacaacactataattttatagctccaatataacgatagtgctaggatttaagttctagaatatgtagttttgtgataacttcaatattaaatatatagcttgtgataattttgtcattaaatctgtagttttgtgatttatctgtaatttttgcaataagttaatcaaaatatgtagttttataaaatttattcaaatactaggggtagtgtatctgagtaatttacaggaaatctaacactggaactttgtggaactaaagagagagagtgaaagttcgttggacttctcaaaggaaatgaaaacatgagataggaccacaat

SEQ ID NO: 36194 - DNA, 658 bp, Oryza sativa
aaaaaagattagtcaagtaatgaatggctaaccgttatgaaatttagtgatgacaatgtttacctggggtatgacagcagggaatagatctgtcatatacattgtggccaattgatgaaatagatgcaacttccattcaccccaccatctgtcaaagttcctgctcctgaatcctgctaactcaatattgtcgatactgcctaagggaggtccttggaggttaagcagtgtaacaccctgaaaattcaaccgacaaaatcaaaactctaaaaattcggattttcaaaaactttttaaattaattgcatcatgccgatcttattcgtctattttatctggatttgatctcgaagattattaatcgtgagtaaagaatagttaaataggaataaaccgtaaaaacaaaattggtaaaatacatacaaattaaaataaagattaggtggggatagaaataaataaaatattatcgcgaccatatttggatcaattaaatttaaatacgatggaataagaattaaccctaattaaaactcaaataaattatataaaaataaaacatgagtaatattaatctagggtgagttcattagttgagataacacaaatattgagtaaaatgcatatgtgcaaaaatttggaattgtggaaccaaatt

SEQ ID NO: 36195 - DNA, 2179 bp, Oryza sativa
aaatctgtacacgtcagtatgattaattaggcccacatattgtcatactaagaacaataaggctttgtttgacaaatttcaaatcatggcctccaagaagcactgtttcgaacatttgaatttcatatggatttttttaaaaaaaaccatatggaatagtttcaagaatatgaatgcaatggctgcacctgcatataccagtttgggaacctactgctgtacagtgcgtgcaatttgatccccttgaatgtacagactgcacgctagtcctcttatcaaaagatcaattcagaatttcagaatgtcgaaaatggtccagattagaagatagatgaagtgcaggatgtcaaggaatagtccttatcctgaacgtgttccagccatcgccccatgagtagttgaaaaggactctgttcatgtcatggctgagcacgaaattatcttgtacatgctcgcttctcgagatataggtttagttcatcatgataacgtgattccccacgctttgctgcgggaattactaaataatttttaatatatatttttcgtaaaaagaaaacaaatgaaatatcagggtttatcattatttatcatgaaacaaacaaatgaaacccgcactttaatgtgaaacatattgataagtttacgttaaaatattataaaaatgatagatagatttgtaacatattatggaaatgatgagaggggtgatgattggatatattttcatattgatttgttgagttaaatatattgtagatgatgttgcatgtttgtataagattgaatatgtaattattgctgggtgatgatttggcatggttgcatgctaatctttagagtcagtgggttgtaactttatagaaaacatacatagatcatgatgcaagtttacagtcccgttgtcatggttgggaacgtctcttccggcatggaaaacggaacagttcattagcgcgcgattaattaagtattggatgaaaaaaacttaaaaaataaattaatatgatttattaaaacaacatagaaatatttcgtaaaatacacaccgtttagtagtttgaaaatcacgcacgcagaaaacgagggagaggagttgggaacggtaagaaactaactcagaccctgtttagatctagggactaattttttagtacttgtcacatcggatgtttgaacagtaatttgaagtattaaacgtagattaatgacaaaacctgttccataactttggactaattcgcgagacgaatctattaagcctaattaattcatgattagcccatgtgatgctacagtaaacatgtgctaattattgattaattaggcttaaaaagtctgtctcgtggattagctctcatttatgcaattagttttattattagtctacgtttaatacttataattagtgtcaaacatccgatgtgatatggactaaaatttagtccctggatccaaaaaccacctcagcctgatctatggtgacttcatcattctcaaaatatgctggcgtagtcttttgaaggtacatataatgatagggtgtacgtatttgaatacgtttatagagatgagtgtgcgcgtgttgtgatctctcgtgcgtttgtaccgtgtttctaaaaaaaataaagtacaattgtgataacagggaaaaagaacacctccgctagcttatccgtccacttgctgcatccctaaatacgaatgcaatggctgaggatcatctgtcgtttatggtagaggatatgcgttcaaatgtaacggccgcatttaccggtttagaaacactagtgccctacttacgtgcagtgtgttgagtgatttaaagcccttaattttattgcgtgatcaccctttaccagaaaagcaattcaaaatttaacaatggtgaaaatgatccattacaatagaaaatagacgaagggtggaaactctcaagccagaaaaataaacccttataatgaatcgtacgacgaaatggaaaaaatataaagttttgggtcgataattggttggatggaagaccccaaagatttagcaccattgatttttaaaacggcgaaaagacaatcaaattgcctgaagatggaactcaagaataaccactgactggcaatgctaaatccgattacttttgtggcggagattgatgcatgtgctggtgcaacttggaagtaaa

SEQ ID NO: 36196 - DNA, 1044 bp, Oryza sativa
attctaaggcttcggctaacaaatgccaattggttgtgggaccacagctggatccacagaagagaaacttttctagccacattagcaagaaagctacgtgctcccgaggagtgacaagccctttgcccatgtatgctgctacataaccagaccaccctgctatccttttggtcttgaagtcaaattggttcttggtgttcatactcatagggttagctgatgaagttacatctaatccagtaatcatgatgatgtcgatcaaagttggagtcatcggcccttggttaaataagaaggcattgatggtgttggactagaaattggctatggtgaaatcaaagttggcagccatcagaggttcatccttagcaaaattggctatggtgagagcaagcgcttggccgatcccaatctcatcccagtgggttttcttactagccgatatgcgttggtaccaggtggtccagctcttatcaggggtaggcttttcgagagatggccaagacttgaaagtattcttccagtgacccaagttagggttggctagtctaaaggggattctgttggtttcaccaatgatgaaatcagtggggtcaagattgccgattgggccaagaaaatagtggtttttgtgcgataggctgggaatcgcaactaggttggaaaggtgctgcaaatccaaaggaatcgggaagcagaaaacataatgagaaaaggagaaatcgatttcatgcgaggaaaagggatctagctgctgagtacttaccccagcgtactcggccgatggcgcagtagacgggctagtggaagacgacatcgccgcaggcggagatttgatcaaaagcgaaatcgcctggggatcgattttgcgtcggaggaatcgccgaagagagaaaggacaaagtttcgcttgggcggtgaaaacggaagtcacggcatgagattttttgagggcaacggttggtatttaaagcgatagaataacggccgaaaatgacagagtgcgaaacttgctggagtcggtacacggcaaatccggaacat

SEQ ID NO: 36197 - DNA, 850 bp, Oryza sativa
ttcaatctccttacgctcacggcgttcggctaatcttagcttggctttttctagtttaaattgatgttgctcaagataagcggctggagttaggacatcggccagttcttcaggaattagaacttgaactttgtgcaatcgtgtcctaatcgatccacagtcgaccactaagctatccatagaagaggcttctagccgacgcgagatatcttcaagtgttttctttgcatcgtcagataagggagctagagctttgcttgaagtatcttcttctgcctcatcaagataatctttgatatcaaaagaaaagagatcggctagagcctgcaggtataagtttagaaagtttgagagctaagtcaatatagtcgatctaaattcttgcatcaaagaaagacttactgggatagcaggagcagccggttgttcttcttccacaatatgatgactccccacagtcgatggagttcagtcactcgatgattgttgtacaggagaagaaggaggaggaggaggctgtaaacagacaagtgttagacaaaatcggctgaaatcaactagtaaaattgagagtgtcttactggtggagctggtttgagaattggtgctgccgatttcttctttatagcagttttcttcttctgcaactacaaaacctatgagtagtcggctgaaaaataatgattacaaaagagtttgcaaggaaagatgttttactctgaagaagtgagtgggggcagaaggagttgaaggtatctgcttaggcgaagccgatggtgttttttcagtatcacttacttcggctgcagcctgatcaacattgtcctcaatatcttcttcatccagagct

SEQ ID NO: 36198 - DNA, 2219 bp, Oryza sativa
ggatcggttgatctcggccgttcgttttggataagatcgatctcggccgtctgttcccgtgaaccgctgccgtgcgcctggtccaccgcaaaaccctagccgctgacgcaataaatccctttttccttttcaaaaataattcgttattgcgtcataattcaattaaaatccatataagtgttttaatccgatttaatctttaaaaattcataactaattcatcttagctcggatttagttggttcaagtctctaaatttttctaaaaatgagatctacatgttaaaaatatccacatgtactgttcatgcttgtttatgtgctgttttggtgattttgcttctttctgtttagattccggcgtttccggagagtccgttttcgcaggagaagaatttgaagagttccaaggccagcaaggcaagtcacacagatcccaaacaaccctttgagcatgttgatcccgtttaaagctattgtttctattcaactattgcatttattttcgaatgtcatttggtggaattaacctattgtttgttatagccctttttgttattggttcctttattccttgataccttgggttattttaacttgactagttgggctatatatattggttcgactagatattagatgtgattgcttagccatgcttagaaacattagcacactattgggataacttatgattcattattatttaatgatggcttaatgctagttcacgatggtcaatcgtgattggttaattaattccttgcctactaaaatttgataatggtgggttgtgagcacatggttttgagagtcgtgctcatgacaattaaggaccggttcacgagtttcggttgtgaaacattaaccgtgccaaccacaagccagcgtgggcaacggctttaccttttgtatagcatggttcattgcggagcaccagactgagaagtggcggagataagcccacgggggtcgctggggagtccatgccttgtttataagggggtgattatgatccaggaaaggtgcgctgtggtggattgtgttgtgcaaggggtattgtcacagctcctttccgaggtaccgcggtggtattgaggcacatggtgacatgttgtggggctgtgtcttgtgggtacagtggtacacctctggccagagtaaaactattcgaatagccgtgcccgcggttatgggcgggtctaacaatgtctttcgtgattagtttcacacctctcatcatgataacagatgctataactggtaataatttgtttagctcctggtttggaatggtatattcctggtttggagatagaactgtgcagccgggatggttgttcagaatggttgggcctatgcaacagggtatgttgtatagcgttggattaatattgtttaattattacttaactgttttattaaattctgaaatgtttattaaatgctgtttgtgcaaatgaaaccctactatgccacccttttgttaccctgtgcacttgcatatttgctgcgtgacttgctgagtatgtcatatactcaccttgcaatcattcatcagaggaagagttctacagtgaagctgatggtgtggaggattaggtgtagccttggtcaagctgcctgtggagtggagccgtctgcgccgtttatcttatttttcgctgcttagatctttattgattgacaggaactatctacctctgtaatgacattttattcgcttattaattagagtaataattgtactctattatcaatttgttattgtgtgcctcggctaattcctggacgagggttcacacacatgtaagcgtttggaattttggatagaaattccaggcgtgacaactgccatgagtgtgtgagagagagaacttaacttgaaccataatttaatatgtgtgtgagacttctctttcccgggagcgccagaactcctctcactgctagaaacatggacgcctagagtgcatgaggattgaagttcatggagcgggtactgccaatgcgaggttatcgaaaagttttgccgtgacacgtctcatgtgttgggatgaggctcatgtgttgggcagtcgcggagtgcgggtaaagtgtacatccactgcagtgtgagtaaaccaaatctattcgaatagccgtgctcgcggttattgagcaccgggacatgtattacacttggctagactctaaattctttaacttgtgtgggatggg

SEQ ID NO: 36199 - DNA, 2606 bp, Oryza sativa
gtttggctgcctcttctggaaaacattcaataccctatttctcctgcaaatttattttatctacaaagtacttcatccgttttacaatataagtcattctaacatttcctacatttatattgatgttaataaatctagacatatatatctatctagattcattcatgtctagattcattaacatcagatagatatatatgtctagattcattaacatcaatagatagatatatatgtctagattcattaacatcaatataaatatgggaaatactagaatgacttacattgtgaaacagatggagtataatataaagtgagggttaataggagccatcgatatcgtcgtgaaggtataaaatcaccatgttaataaaaaaaaagagagaaaaaaatcatatgccatcatggtgaggctgacatattatagcggtgtaaactacccaaacaattcaactaattttcgcaaattgagactaatattatagcggtgtagattaatgcacaaacaattaattcaactagtttccataaagcgatagattgagattatagcggtgtagattaatacctgaaaaattgaactagctttcacaaaatttgcagtgctctgtacagacgcattagctgtcaccagaaacggcatattcttcgtgaaatccaggcaggaaccgctcctggaaagctggacaacggagtgagatttggaggcgagtgtgtgcttcgccagggcatcaacatcaagcccatccctgcggtccagttggagaagatgggtacacccccatttgtttgatgaatcgtgatccaaagcatgctaatttttgccaattgcacgcccagatcttggtcctatgtgactcgtgtccacatcactgacgccgacacatcccttccgatagatgatggaatttttactaggaacagagataaatgcatagcctttttgttacttttttacttgcaacttactcaggagtatataacttcaggagcaattttctagcatgtgcgtttcttgataattaatttaaacccatgtggatttgctctcatggagtcatggtatacaattatgaactgaacttaattacaatattaattatctgagaatgctggagaaagataaaattcttgcgtaattgatattctgaagttgtatagagactgtagctgtaacttgttttttttttttacatttataaagattgagtagaacagtttggaatgaccctatgagagcgtatgaaatcaagtttctctttggcagctggtgggcatcgtgtttatccacttgattcatgtctttgtctatgtgtactatggtatacggtctttgtcttcgtacatgccacatttcactttcaaagcaaaaatacgaacaagaatacaaaacacaagaaagaaattcagccactttattttgaaatgtttaagtgcaagggaaaaacacgtgttgacgtgtaacaggtgcagacgccaaatctttagtgcatcatcattaaagaaatgaaaaatacacaagagtagttgcatacttgcatgcatatgtttcgatcctaaagtgtgatgacatgaatcatatccttagcccgatgaacttgtttttctaaaaaaaatgagtcaaatgattagtatattgtttttttaataatggaaatggtttgtattcggactctaccgatatatatattgctatatatatcagtaaagaaggggatataaacagtacactactaaggttatgtatggcagtgcatgcagccatgttacatgtaagagaagaatctatgtccccttggtgctgattttcggccactacaaggtcatgggtgtgacagtctgacagatatatactaccttcgttttttaatagatgacactgttgactttttctcacatatttgaacactcgtcttattcaaaaattttatgcaaatgcatatgatataaatcacacttaaaatactatgagtgataaaaacaactcataacaaaataaattataattacgtaaattttttgaataagacgagtggtcaaacatatgagaaaaagtcaacggcgtcatctattaaaaaacggagggagtatgttgtaaggaataccatttcgcttcaatagaccctaacaatttcttgggtttcatcactcgtctgcacgaacttagtgctaccggtcatgctttttcctttaaaaagttaagtatgatactcaactgaaaagccatttgaaacgcagaaattatacaagaattattcaattcaagttctgaaagtgtgtgctttctggggccaaaccaccatctgagggcatattttataacaaagtagaagtggatgaattttgtaggactgaaatcccttggaaaacattttatccttttgaatactggaatgaatcctatagaatcctttgacctttgaatgaaatagctcatttcacacaaactttagaggaaatttaatataagggctagagcccttgttttctcttcattcgtgactcaaaattcttatacttttcctatgatactaccaacaaaatgatttgcaaaattctgtgccttaatttcctctacgatttgttgtggcatgataccttat

SEQ ID NO: 36200 - DNA, 1001 bp, Oryza sativa
aatcactaggtgatactatatacaagcatcagtgcatcaccgaatacataattaaaaacactaggttttggaaaattgacagacctatatatctctaataacgctttgagtttttgactcttgagtgacgtggaggttttactatccatactctttttgggattttgatcttaattttgtcccaaaaaatttagggtggaaatagaagtgaaagagactggagtactagcaaaagcgactccggagacttcatatctatcggtatacagagcataactatttgaacatatgtaggtggatatgacattgttattccccaatttctccacggaactgccactctctaacttccaacttttccgtcacatcaaatgtttatacacatgcatgaagtattaaatgtggataaaaaaataattacacagttttttttttgagggaaggcactgtaggggaagcccccacagttaaataactttattatagaaaaaaattacaaaagatataaccaattcaaaagggaccgtctctcagaaacatttaatctaaaaactaaaagggaaagatcactcttaaagagagctttccaagaagaaattgagggtgctaaattctggaaaatcagggagttcctctgtttccaaatattccaggctgcataaagaattttctccacaaagtgcgtagacctataagaattcattgcctgatacagcatatctgtgaaggcaagagaaatatcccagacaattccaaactgtgcccagcaatcagcactaaaaggacattgaaaaaatagatgaaaggtggtttctcttgcacaggttgagcaaaggacacaagttagatctgaattattgggagggcaatgccttctgtcaagcatgtcataagtattgagtcggaagccatccaaaaactttaaccttcatagcgcacttactcttccagatccaagctagataactaggcgcatgtatatgcatgaaattaatgtcata

SEQ ID NO: 36201 - DNA, 3158 bp, Oryza sativa
tacgaggcttacaaatatttgtggcgaaaatatcgcgggtttacgtttataccctacgtagcaggtagcactagccaggggtggggcccgtgtggtgcgctttttgtgggacccacgatgggtgtactttgcactttgggggtggctggtggggcacacctgtcaggccttatctgcgacgtgattggttgacggggaataccccatccggcaggaaggcctgggattgggcggagccggatttttggtggggccacggcgttttgctacgggacgcccggagtcctgtccaccgtcgccctcgcggttgatgcggctcgcaacgccgctggcagtgggcccattctaggcctgccgctgaaaagtctttctaggaatatatagggcctatttgggggagttgttctgagaaagaactggtagtgcttctgaaaatccggaaaagccgggtttttcagcttctgtcttctagttcatttttaggattttacaactacagcttctcagaatctggaccaaaagctgaactgtttgggagagcttctgattctgggagaagccgcagcagctagaagctcccccaagcaagcccagtttctttttagatataggagtatatatatatatataatatgtagtagtaataatgaaaatattttgttttaaaaaactactttgagacactactaataaaaataggttttgcattcttgtttataaaacatgttcacaacttgggttgccatttatttatttattttgtttactgaaggatataaggtaaagtcgatgcatgatgaaaatatgttgtgcgatgctattcttttgtacctatcacaatgcatccaaagggcccatccacaagcttgcacaatcatctcttcattttaggtggaaggtgcactggtaatggcgattcatcggcaacaactcttttacataacgttatatggtagaatgtaagaacatcttttggggacacaacggcaaccatgctccatgcattcagtagtcatccatcaggcaaatccgcttcctcgtgtgtggtttgcaagtgcccttcttagggagctatggtggtaaagaaaaaggaaggaagaagaatcttaccatatagggttatatgttactttttctttttcgacaaagaaagcataactagggttctatgttaccattgccttgaaaactaggttttctttatctgagctttacttttaaaatatgtttgtaagctttggtcaaatactactttgcaaatagacttcatttttagatagtcagataagtatatatgtgtgttcgctagattcgcatacaatcggtgttttggatctacattgtatttatttatttatttttgaagaaaagacaagaagatctacattgtatttatgaaatgttagtacatccaagtgataacgattgggtcactattcaattattggcacttattcggcgtaaaatttcacgatatataagtgaagtaaaatcagcatatatacatagttttcgccgcgtcctggtatatggtcccggaagaaagttgttgtgctattagccatgcctggatatgcaaccaaacaaggaacctctctcacacccaaatccgaagaaaatattgcctggggtccccaggcctgtgatttgtataccctccttgaaaagttgatgttgtggaacatagcggttgatgagcaatttggaactttgcagggaggtcagcatgggcttacaaaacactcggactcatggtgatgctgatgtgatacactaaaattgtacaggccttatccacttaagataatgccatgtaattaagtatgttcaaaaattaaaatagataatgcattctaaatattttcttatgtggttagtatccaagaagaaaagggaattatttgagaaaagttggcgtccattattaccttttttttaattccttttgcatagggaattagcactaattatctttttttgaaaaaaatgaataaatttgtttctatgcatggacatgtatgcaagtttatttggaagtatataagaatatacaaatttttagagatgtacacaaaatattgtatggatgttacttgccaactagcacgtggccttgcgttgttcagaaatatcattgctgctaatttccaaaagctggaaatagcattttccaaaagctgtacacaacagtggacctgggtggatattcataagctttatgcttaagtgttttcactcaacattgtattttaggatcccatcaaaaaccactgtattttaggatcaagtactaccaccccctccgatcatatactacgttttctaaaactaaaattggtgttaaaatgtcatatatgaatgaacgaatgaagtattttgttagttgtttattttaggctaggaccaatggtccaatacttagtaataataaatagttgagtgcatgccttatgcagaggtcgaagtaaatttattctattatcttaaacaatataattgatggtaatttggtagagctctgctctattttctacactgaaaatttggtagaggtccgccctagtatttcctttcagagatctggtctcctaattcaccgtggatctggaagtgtgtttaacaaaaaaaaaaagattgttacaagtaaggtctccttcggaacaaaggattcgtggaggaaatctgtagaaaatttttaggagactaattaaagaggtttccaaggtgaattagcaacaaggcccatgggttagcatccaatgttttttgcagcaattttaactactctagcataaatttcacattggcattatagcaaggaactggtggcacaaatggatttttttttaaaaaaaaatatagctcagctctaaaaaattattgggtgttgaattggatttggatcagctctgaattttctattaagatctgctagtgcaaatgtgacattagctatacgccttgttaggagagctgcaattactttcataatctctagcttctccaaaaattctagattctcactcaaattttgaaactcagttatagtcctagtcaccaaaagctaggtaacctcaactcccccaaattctcatcagctggttattagaatctccagctctcgcaaaagacaataaaatgcaccatccatttgaaat

SEQ ID NO: 36202 - DNA, 532 bp, Oryza sativa
taatatttttggagtactgaaataatgaaaataactaaaattttaaataaaatataatagaaaatttgaatttttctgtattatgttggaaacaaaatctaacataatttcagttcaaagtatacaaccctaaactacaacttgggagcgataaaagtcttattttctaatatattttctcattgagaaaaacatttaccgctaaactgtagtttcatactgcaatactatatacacacaaataaatgctaaactgtagtttcatactgcaatactatatacacacaaataaatcaatatttcaacatattcagctcataattatatgtagtcatattaggcatatttttaatagaaaatatcttcaattaatatatcctaaaattcataaagacatatatattatacaaaagaaaattgttacttagagtttagaaagtacaaaattaagttatgctaaatattaaaaaaaagaaacgcgttatgtacaaatgatatatagtttcatatatattttttcttataaaaccaa

SEQ ID NO: 36203 - DNA, 526 bp, Oryza sativa
taattacatcaaaatattttttttcataaaaacttaatcagtaggtaaccctaatcagacgggttctcctcaccggcgacttcaaccagacaatcaccgtgacggctccaaagattcctgggttgtttttgttttaatttgatgaatagcctagatttctgtcaatgtcttctcagacaatcctgcttccatagtgccaatattggagaagtcacagctcagaacacacaagccgacctgccactgccagaatgagcccagctgggtcaacactagactccctagtccctagcacaccatgcatctctcaatggatctcaagcgtcaattcagcgtatctgaaaaagaaatggaaatgggaaaagagggagtaacagatgctgtgtttagttcatgtactaaaaattttttttttgacgcatacggacacacatttaaagtattaatcgtagattaataacaaaacaaattacatattccgcctgtaaactgcgagatgaatctattaagcctaattaatccatca

SEQ ID NO: 36204 - DNA, 713 bp, Oryza sativa
cttatatggaagttgattttgtcgatggaactcgggataacaagttcggcaagtggtcaccaaattgggaaggaccgtttcaaatctttaaggttgtgtctaaaggggcatatatgttgcaagggcttgatggtgaggtttatggatgagcgctcaatggcaaatacttgaagaagtattacccaagtgtttaggttgacgcatgatcggctaatgttgctgatgcatgacagccgatgtgttttacatcgtcttgagatggccgatattgttatatcgctcttagtcatttttctaattgtaatcggttatggtttgccgatatataacggctgaaattgttatatcgcccctagttgttttttagttttatcaatgctgttgacattataaaattggggggcacatatatacaaaaaatgaaaaataatgaaaaattagaagttatgttaatcggcataaaggatagtgaaaacagcagggtattaaggtatcttagccgattacaagaatttctaagtcctattacacaaaagttattgagacaagtactgctggatagccgaaatatctctttgcctaatttgttcgacttcttcaatggcttgggcatcttgagcatcagtcccgagaatgatcttcagggactcggttacgtcaacaacattcttgatagccgattggagccttgcttttgctcttgacagattttg

SEQ ID NO: 36205 - DNA, 598 bp, Oryza sativa
ttcttgtctgcatagccattgaatgcattatcaaatcaaaaaagaatatatttgtgtggttgtgcagctcgtgatagcttccacccaaaagcccgctcacagataaccaatcggtacacataacagcaacagctagacacagctcctgacgaagtaagaaaaccgtcgatgtcttttcatagggtgccgacaaaggcttgaaagtaggagactagacaaaactctaaaatgacatgatgcaattctttctaccaaattcaattacgacaagctgtttccaatttctcacagctgatcacccaacagatactgatacattgaaatgaatagcagtctgttgtaatagatgcaagggattaaaccaaaaaagtttacaattatcttactacattatggtaattctgttaagtcagttgtcactttgtcaatagtaacaggtgatccaataaaaaagttccaagtagagtttgcctatttaaggtgggagtacgaacaaaggattttcctggcacgactttctctagactctactacactactctaaatataaatgtctgtaatgctaggcaacttggtagtctgctcttttttgttttgg

SEQ ID NO: 36206 - DNA, 551 bp, Oryza sativa
aaagtgtgtccagtgtcctataaagactttatgttttccttttatctttaggaaagtttctttcttatcctacaaggactagtatctaccatgggtataaatatgtacacccgggatcattgtaaactatcttcacgatcaatacaattcggcgcatcgccaccttttaccttttctactttattttatcgtccggcaggacttggcacctgacgtggggctgcatcggtgttcgatctccggctaaggggtaagtccaatgttctgtcagcccaggcaattgtatcgtttatgtcggcgtcgttcaaggctgcatcagtacattcgacctcttggattgctctggtttagatgatatatttgcctacctatttatcatatgtctatgttaatctagtcttagcatatcaatttagctctatcggctgcttcttgttttagggtttctgccggtatcggctaaatcgcgttgctagattagattagcttagacatctaccaccctgaaaactcaatcaacggcttgattgtctagatattatgcttctttt

SEQ ID NO: 36207 - DNA, 722 bp, Oryza sativa
aatttacttttttatgaatgtaaatattccactacatcggaaatctagtggtgcggtgtacgcgtgaatgcctttggccttgtccaggcactacatatccttccagctgtcctacatcatcctgtagctgcagctgcagtcccacattgctcagtagatccacccctggccaccacatgtccttacatctaatatgttaatttcttctaaaaggatagcattgatgatagaaagcgctgtcacgccatcattgggcaagcaaaccagcttatagcagttaattggtgaaaaacattcaactccattcctttctccaaagataaaaatagaagtacttagatgccacatgtgtctgttatgattctaaatagtactccactatttagtagtataaatacaggaaaaggtttccattataagtttattataacatcaacacatggacttaaaatcttagagcagctgaagcatggcattaactctgcccatgatacagggcaaaccaccatgtgcatcactagtacttctctagtgtcgattctcaggatttagatatgcacatgttatgttttcttaccagtgcttgtatatatacggtaagcatctttgcacttcactctgagttaaggacatataatcatttatctgtgtcagattcgatcattttccctgcagttaggaggtcctttgcatcatagagccatgccaaggttggtgtggtt

SEQ ID NO: 36208 - DNA, 928 bp, Oryza sativa
ggttagtattaaatgtctgcaaacttaagtgtggtattcatatggtgctccatactactactatatcattttctctgaaatcttaaatggccgtttcagtgatgctataaccagacagtttccttccaatgatctacattattttgttgctgcaggcctaggtctcctccagctcaaccaatcattgcttcatgcttcctttctaattaaacatacaagaaaagacctttcattttttcctttattagtagtagtacttagtaccgttaattagaagcttgcacatcaatgtggctacctcctgggtacatccaccacactacaccttttcataacaccctgtcttggccatggcttgcataattaagtataccactctaaacaggctaagctaaactaaccctgatgtgattagcaactactgaaaggtggaccaaatacatactacctccgtactcgtaaaggaagttgtttaggacagtgacacggtctccaaaacacaactttgatttcttgtttctataaaaatatttattgaaaagtgatatatgtatacttttatgaaagtatttttcaagacaaatatattcatataatttttacattttcaaacacaacaacttgagagttattcatgatttatattcccaagttttgacttaaacattgtcctaaactttgttcttttctattgataatgtttgctcatatgttggtttgcgtgttgcaggtatttttatcactgcacatataattgcacagagataggatgcacataacctcatagagacatactgattctttgattggcttcattttttgggtgtcacctgttgcctgcaagggaatttttggtcttggtgatatatacgatttgtccctatacagttctactagttgaatcaaacattcattctttctatatctg

SEQ ID NO: 36209 - DNA, 564 bp, Oryza sativa
cccaaaatctgacctgcgcgacctacgcgttctcggtagccgcctcgggatgggggtccttgccggagtccagcacgagcgggagggacgccggcgacctcctaaccgagccccttcttgggtcatgtcaggacaagaacgagaagatgaccggcgagggcaaggacttcagcgagatgaggaatagtgcagcggactctgatccacttcagcaatcggaggtattcaacaatgttttcttgagttcttgattgtgcattcaacttctttctcttgagttcttagttgtgcattcgtcgggtcggtatcttgagttcttgattatgcattcaagactgttcaaggagtctctgcattctgacactttttgcattctgaaacgattgtctctttcttctaaaaaaattgcattatgaaacacctgttctgaaatgattgtgcctatttggtcctttgcagattaaggagtcgtccctttttggaaaatgcaaagaactcctcaattatggttttcttggaggtcctgccctcctaccccatctaggctctggactgaggaaaaca

SEQ ID NO: 36210 - DNA, 632 bp, Oryza sativa
agataacttattaatgtatgattagactttaaaattttttattccatcttttatatagaatgtttttactaaaactcattgtatatataggagtctaaaaaacatatgctaaaatatcaagatgaaatctacgtctcaatcagaaaatattatggccttagtccgtggaagtaattgaactccattagatatgccacgattgatttagcagtgcatgtcgtttagtttccataggaatacattaggccagttaaccgggcaccagagcaggagaagacaaatgcagaatggtgaactggagtacatgagtaatactcctgtagtgtacgctgtgtattgttaaaagcggcgtatagaaggaacgttgatctatgattattagagcaggtacaattaatagcagactacaaaccagttataaatatattttaaaaagataaaagaagagagagaagagcagcgggctatagatttatagccagctgtagcatgggctccaagatacatgtgcgtatgataggaaaaactatgtaatcattgtgtactatatgttataggttactattgtattagttagccattcaattttctatagatgatgtagagcatgtggctggatactattaaacttg

SEQ ID NO: 36211 - DNA, 518 bp, Oryza sativa
tgaaagaggcaggtttgatcggaagacacagagcatttcaacagtcggtggcagaactgaagacagtctttttttttttttttgatggcgaactgaagacagtcaagagcagaggaagcagatgaagaaatggttttcagttcaattgaatggatgagtggatagagcgagaccatgggccggtatgcggcgccatacatgggctgaatctccggcccacacagcacagcccacaagtcacagcgaactctccgaccgttgggggtcggaaaagaattctccgagcccctactgggtccaagacaaccgttggatggaggcgtacgtgcggctaggatcaaaagcttgtaatgtaggcccattagaattgctgcccggcacggcccaacccaacgccgcgcataggaataagttcactttgtgaccctcaaaagtagtcgaaatctaatctataatcctaaaccacaaaacaagatttctcgacccctaactctcaaaaccggtgcaatttgactccc

SEQ ID NO: 36212 - DNA, 823 bp, Oryza sativa
agtttcgcttgggatgcgttgcgcagaacgaacaaaccatcttctgaaatccaccgagatcaatagacagggtgatgtttatattggtagaaatacaagtaatcataaaagcagtaaatttggatatgccaaatttaacagaggcatcgaacgattgaacatataagaatatcatccaaagatgttcaactgttaccgcaagaacacggcaataaccttctttttagtgttgtgcggaaatatgttgaacggttaattgacaagcaaggattaaccttacttataggcctgttaatttgccattatgaaacgtgataaagacctagtaaaccaaagagaattacccctacattacgaacttacgattggtggcgtgcgtatgactcgaaatggtcgagcagcttttgttggagctctgaaacaaaggcaggacaacttgtggatagtacacgtcaaaattggaagtttggttgaaattgaaattggaatgaattggaagtttggttgaaattgaaattggaatgatgtgatgtaaaagttggaagtttgtatgtgtgtggaaagttttgatatgatggaaaagttgaaagtttgaagaaaaaatttgaaattaaacaagggcctgatgagaggtctgcttagctcatgcctgcgtcagtggaccatccctgacgaccttccaatcttcgccactactcgctgcatggtgcagatcatggtgacaagaaaccagaaacaaaaacggcggtaggaatctgcaagtcttgtgccaatggttcacattatcaatgtacaccgacagcagcgcacacagcctcaagtt

SEQ ID NO: 36213 - DNA, 705 bp, Oryza sativa
gctagtctcggtgagcgggtgggccacacggcggtcactggcaggtgggaccgggatggcagagagggagagccgttgcttgaaaacgtttgcaaaagtgggggaatccaatgagtggcagagtatagagccagccgttggtgtatgcttttctttctctttctttctttcattcttttttttttttgcagcactgtatttctgtatgtgtcctgaattcctgatgcaaatgtattaggcatactctccggcctcaattctcccaacgtcaagtatttgtcatcacagttcatttgatgttgatgttttagctatcccagcgccaaaaatttttcactcgagggagtaatttagttcattgattaataaatttcaagtaaattttacaaaactatataattaaaaatgggtatcataaatcaacaaatttagcgtgaaatttatcacaaagctataaatttaaaacatcatatcacaactacatatttaataataaagttgtcaaacaactgcagattttagagtctatatccatagcactattgagattatcaaagttatagttttgtgataaaaccaatgttaaatctatatgtttctattatgattccttaaatatatagttttgtgataaattttcttatatacactttcttaaatctgtagtttcttaattctgtaaattgtgatagattgttcaaaggg

SEQ ID NO: 36214 - DNA, 1297 bp, Oryza sativa
ctcatgtgcggacaattcaaatccgtcagctactacgcgttggtttgtgctttgattggctcaccatctcttctacttctgtatgtcttttgcctcgctgaaaatctcagctgctattgagctcccaattgtgccactgacaggtacatgtaactgttcttaacgacattgacgcgctcacgcgcatgcgccgctgcactggacacgcattgcacgctgccgcttgctttctatggacttcagttaaagcttgagcgtatggctgaagaggagtaagagaaagtcagaaagattttatctcgacttgttagcacgtttttccaaattattaaacttacctatcaaatggtatgtttcgttgaaaattgtctttgctttaaaatatcaaataaatctatttttcatgtttaaaatagggagaatagctaatatggtcactaaagtttcgctcctgggtcattttagttcttaatattttatattgtccaaacaagtcctttaaatttgtcatgtgggctaatatagtccttggtcccaccaaaatcgccacatggacatgccatgtcaccttcctatgcaaaatctatatgatttgtccaatttacccttacgcataggaaaataaaaaacaaaaggaaaaagttaaaaaaaatatatggtatatgcaagagcaaaaatatacctcaaaatggtgaaaaaaggaagtattttttcctatggttatgtctaattcacccttatatttatttttctatgatatacgtaagggtaaattggacaatttatttagattttgcatgaatgatgacatggcatatccatatgatggttttggtggacccaaagactattctaggttttatgacaaaggttaaggatttatttagaccatttaaaaggttagggactaaactgatcctacagagaaactttagggactaaagtagctattatctctttaaaataattaaaacttaggacctgttcagatagatatcatttcaaaccataccaatttttggtaaaattgtgaaaatatgtgcatctatttagtttcttactaaactctgataaataagtaagaaatcctactaaaactttggcaatattgtcaaattgccaaaaatttggcaataccaaaatttggtaaggtttattttggtataatccgaagagaccattaattattcatgcactatagttcaactttaacctgttttttccacagcggttttaaactgttcaaccagcattttgccaggatatttgacaccctctcaaggatgtgaggttggta

SEQ ID NO: 36215 - DNA, 632 bp, Oryza sativa
gatcctaacccgtagggtcctttgccaaagtctagggtatcactggcgccggagaagaaagtcgtcggagttggaggataaggcctgaagcacaaatcgcaaagttcatccggtggaccaaaatctgcaagatttggaggtagattttcagtcaacatatcgttagcatttatcggcgaaaaaaaatgagggccctaaatgtgttgggctgatatatagcccacagtttattgggcccacttgaggaccaaacattagctctttaggcccattttttaggcccagtcgttggggaagcccgacgatggcgagcagtccgccgcaacagccgacgacggcggcgggaggcgccggcgttcttcccgccgccggcgcgcgcggtgcccgtcgccctggacgcgatcctgtcgcggcgcgtgggagctcggtttcccgccgccgacgatgtctccctctgcccgcctcgccgcgccgcgcctcgccgcgcatccgaggacggggacaagcccaatcaatgccctgccgtggcggcctcgccgccggccacctctgcaacctcgcttctcctggtagttcccctctttccatgctctgcatttccctgatctgggtgcccgtgtttttgctctcgt

SEQ ID NO: 36216 - DNA, 1054 bp, Oryza sativa
atgatgtgagtgctctctgtttctctctctgacctaagctctctcagggtctcagctcttcaacctagctagtactccatctgtctcataagttttcgcttttactatttgaccacttgtcttattcaaaaaattttgtaattatttttttttgacttactttattatctaaagtattttaagcataacttttcgttttttatatttgcacaaatttttttgaataaaacgagtggtcaaacagtgcaagcaaaaactcaaaatcccttatattataggacggaggaagtacttgtttccaagcttcctgcattgtacactataatattctagaaccatagtcttttattactactatcctagcccaaaaatataataacatagaattagactaaatacattttaatactacgaatctggataaagtagtatagatttgtactacttaaatatgtcctgtcctttctatgctgttatattgtggacaaagggagtagctagtaggtacgcaaaccatttacatcatcacattaaaatgggaactagttttaccatgcatgttaactttactctccggacctctagaacatatgttttccttttcattagttctcctaccaattttgacattgttagtagcatgttttgcgattaaatcacaaactataaatacatagaaatgtttcgttgcaacatgcatatatgtggaggtgagccatgcatgcgacccataacaatgacacaatgccaatacctttgtcccaaagtgtattaggttgtgttcgttaccggtggttgaaagcaaatttctcatacatgaaaaatggaacggtctaatagcacttggttaattcggtattagctttaaaaacttaaaattagattaattaatatgctcttttaaagtatttttttataaaaaccatactatttaacaatttaagaaacgtgcgtgcgaaaaacgtaagagtgttgcaaagaacgcaaccttattgcattgccgagtgtagtggcactcggcatcgatgtccttgagtgtaaaatgtcaggatct

SEQ ID NO: 36217 - DNA, 2388 bp, Oryza sativa
gtttgaggagaaaaactacgatgcacctcgttatgttgtatactcgttccgtcccaaaaaaaagacaaccttgtaatatgatgggatatatctatccagattcgttgtactaagatgtattacatcctaatacgatgttggctttttttttacggaggaaataggtaagagtaggagggtggttaagagtaaaatgtgaaaaaaaattgaatgagaagtgattgatagaacaattagtaatatatggtaacaattattttttagataatttttttggagaaaaggcgcaaagcgcccaactttttactagaaatcatatgagttcatacaacaataaacaaaataaacgcgaaaaggctggggattttccagcttatatgaggcgcaaacatgcaacacgcatagcacttagacagcgcaaagtctacacacaattaacaagtctggcaccgcggacaattctgaaggattaagacaatttttttaggctgtgtttagattggcccaaagtttagaatttggttgaaattagagacgatgtgactgaaaagttgtgtgtgtatgaaatgtttgatgtgatggaaagttggaagtttgaaaaaaaaaactttgcaactaaacacacccttagataaattttaattctaaaaatataattactatgagatcggatgtgctgtattttaggacggaaaaccgaggcggctacactggaaggccgctgaaacctcggctggtttttgcggtcccctcgcgcggtccagccgctgctcggcgttgctccgacctacctgagctcccgaacccagtccaagccgggttgtacgggaaccaccgacactttctctgtcaaaactagctggaactattacatggcgctcacaccaacacaatgacaggtagcgacccgtgatttgggtggtggtgatcgcaccaacccaagtgtactccaccgagaaccagctccgtaaatgggacaaaacccaaccccactcactaaggctcatgagtggaatcactccaaaggtggggttaattgcatttggtcttgtggatatgcacgtgatttgtccctactgtttactaccactctttctgatctatgtagataagaccagaaacaactttgtaacagaattatcctatctaggaatacatttatatcgctctcttttatattataggtcatgctttaattttttttatagctaaactttttatagtttgattgaatttataaaaaaaaaatgtaacaacattttcaacacaaaacatacatattatcaaaataattaaaactactaatttgatattgtagatattattaaaatttcctataaatttaattaaacttgaaaaaatcataaaaaaatcaaagagatatgtaatataaagtagttaatacactagtaagagacatgagaaaaaactacgttcaccatatacaatatgcctcaaatcaaaatataaagattacaacttagtgtagtaccggagtcatggatgcatgaccctattcaacaggatacaaatttttaatatccacgaatataagttcggtgttacgtgtgcagtggtgtagtggtgcgcagtatccgcatatgcgtttgctgtgtgcccgcgaaaaaaaacagagtactgtttaccctgacacgtacaaagcctgtaaacaaacgtgccacgtcatatcgtgcggcgcggaggaataaatacaggaggtgcaagcggcacgctggggcagaaggcaggcaaaaggcacactcattcgcgggccgcacgtgcagcggcggcgcggcgcgggtggatcgccgacggcgagaggagcaatggtggcgcccggcggcggaggaggaggggcggcgtcgtggccgtcggagggggaggtaaggtgccccgccccagtggcattggtcgctctcgtagagcggtgcgggtggttccgatcccgcgcggccccgtagatttttcgcgtttctgcttcagtgctttgtttgatttggggggcgaatgcttgcggggctggggatcgcgacttctccggcgaaatattgctgcgccggcggcagcaccggcggggcggtgaccccccgtggccatcgatcgatggcggcgtcacagtgtagtagaattacctgctttcccactgcttggttggtggtcaatctacatctaattaccatgtttgcaaaaacattcaaatatgcacctcttttattattattgttgttgttgttgttgttgttgttatttggaaaggaatcgattttagtttttcagtttggtagagtggtggtgcataataaaagagaggaaagtatggattggcagtacacgtgagatggtaatgttagctcgaattgatgtggcaaccatggtccatggatgcta

SEQ ID NO: 36218 - DNA, 687 bp, Oryza sativa
agtcaggcagcaatgtagcataaatggcatgtgctttaatgtcatatcgtcgccgcataaatgtgacataattggactgttctatacatgtgtggaatgagttgatgagaccttgatgattttcagggggagtgttaagtacttgacaataaacctagctataagaattttcctctgcaaatgttggaaatatattagcactagcatagtggtggtgatttttcctacaaatagaataaagctcccacttgggtttgtatttggagagtctttggattaagtctgtaaacctgagtttatttgagttacaaagcagatccatcaatattggtggaattcaatttctctttatttctgagcagcacacgtagtaattctttaaaagggtggaagttgcataaactgctaatttacttagtttcgtgggaataaattttcaggtcataacatattaaatcagtcagcagtaagagaaaagttctgtatattggatcatcaccatctctaactgactagaatcaacacaaacatccttgcagtaactattttttttaccagttcttaacctgttgttggcggtatctaccttaggttatactctacctaaggtaatgaattagttttatcatttcaaaaattgctggataccctctaatgttaaataattcacttcaaggagagctatat

SEQ ID NO: 36219 - DNA, 1034 bp, Oryza sativa
ctgagctacagagactactagattgatgagtcctagcaaaagtggaacacagtgtcatagtgtgcatggtcctagaaggaaaacttcattgtgttgatatatactctttccttttctttaatactaattaatactagataataccgttaacttttacatacacgtttgattattttgatcttattagaaaaaagctagcgataatttcaccggttgatttgaccaaatggcacaataattttctgacacgtgtcataagagactgttaacaaccaaccatcaactacacaaaacaataagttgacatacacccactaaaaattgaaacagtcatccagcgaaacgcaatgcaaacacaatacgttctgacaaactcaaaatttagggatgatatgtttcatcataaaccaactctcatcacagtcagaactcaaaatttagggatgatatgtttcatcataaaccaactctcatcacaacagaatttagggataatatgtatcatcataaaccaactcagatatagaaagaatgaatgtttgattcaactagtagaactgtatagggacaaatcgtatatatcaccaagaccaaaaattcccttgcaggcaacaggtgacacccaaaaaatgaagccaatcaaagaatcagtatgtctctatgaggttatgtgcatcctatctctgtgcaattatatgtgcagtgataaaaatacctgcaacacgcaaaccaacatatgagcaaacattatcaatagaaaagaacaaagtttaggacaatgtttaagtcaaaacttgggaatataaatcatgaataactctcaagttgttgtgtttgaaaatgtaaaaattatatgaatatatttgtcttgaaaaatactttcataaaagtatacatatatcacttttcaataaatatttttatagaaacaagaaatcaaagttgtgttttggagaccgtgtcactgtcctaaacaacttcctttacgagtacggaggtagtatgtatttggtccacctttcagtagttgctaa

SEQ ID NO: 36220 - DNA, 556 bp, Oryza sativa
acttaattactattccctccgtcatacaatataagagattttaagtttttgtttgccacgtttaaccactcgtcttattcaattttttttacaaatataaaaaacgaaaagttgtgctcaaagtactgtagataataaagtaagtcacaaataaaataaataataatttcaaaattttatgaataagacgagtggtcaaacgttgcaagcaaaaaacttaaaatcccttatattatgggacggagggagtaagtgttaaaatatgtgtgtttttctgtaacttcaaccataaaacataaaacatttagttttctgaaatttactaatgatagtatgaatcgagaaaaaaaaagtatgtgaattgggtggcaaatttctccaatttcaccgtcaccgcctcattctttccgatcctccgcgccgcgctgctcggtgctccgccgccgccgccgccgccgcggttcaccgcaacgagcatactaccgcctctcttcctcgtcgtgccctagtgggaactgggaacccccgccgcgcccagctggtaagcgtcgcgctc

SEQ ID NO: 36221 - DNA, 603 bp, Oryza sativa
tatttttattatcttagtttggatgtcaatccattaacccattaactttgactaaaaatctaaaatctgcttcggaaatgttgctgcgaagtggctgtcgtttagattagttcatgaagagctaccaagtaccaagtgagattcgctcgctttggcttacttagttgtaacaaaccaatttaaaagacgaattggtgaaaattggagcattcgaggcagtaatatgtgaaatttgagattgatttggaggcggtgtgtgcattgttagcattacaaaaccagttgtaaagacaaacaggagaatctaagacaggaatgtgtgaatttttttttagattttatagtctttttcaatcctcatgctggacaatcaacaagaatgtgtgaaaatattttattcaaagagttctaactcatgctggacggtaaactttagttagaaaatagtgatggactcgtatttcctgccaaaatcactatatagaaaccatatgtcaaaatctgtcaaaactaggaactacatgcttcacattgttatcaacataatgaatgagcaagcaagatgtcaatctcaaactgaatgaatgacacaagcaagcgatc

SEQ ID NO: 36222 - DNA, 1099 bp, Oryza sativa
  unsure (1)..(1099): unsure at all n locations
ggaggcggaggcggaggaggacggggtgagcgcgagggacggggaaggcgagtggcggcggcgggagcgcggggtgcccagggcagcgggggagtggcggaggggaggcggggatgagggcggcgaggacggcggcggcggcgcggtgatgcgggtcatcgccgccgacgaggtcgagtgcttgccgccggagaaagagaaatgcggggtttggggtttgggatggcaggtcaggcctacttgtccatgggccttagaaacaaataagtgggcttttgggcttttgaagggaagtgaaccggtccagccagtaatggcatgacatgtgggacctacctgtcgggctgttccactacctccgtccaaaaatattatattttgagatgcttctaaaaatacattttttgaaacatactacagcgcagacgctcacaacttacgcacactcacccctatgaatacacgtacacatatctttcccctacgggcactttcaaaagatgagaaaattgcttatagacattagtatattaccataaaaattatatacgcgtatgtaaagcttttattagtattttagtaacatcaggtatttgttgctacttcctccgtttcacaatgtaagataattgcnctatttttgtatttcaggcatgcatggtggatcctgaccataaaacagaactggatcttgacacagaatttctgacaccaatgtctttgcgaaagctaccgagaaagctcactcttacagcacataatacatgcaaaggcacatgtatatgtgtggctggcaatttacaaaatagaatgattttgtagtgaccatctacaaatgaatcgagccattggctaccgcttacatcaattcagagacttgtttattgataagaggaacaagccgttgtaaaatactatatgcctgccgcatctactttatgacacaagaccgtgatgatagttaaatgtacttctgtatagaaagttgcttgggatgttcgacgtgtgctggtgcatgaaaaatctttattttttttgggtaacttctgaaacaaacctattggtttttttttacaggtgaacacaacgccaatcatgt

SEQ ID NO: 36223 - DNA, 720 bp, Oryza sativa
ggggtgtgacactgatatatttgctacacgtgttgtgatttttttccatgacatttgaaagtggcagcatcttgcattggcctttttctgtattttactttatttacattggtttgtgcctctcttcagcattattattcaaggtcgatcagcagttcatcctaccgatatggaagttgatgataaccaaaataaagatgaaagcgctgaaggatacaacatggaggatggaccttccagtcacaacaaactaaatccgttaagtgcagatggtctagtaggaaacagtcttcctaattggcatacatacaatgtgcaaacacctgatctgaatgatatgctattgaacaatgatgggaatgcaggaccatcagcttcatactatcaacctagtcccttcccttgtgatgagcctgcatcaccagagtttgtaagtgcccaggccccggctacacctggcctaatggaagagactgttccttccagagtgcatgaaagtcctgttctgagtccacagcgaaaagcttcaccatcaagcaatgatgaaactgcaaagacagctgaaaatgctaatgatcttgtgggtgctgagacgactgaacttgcattgacaaagcctgtgcaaattgaatcttctggtgctgtacaggagattgattccttgagtcaacaatgtgcaactgaggaattgccaccccaagctgaaacctcaaacttgga

SEQ ID NO: 36224 - DNA, 787 bp, Oryza sativa
attagaaataatccacctaaatttaaactctagacttaacacggttgtatttcaatgataagtgacgtattcgtgataactttatcaatattataagatatactagtccaatctttcgaagatgcttgtagagataagatttgcgtgcatacgtttataggagatgcatgtgcatgctgaacgtctttctatatgtaaaaaagatgagattgctaaatgaacgatcaatcagttcatggccgttgattgcagagtggaacaccctctgcatcgatcgatctcgccatctttgtcgtccttgatagaatgacacgataaccagtcgaacgatcgtacgtagcaatcgtaacgaaccaactgcttgacgtttccctgttttgggcctatatatacagaaatatcctcgtcagcctcctgatcgccaaaagaccggccctagctagctcaccggcttttgttggtggcgacggcgtgcctgccggttgaccatcgccggccagcaagccaatccggccgtcggcgtccgacaagtcaatcctacctaaaaatgaaccgatgcgagtaagaacggcccgaccggccgacgtggcacggcaacgacggcgtcacaatccggataagatcagttcccatccacggcgtggttatatgtggtggtcggaacatgaagctagctagttgtaataaaaaaaatttagttagggcagataattaattaagacgctataaaagcgtcattatggccgcattatggattgcaacccaagcaaagtatatacagttaaga

SEQ ID NO: 36225 - DNA, 1093 bp, Oryza sativa
  unsure (1)..(1093): unsure at all n locations
attatcatgcattccatctatatacatatcatgtagtatggccgcaaataaanaatgcgagtgcaagatactcaaaatctttgattaaatcgtctcatgaatacgcatgatatagtaataaagggagttaagcatatgcatgggaaaaaaggaagaaagagaaaaatgaaaaaagggatgggaggcgtacgaacccgcgcacgtaggtacgcacctatgctgaggtgggaccctgtagtatttagtttattctaagatcaatttaatctaacggtttataatattggacctaccgatttaagtggaaagtaagtaatagatactttgattttttttcttataatttctaatatttgccctaatttattagagcaccacgtggtagcttgagagcattttaaggaattttaaatgactaattagaatattaactgcgcaatatatatgtatgggacatatggtagtatttagcttcgtccatgtttatatacatgtatagagaaattaattttgtggctagcaagccattagatgtctaattaatagaaattaattttgacacatatttacaattgttcagagtaactcttacatattcaatttacgacttcgatgatccgttgatcaccaatttactaatcaccatgacttgcatgaaaaaaaatgtagtaaggtttaggatagatgaaattgatgaattatataatttatgtgatagctatttgagggtataaacgaatgaattgctaaaaagttataatgttgtttaaagaagacaccatttagaaacttagaaagcatgcaaacaaaaatccaaaatatggaatcgggaaaaaaaacagagtgccttaaactccatttatcacccttgtcgtagtaagagttctatggatattcgtcaatattacgctcacatttataacataatgattcctttcacctgtacgaatagatagtacaaaatccaaatacgacataacacaaatacattacaattattatgtaatcaattcttggtttcaacttaaatagagctaattagtgttgagaaaaacataacccatggtacttaattattctctcgctacatcac

SEQ ID NO: 36226 - DNA, 686 bp, Oryza sativa
tttatatttcaataatataagtgtctgcgtatacgcgcgggccaccttcctagtttaaataaagaacttagcccctcagataaagatttaaactcaggaccttaagttgctactcagcttactacaaccactagagtatatgcctttgggtaaactgctactgcaaagatgcaggaggagtagatgggttgagatagaagtgtgtataataagcgaaaagagcaaacgggatatatgatgaaaccacgtcggccagtttgatcgtccatcaattggtggcaaaaaatgtgcctgcctgcaaacgctgcaactacgcctgcatgcttgtcggggtaaacgcaaggtgttcttcttcacgccggctgcaactacacctcttgcattcttgttactacaaactgttcacagaccaatacaggtataggagtagtatacaagaagtagaactagatactcctactccactgatgtaaacaaaaccatactccactccattgcctgtcattagcactagtagattctcataacactagcagttcagtagtaccattgcctgtcagcgaaaatattggagtactcgcagtactccaattgagagaatagagtactggagtactttgtcgcgtccttgcgtctgtactagtactgtttgtagtactctgaacaagaaaaacggaagcctgcac

SEQ ID NO: 36227 - DNA, 595 bp, Oryza sativa
cggcgacacggtaaaatggcccgaacagggagcagacaatcgtgaggtgtggggcctgttcttgtggttgtggccaccgcgagggctcgaagaccacgacgacgggtgcaaacattggcaatggtgactcagcaggctaacccagagagatgggcccggtcaacttgccatgtaagtgaaaataggggattatagtgccatgggactcaatgtgcgcaggtttgtgccccgggccggcacaagacaagccggaactccggaagctggtgagcccaacctgctcctgtttctgggcccagaaagtttgtcatgggcctggcctaacataaactgctttgcgatccaagcccaatacatggatgcaggccgtaacagagtaacgctgcccccgttctgcagttcaagtggggtcagtgtacaaaccagcgaagctggatttcttacattttagccattgtacacatgttttttacaaacaaacctctggaataaaaacttattctaaaaatacacatgttttttacgcttggttaaatttcttgaggtcaacgacactaatgttgatactctcatcttttatggtagctaagtcgac

SEQ ID NO: 36228 - DNA, 706 bp, Oryza sativa
ggatgattttcttaagtttggggttagacttgtttgatgtacagggcaaaaaccgcgattcaaatctgggccggatcactagtatagattgcggcccagactgcatatggactaaaaatcttccaaaaaaaaaaaaaacagcacgagctgcgctatcttggtttggttcaaacagcacgatgattttagtggctttgttggcgcgagttgggtggtttcccgcgctcgtagcgtggcaatgttgcagcgtgacgagtcaaccaaaaatagcttgggggtctcgaatcgtaccgcactttagccgcaaacggccgaccgactcgactcctccctccatttcgactcggggctccggccggcctcttcttcttccggtgagccaccgacaattcgattcttacatttcgtgatcgatcgattgatttcgtgttgtaatcttgcgtgatcgatcatggtgtgtcaattaatggcaagggcgtggtcatggagccccagcccggctcgccggagaccgccgagctgcccgcgcctatggtgctagagccgctacggccgccgtcagatgaggcggcggcggaggaggagaggccggcgttaagcctgataggcaatcatcttcatcgtcttcgtcgtcgtcgtccgagtagcagaaggaggtgtccaaggacgtcacggtagagtccagagtcgtcgtcccgtcggtggt

SEQ ID NO: 36229 - DNA, 677 bp, Oryza sativa
gtcgcctctccatcatcacaagcgtccctaaccatgtacccctatgtgtactccgctgctaccatgaaactacagtacatgtactgtccgattttgttcctcatgtgggccccggctgtctgccctgcccagcattacaatttataaaatcttatttttgtaagcttagcattacaagtattctttgttaattacaggctctgtttgtgaccgtgatttcatattgcccacattttttttaggggaattgatattaggccacttgcagagcatcagggcacatcatggacgaaagcgaatctcgaggcggatcatggctcatcatcctcaggatcaccatcagctatcttctgttcttcccggcccatgcaaactctctgtgcaatttcacacgcaaacatgaaaaactacaagacgagaattaacacgaatccatgtgaagcagatttgttttttgagtctaaacgaacatgtagataccacatttgaagcacagcaaaatactagtagtagctctttgttcatagcaagtgatctaactttgcacctgatgaattttctcatgttcaagtacactacacgcttcttgtaattacgcgatgtttgatcgatcgaccaatctcgcaggaacacgcggagatgtggcatgtactgatcctaacactagtgtttgatct

SEQ ID NO: 36230 - DNA, 598 bp, Oryza sativa
taaggcaaagttgtggttgggttgaagcctttatagcctaagttcactattgaaaaggcctattttcttaggcatgccaaaatttggcttcaaaccaaatagacactaaacactattaaaattgccaaatattgataagcctaatttaggtctcaaaccaaaccagcccataatgtaaatccgtgtgttagggaatgaattgaacacgtagattagtaggagtacctaagggtgtgtttatttgggaaaaaagaaaatttttgggtgttacatcgaacgtttgaccggatgtcggaaggggttttcggacacgaatgaaaaaactaatttcagaactcgcctggaaaccgagagacgaatcttttgagactaattaagccgtcattagcacatgtgggttactgtaacacttatggctaatcacggactaattaggcaagattcgtctcgtgatttcctctataactgcgcaattaggttgtatttctatctatatagaatgctacatgtatgtgtctaaagatttgatgtgttgcttatggaaaaaaaaattttggggaactaaacgggccctacaagtggagtaaaaacaaacctg

SEQ ID NO: 36231 - DNA, 575 bp, Oryza sativa
gagaacacacgtctcgcatagtttcttcaacgaaaacgtcgaaattaatgggccagtattccttgctgctgctgatggcacagcttcagaacaaaaagaagaagaagaagaagaagaagaagaagaagaagaagaagaataagaagaaatggatctcatcgtctcgccgcctctgatggctccatcacggcacaagactttgctcgcccagaattaggtttccgatcacatctccagtcgagaccatccatgcatccatcatcatcaattcatcatacagcagcagcagcagcgaagtcttgcagaccatacatacgatatccatggccagagaaagcgatgtatcaagagctaagtagccctaattattcgatctcttggtagtactttttaccagcaattcagattcagccatcgttttgtatgtgataagtgtgcacgttacgagaggatcgatgtatctgaataattggaccagatataatctttgtccatttaatttggtttcagtcgtacatcgtctggtacgtgtgtgccacgtgtgcaggggagattgaaggcgacaaatggggaac

SEQ ID NO: 36232 - DNA, 749 bp, Oryza sativa
tatatgtttagtttgttaactaatcacatagttgggaggttcacctaattaggtgcatctattcgatgcaccatattctttatcttttcgccctttacagtcttcgtcttcactactcggcaggccttggcatgaaaagtttgaagcattcggattattatctttgagaaggctatgatggttgactgcaaaggtctcgggggctactgtggagattatggatatcccatatctacacggcgatgatatttggactgaatataggataccgaatatagatagaatatcttatttgtatctcgggtttgtttctcaacttgtacatcaaggaaataccttgagacttagtcggttacgactgtattttatctgtatctgcatattccgttagggatatagattatcttttgtaacacggactccttcccatatataaggggggtccgggtgcctctaggggcatgtgttgattatccccaaatcatacaatcaataagatactcggcggattcatccccggacaggagtagggtattacttcttgaataagaaggcctgaacctatataaatcctttgtctccaaacccattcacttctccagcttgatagccaccccttttcttattgccgaaatctagtttcgacagtatctctctacttttgacttgttgcatgtgtgtgctgtgctgtgctgtggcagttactaatacggtcgccgtacagtgcacggaagacgtcacgtgcatgc

SEQ ID NO: 36233 - DNA, 1095 bp, Oryza sativa
tgctacaccgtttattaaaaataattgtctccctcccttcccatacgcatgcacgccagcgacgactaccgaacgggagaggtggtggcagaggcggagagggtggagcgggagggtgtggtggctgattgtcaaccaccatggcgttgcagacacgctcgttaccttcgtcgacatcaaacgcccatgtcgcacactctgctgcggtgttctcgctgtctcatactgcgtcggcaccgccatgctgttggcgttttcccttgatgactacctgactgatgcctgcatggagacggtctacactccatcctgcaccttggtgtgctgctcgggagctattgtttgtacacaccttcgggcgccgacctttccctttgcttcttccccgtgacggttggttggtctgcaatggcgttgtcgtagcgattcttggacggccacaatagccacgtcctacttgcagtagctcaccatcgacgacacgtgggctcgtatcctgaggcgatgtcgctgctcggatttgacatcgtggagaaaggggaggacgactgcagtggccgctctacctgctcaccatgtgctgcttatgtgtcaaggtgtgggctggagcggaccgtgctcgcggctgtgcaaatccggcagctcagcgaaggatccatgctgcggcggagaaggaagagaccgggagattggccgctgctcctttcccgtgggccaccgcacgtcgctcctcttccacaggtcaccgtgcgccgctacctcttctcccgtcggccgcctgcgtgacgcgccctgtcccctcgccgatgaagagccggaggaaatggaggtagagaggggagatgtggaggaagtgggactcactaactattttttaaccttattagtatttgcctgacatgtgggtccagatattttgttttattttttaaattgttaaattttacttcatgtgccacgtaaatgcaatgtcagatgaagaccgagtcaaattagccatgtagataccacgtcagctgaaaccgcccttcaagccgtcttaagacttgttagagcaggtacaatagatgcttcaagccggtgatagctgtccac

SEQ ID NO: 36234 - DNA, 558 bp, Oryza sativa
ggtgccatggagctccttttcgttactgttcacttgttcagggacattgcacaaattatgagcattagattatatgcctatgattttggtcagtaatagctagttcttgcatgctcctcgttttgttatggttgcaatgttactcgagccgtaagagcaggaagagaggaaaaacaaatatacacgcaaaaatgtagcatctttgtttgcttttaatgttaattaagaacggaagcccctacgctacagcttccaattagtgcttatcaacgcaatgacaacgagaatctctcttatgttgctcctatttgttaagcaatgtcggtggaggtttcaccgaggggaagcaatacctcttggttaattgctggttctgattgattattcattatactattgtttcaaataggattgacaaatccaagtgggctaaatatgtgtcctgtgttatattaccagcaacaccagactgcgaaccatatatggctctgcatctgaatctgaataaggagatgaagacaagccggcgctcataacatacccggatgtagctctaaa

SEQ ID NO: 36235 - DNA, 731 bp, Oryza sativa
cattgatctatgactcaattcaacacgagttacacacaccagccaggtaattaaatacccacaccatgagtcatggacgactaatataaagttattattttctccctttgaaaaaatgcgagactaatgacagcgtcctcaatacatatcgaccatgggatgaagtagaacggaaatgacaaggcaatttcgtgggcccaccaccaggcagatggatcgaaagctgacgtgaacacggcccatatgtcaagctaaaaaattactcgcaaaacggaggtctcctttcaccaatcgggcccgaccacgagacccgtacccctccggcgatcatacggtcgagggaggaagctccctccgacgtgtcaacatatgggccgtccgtttgctggccgcgggcttcttcgtgtgggcacactaggttcctccttttctttttcttcgtctctgccaacgacagatcatcgcctgccatgaccaaaatcaaatcacatgtgcttttggtgatcacacgattcacgacgacggtgaattggtgattagcactaatgtttagggagacttatccaaaacgaatcacgttggtatgggtctaatcatggtctgcaaaccccttcttgcatggatgggattcagtaatcatggtctaaaggttactgattagcatctctctcgaaagacatgagtactcgatttaaaactttttaaagcaccgtgtgcgaagtacggcatga

SEQ ID NO: 36236 - DNA, 1932 bp, Oryza sativa
cctctccaaggcgcgcgtcgcgcggggggcgtttgcacgtgaaacgcgagtacgtggaggtggagagagcggaagacgatgggatcgtggatggcgtgcggcgcgcccgggacacgtacgccgcgcgcgcgggggaccagcatatgccggcgtggtactgagtcgagaccgacacgatcacacgagtgtccgccgcatgctcgcagttactagtgccacccaacccaacccaacccaacccactgggtgtacgtcatggcccaggggttggttaggccgtttcctcggcccagcaaatctcattgctcacaattgtgggccgtccacgcatgggagcatatgctaacgggccgacttggtgctaagatttttttttttgagcgattgagcataataaaatttgatgctgtccaattgttgaaggataacagattaaacattgctttacgaatgacatcatatcaaaatttggtagtttcgaaacacttccaaattttaatttgaaggtatccaagtaaatacatccactatatcaaaaatttggcatcaccaaagcttaccaaaatttgataaattggcaacaaagggcatgttcatattgtagctaaaataaacctaaacaagttttgccaatgccaaaattttggtaagatggtaatattgccaaaattttggcagaatttcttatgtattgaccaaatttggcagcagactaaacatagacatattttttggcaactatgctaaaagaatgataggtttgcaatactatttttgaaaactaaaataccacaaagcatatatatttaagctgaatgttccatatatccatggattaagtaatagagtgatcatttttcgctaacacgcaaaatgattgcacatcaatatatcagaagaaaagagttatacttacacaacgcaatcagccagaccgacttatgccaggggaagggagaatagcaaaatataaaactgaagcttaaaaaactactgcggcggctaaacctaaactccaagcagcgggaagggccgagccacgctacactcccaacaaatcccaaaaaacggcaacgccgactaaagaacacatatagttaatagagttatcataaaactacatgtttaaacgccaatttttaatcacaataatacaatatttgtaactcaacatcacaatagtattagcaatttgacctttaaaattctagttttatgataggtttatcaaaataaataaaatatttatagttttgtagattttactctaagacttttctttttagctgccatctagtaatgctgatgtcattgctaccgtcaagcaatttttttccccgagacatgtcattgattatgtcactgtaatggtcacacattgtagtatactcctatatgctgtactcccatgaaaagtcatgagacggcctgtgattggatctttcattatactttgtcaaataggcgagaggaaattcaatcctttcttcttcggacaatctacattggatatacatgttcatatccgtacattcgaaattcagggccaatttggattgctaccctactaaaatttgcagtagtataccaaacacctctattaaaactctacctatgccataaatttggattggcctataaactagtatcatatgggcaaattttggcttcaatccaaataaacattttcaactctaccctaccaatattttggtagtaccaaaacttgcccaagatttggtactaccaaaattttggtagggcatcaatccaaacatgccctcattttgtactttgcatctagatgtctcatctcaggagtagaagattccaagtttcacagataagaatgtcgttgtgaaccgctgcagcatccatgactatactgtatatgcaataactgtgtcacaataatttgatagtaatctgtat

SEQ ID NO: 36237 - DNA, 681 bp, Oryza sativa
attcttacatttggagaatggacgaagtattatatattaacatatacgtagcaacctaatactcaagatgaagtggtactagtctaattaatcaattctgagtattacgtaggtggctacatttttgcacatggagagcagagaaaaatgacttctccttttactgtttgaaagttatttttagcctcagcgtttcgcttattcatatgtttatccacaccgcttattagaaaaagaaatatggtaatacttttacatacacgtctttagcgatttaaaatatctaaaagtaagtgatgtaaaattaactacgataacactacaaaactagcttcaaaattaatctttaaaatttaaaattttgactaagcatcagtgaaacaatgagaccctttatatggttatcatatctcttttaaggttgtgttcagattaagacttcgcacggatgtttttcaaacggttaaacattttatagaaagatatacatagaagttacttttaaaaatccatgttaatttattttattttttaaaattataataattaaatataacatcaaccatactaatgatccacctaaatttaggtatttttttaattttctttttccttctctcgaacgcatccagactctactactgctgttcgatacagggatagatgtcctaaaaggtaagc

SEQ ID NO: 36238 - DNA, 2244 bp, Oryza sativa
catgaatgcaagatgagctaatattgtcgggttaaatatatttgggccttttctagaaaaagaaaaggtatatgtggacctcaacgcgcaggcacattgaatagtgggccaaagataattggaccgaaaggcccatgggcttcccttaggcaaaaggtaattggagctgacgattgccttgattgtcctttagccatatttatgtggttttacttttatataagttaaccacctccaaaaaattttctagatagaaaacatcaattttaaccgtcaacagatatctacatcacaagtatcacaaaatactattacatcataggggtagaatgtacgtgtgtgtttacatagataagtgtgtggatgttatgagcgtatgagtttctacgtgtttcttaaaaaaaaaagatgaacaaaaaagcttgcatcatgggtgcatgttggtgagccaacagccaagtagcacaactgcaaaagattccccttttagatggacaaatgacaaacatcaacaggttgaatgaagttcagcggatatgatttcattttcgtctcaaccttcaaccaaagttatattgttcatacatccatgagccgtctgttgcagcgccgaaaaggcataaaaatctgatcataatatcgctgaaatgaaagaaaatgactccagtggtcaatctccacacaaccatcgccaaatatggtatgttccttgaagaaaacaaatactatgcatgtttaagcacgttaagaaagtcatctatgtaaggtaatgtatatattatactcctatataatttgactgtgcatgaatgaacagccgtcgccgattttcctcgccggaaacgaaccaaaactggagcagaagcccacagaatgtcactcaaaactgcccagaatacaggagatgaagtcaccaaaagcaggttttatcatagtctcatctgatgagactgacataactgcgtaaacaaaacgctgatcgaattagtcaaacaaacaaaatcagtgctttaccagtgtagtgtcaattctaaaactgcaaagtcaaaacctttcaattatatttcgaccagagaaaggaggacacatgaagctgcaagtgagatcgatgcaattttttttgaaaaaaatctcaagattgacttaagaagatggccatctcaagattgggctaaaataacatatagcccaattcggtcgtctgcattataggagtattatctgtgccaatgtcaatgcacctcttgtcaaaaacactaattttcttatcccaaaaagattgtcaaaagcattacgtatacatggagtgataatgacaccatggtaataaactagtttacttgtggagtgttgatttgcatgtatactatatactccctccatctcaaaatgtttgacgccgttgacttttttaaaaaatatttgatcgtttgtcttatttagaaaatttaagtaattattaattcttttcctatcatttgatttattgttaaatatacttatatatataatacatatagttttacatatttcataaaagtttttaataaaacgaatggtcaaacatattttaaatagtcaacgccgttaaacatttagagaaagagggagtaatataattgcacacaagagagatactcttgcatgcatgcgtacaaggagatcaggagatcccattggaagatcgatactcctcgttatttctaatttgactggttccaatgcatcatcatcgattcatcgatccaatattgtggcgtcatttagctagcaaggggatcgatgtatttaattagtagtcaatgagcaagatataattagtactctactattattttgtctcctaaactttggggttaagtgcattttgcatctttgaactcttcaacgatatattccaggaagatttttcttataaaatatgctttgtttataagcaaatcgatcatcagcatattcgagtcgctagaagctagcatttgcagaattgcaggactgcatatatttacactgctgccccgtatgtttctgcaggataaaggtcattttggtcttccaaactattttgccagagcacttaacccctgaacatttttccagtttatttaatttacacctcgaattattgaaaacggttcaccttactttataatgctatttcttttttttttctctctgtataagtcaccatttgcacaatattttgttaggactgatagagacgcattttaacttacctttaaa

SEQ ID NO: 36239 - DNA, 1201 bp, Oryza sativa
ccacgggagtaaaatgtacttttttttattattagtttgtgtaaacaactaaacacgattaagcttctctactactccctctatactcataaaggaagtcgtttaggacaatgtttaagtcaaatcttgggaatataaatcattaataattctcaagttgttgagtttgaaaatgtaaaaattatatgaatagatttgtcttgaaaaatactttcataaaagtatacatatatcatttttcaataaatatttttatagaaaaaagaagtcaaagttatgttttggagaccgtgtcgctgtccaaaacgatttccattacgagtacggagggagtacctcttaattagaaaaatacactacctccaactttccaagtctctgaaagtgtgcaagtaatgtgcatagactcttgcctgtagaaagaaaaaatgcctagtggcagctggtgttgaactgttgcaattaattgccacaatggatggaccttatgctgttgcgaagagtcctcgtcaaccagattaccagcgctttgcacaatcatggtcagcactagccaagttgctgttgttttgatcattcttgttaagatagccaaacattttttctagtggcaagttgccctttcagatatgttgtctgttgttcgcacacggcgacctcgcattccttcccaatctcttgcagaagaacacattaaactagtaaccaacttgtaattgcactgcagatccaatgcatgcagaatgaaaaaacaatgcacaactgtacaccctatgcagctagctgtgcattctcaagatatatcatgtatatgtatatatatagcagatataaatctgtaagcttcagccaagcatggaattatggagtagtactgtaagaaaatgacttagtgatgagtccattatttcagtaatttaagtattggttcttatccattatctaaaaaaaaagtattggttcttatgccatacacttatactacagagaagaaaaatcttctcactttgaaatacagctcagcgtgcaccatgacttatattgaatacagatatgttcattaagctccctccatctcaatttctcattgttttagcatttaaattttttatcaaaatacttgccattatcacatttaaaagcatttttagaaatgtctgtcccatcctacccttcattatctatgcagtcatacgtacgt

SEQ ID NO: 36240 - DNA, 650 bp, Oryza sativa
aaaaggatgtgaacttgcctgattatctcaaaaactatgctgaagatgttgaaatttagtggatcagaagaaattgacttcctttctgttatgcatgccaggaatgtgaacattgctaaacaagaaagcttgttaacggtaaaattcctccacagtgctctgctaatcgagtttgtctttttatctgtcaagggctggttatcagcattggcagtgagaaatgaagcatcggaaggaaggtacctgcaagcaagttgattatctgttaacaaggagtaggaaacatgctgttccacataaaacatgttgtatgctgcctacttttcatttaaacccttgtcagaagttctgtcctatttgttcaaagtagtctcactttctctattcaacagtagttatttagatgcagatttgaagttcataactactatttcggtgacgtataaaatcgataaaacctagcaagctgcagtggtcatgaatgcatgtgtttagtaatcttcaaagttataaatgatgaagctatcaaattttccaacagtttctcctgataatttgttatgttcctgtaataactaatctaagtgttctactgatttagttaaattcattagaagacagggtttggaggagatactaacatgacgact

SEQ ID NO: 36241 - DNA, 871 bp, Oryza sativa
tgaaacctctctctctctctctctctctctctctctcaattcctcgccatgttgccgggtcggaagagaaagctttgaaaagcaggttaagttagtgagggagattaagagtaagcaaattgctaattaggagtggtactgtttcaattaagaattcttttgggtgtctctgtctcaatctaacctttttgtgtgtctctctgactgaaagtttggcagggtgattgaccagaggatgaccttttttttttgttgttgttctgaagatatggagatgtgtgtgtttttcttttaaattattgttcagagttactactgcttcattagcacaatttctttatgactggggtttggttggggttggttggtgaagaagaagaagatgaagatgatgatgtgattcgattctcggagagattggaaggtcaaaatcaccatctcaattcttggagagactttggaacaagagaccaggaggaaaggaatcttgagattggttggatcctcgggtttctgaagagggagcagggaaaaaggcagggaagcagagcaggaacattcagacaaaaaagaaaaagaaaaaagagatcatcttttagtagtacaaaaatcattcagaaaaaagctgttatgatcactgctggattttattcttggattaactagcttgcttgattgcagattttacaggtcaacattcagaaagaaaaaaaagaagcagagcaggaacattcagaaaacaaaaaaaaagatatcatctttactgcagaaaatcactcagagaagctgttatgatcaagtgctggattttgcctttggattaacttgctttgattgattgaagattatgcaggtcaaccatggctagata

SEQ ID NO: 36242 - DNA, 699 bp, Oryza sativa
ttttttttactgatgaaggatgtgaaaagaagttttatgaaagattttagaagatattttgtcatttattggatttgatggattgtagcactctaacaaaagtcaaacggatgatgttttcttgaagatgtaccgtggtaatttttttgtgaaagtttaggctccctaagccaaacggcatatttgcaaatgaaaaataatttacgaataaaacttttatatacgcgttcttaacgatctaaaagcaaaggctggaaaataaacttcgatgagaaaaccccaaaatcaactccaaatttaaagttaaaaatttaaattttggctaataagtataagcataaactaaaagatggggctgttagaatgttataatttgagagtataggaagattgtagtgatcgcggaagagatggcaactatcaaagcccaaaattttcgggccaattgttgtcttcactcttcaaccttcatccatgagttcctgataatttcatgttttttatgttgagtttgtttgactggattttacctcagtttgatgtggtccgaataattccatatttttggatattgactttgtttggctgggttccccccctctctctctctctctctccgtctctccgatcattggatagagatggagggttttaccttattttaatatgtgagttgtgtgttcacacttgcaactgatg

SEQ ID NO: 36243 - DNA, 919 bp, Oryza sativa
ttaagtgatactattgtgcactctctgcatttgtatttcctcgagtagttagtgtagattaactcaaaatcatatcctagcctaatgtttcatatttataagatgaaatctatatataatagatcactggccataactaagattaatataagttcatatataactaacggccctatcgtttggcttaatgggaaataatccaaacagtatatttgatatatatatattcttaacgatctaaaaccaaatgctgaaaaaataaattttgattaaagaaaaaccttaaaatcaactccgaatttaaggttgaaattttaaattttgattgataagtataaacgtaagaaaaagatgaggctgtaagtttcagagttatatctatcaattgtttatcctagagagaatatactccttttgtcttcaaatacttgtcgttggatagcgtattcatcctcactttgacagtccgttatactggccaatattgacagttatttgaaaacggaagaagtattatttgcgcgtggaattaatactggccatggaagtggatttttaaatttgcagtatatgtgtaaagtcctaataaataaggatggtgattggaatgatcctacgagacaagactgtgaccctgatgcaggggccttatatatatggtccttgttcttttggctcctcatcatgcatgagcggtgttaagctatgtaacatgttgttttcgtaaaacgtccatttttcaaatttaatcgaaattaacccaagttatcttcaaggagagcaacccgtgtgattggcgtttgatttgaaataactcgggtgaaaacggttgatgcagattaaaactaacacgtagacaccaatattaatatgtcactctcgatttcgttggctgggatcagagattgtgtacagtaaa

SEQ ID NO: 36244 - DNA, 2229 bp, Oryza sativa
agacggtgacatacgagaaattttacagtactaatgaaatttgtaaaagtttagtatataagataaaattttacaccataagatacaatattttttatacattctcgataacaataaaattactcgggtgatggatagatgatagcacgcttctcaaactattaaacgatactatttatcaagtttgtattaactccatcccaaaataagtacagccgtggatattcgtgtacaaagtttaaccgtccatcttaattaaaaaattatgaatttttttaaaaaagtcacacataaagtactatccatattttatcatctaataataataatactaatataaaagagttttaaataagacaacgttgacataaacagtgcaaaattgcacttagatcatgtttgagggagtttctaactattgcagtttctcttagaatcagaaactcctccaaaatttttggtccagattctgagaagccgtagttgttgaattcaaaaaataaagtagaatccagaagcttcgaaacctagctttttcatattctcaaaagtttggctaccagtaatctgcttcttagaaatcttaagcttcatagatagaactttattttatttcagtatgaagggagtaataagtaaaacttaatttattatatactaatatttttttcgttttatgtgtgtcgatttaatctttcatcttcatcatttcaaacagcatgtggtcagatccgtgtcttcaatgttgagcagggaatccattgatgaaccaggcaaccaaagattgcgcaggacccagaccagcgcggtgctcactgtaccagcggcctgctactctcatcattgatgtgtgtttaagttgtactgccacacacaactcaactgtgcaagtacaacgctcaccgacgtaggcatggtgtacttaacaactttttcttccaacttccaacttttccgtcacatcgtttcaatttcaattaaacttacaattttagcgtgaactaaacacacccgtacacatggcccttgtttagtttcaaactttttcttcaaacttccaacttttccatcacatcaaaactttcctgcaaacataaatttccaacttgtccatcatatagttctaatttcaaccaaacttccaatttgaatgtgaactaaacacagcataaacacactgtcgaggggatatatttggatccatccaaccggccggagaaggatgggcagctaaaaataaaatgttgtgaaaaaacaattggtacggccatttatgttgccgttaatatggttaaggggagcaatctgtcatgtatcgatgatagtacatgttgttgatgtattagtcgttcactaacgcatgattctgttattaactgttactccctccatcccataatataaagaattttgaagtgatgtgacgtatcctaatacaacgtatttggatatgctctctgttcagattcgtcgtacttccaaaatcccttatattataggacggagagagcaacagttactccctccgcaaaaaaaatcccaacatagttaaagatgagacaatctagtactctagttgaagagaattaaccgtgcaattgtatgattttcgggtccggtttttcttataaactagatcaattctcttcttctaaatataaaagctagaacaaagttctgcctcggtttcaaaaaaaaataatctagtacgataagtctgaacagatgggatgtctaaattcatcttactagactctatcacatcccaattaggttagtttttttgcgataaagggagtagatcgttcgtttttggagaaacgatcgtatagtcagcgtcattacaaggtactagagctactagagcgttactctgttctctagtatttgatgcacgattacgaatgttatgtttgttgagatatttttttaagtatatactactattataatagttaatgtcatacatatatgtatgttctattgaaatatatttacctctcataaaggcaaactactactgcgttaatatatttgtaggttcattaaatttctgtccaattcctattaatcacccgtgttcatattaccctcactgtcaacatccgtattccatcaaacacgacaccgagaaaaccaaaagtacaccagatatagctcataaaacctctggtaattctccgattaaatcaaagaaagaaggagtattttggattaaaaccttgatcg

SEQ ID NO: 36245 - DNA, 1298 bp, Oryza sativa
ctcctcgtgtcagtgtctttgctcggtgggattaacgtcattacatggagatatttatggcgaagacaactggatgattgtatataaatgtaccatatcatactggatgatgtatataaatgtaccatatcataaagccatgatatttttttaaaaaggaaaaggaaaatccatgcctggtacaggtgaaatttaatccatgttcagagtttttttattttaataatgttttctttggaacacatgaatctttactaattatgcattttacttcgtgaatacgcgtcaattttgtcattagtagatgaacattgagcatacttttttttatgcacgatccaattatttaacatcacaaatttgtatttttaagcactttacaacatgaacacataaatagcctttgcacatgtgttttttctcataaagatcaaaatccacctcagttttggttagcatatttttcaaactactaaacggtgtgtttagaaaaaaaaaattctaagtagaaatcgctttaaaatatcaaatatatatatatatatatatattattgttaagtttgtaacaaccaaaatttaatcgatgagtaaattgcattgccggtacatgaacttgtcgggtgggtgcaatttagtgcgcgaacttgcaaaatgctcgttttgatgcataaacttgtctggtgcatgtggaggaaggcaaaaaggacactacatgtctaatcttattgatttagaagcagattagaatgctatgtaaacatatatatgagaaggttgctattagacatacacctcttcaataaaaaatataatatgatatagtgataggagaaaaggattaaaaaattagaaatatataaaattcatcatttctgtgatgaaggataaagtagagaccaaatttataaatattgtatttcttatgcatactcactacacgtacgcacgtcagatcctaatcaacattagcttcataaaattaacactgctaagttattttggtcctcgttcgcacgaactagaattgaaacgaacattttacaagtttatgtactaaattgcacccacccaataagtttatgtaccgctaatacaatttactcttaatcaatcatatggtgatgacttaaatatcacatgaaacaagcgcatatgggctgtggcgctgggcaaactcggccgaagtagccctgatgacagtcgggcccaccggagactggaccaccggaccacacgatcggtgatcccccactagttgttcctagacgagctaaagtcaaaactgcaatttgaatt

SEQ ID NO: 36246 - DNA, 822 bp, Oryza sativa
acatttagagcaagtacttataataaggccctagatagctctttggttaatttgctctggaaacatagagagatcaaagagaggaatcgtacttaatttttttttaacggagcgcaaaagactcgccggatatattagaaggaataaaattcaaaaacataaccttctctaaaaaaagaagaggataagaaaaaacaacagcagcatgaaggggtgtatttggttgtcagccacacattaccacaactaagattatgcacgttgcagcagtcacaaaagtgtggtagctagacaaattactagtcacaaagtgtgataaagttgataagaaaatatttgagctatggtatatggacattctattgaactaaacacatggctaacaaattgtgacaactaaaagtgtggtgtggcaaaatacagtcgtgaatcaaacacccccatagtatgtgttccttgttgctttattaagtataatacaagagtttccacaaggttataatccaaacgatcatatgtatacacgtctttcaacatcagaatttaggatctgtttttactgaatatcaagaagagtagatttaaatggagagaaaaaaaagactcataaacgtcttgtattttttttcctactactatagtatatgccatgatgctgcctgcccaccacagccattttcagttgaccattagaaatgtaatctgagaatatatcatgcagtgtacgtaaagcaaacaataacatcatagaagacattttgctggagaaaatatacggaactcttttggtttgaaacaccaaagaagatcaaggacaggcaa

SEQ ID NO: 36247 - DNA, 723 bp, Oryza sativa
tcagaatgtagaactatgtattgtaatggtgaatttatgaaaaacgatgtatttgcatatattgtataactatgtcttcttcatcgcaattcaattcccagcatttacttataaatcgctaagaacacatgtataaaaaggtttactacaatatttttttttatcattgataaaccgttatggtttataatcagcataagcaaaacgatgagcttgcattgttgtgatttcaacaatcctcctctgtgagtggtttgtttggtattaccagctttttggttagtattaaatgtctgcaaacttaggtgtggtattcatatggtgctccatactactactatatcattttctctgaaatcttaaatggccgtttcagtgatgctataaccagacagtttccttccaatgatctacattattttgttgctgcaggcctaggtctcctccagctcaaccaatcattgcttcatgcttcctttctaattaaacatacaagaaaagacctttcattttttcctttattagtagtagtacttagtaccgttaattagaagcttgcacatcaatgtggctacctcctgggtacatccaccacactacaccttttcataacaccctgtcttggccatggcttgcataattaagtataccactctaaacaggtaagctaaactaaccctgatgtgattagcaactactgaaaggtggaccaaatacatacta

SEQ ID NO: 36248 - DNA, 2682 bp, Oryza sativa
tcagtcctcctgtggttagataacagtaattaataagcctgaagcaatatgttggacatgttttcatgtttcatgaacatggaagcatgaaccaaaatgctcttgccatgcacagcgccatgtgagaaggcaccttgattttaaggccactcagcattgtttgttctgatctaagcatggataccacggttacagcaaaccttgtacatgtgggggtgtttgcaactgccaataacacagaaacatgagaaccttatgcaactaatggtcgttattcagctgcatgtgatgagatacgaggaatttttttgctcatgttttctttctaattgtgtcggatgtgtttgtgcctcagtttctgcattctgaagagaaattcagggagatatacacacatggttttacagaagaaagatacaggggcacatgacacttaatctgatattcatgcattagctgatgtttcatgtgtgtgtaggaccaattagggcttaattatagcagcaaactaacagtcatgtgagaagatatcaaggtttcagattatgcctggcaaacgttagatagctgctccatttctgaaaatggcagaggtactaattataacgacatatacaatagtcgatatctttcgtcagtactatatatatgctctgcaagataagctctatgacaaaatgctttttcatggttgaaaagaagtgcaaacataaaccaaatgtgttgatagagtcttaaagaaaaactaaatgtgctgataccattcatccgaccagatcgttggccacattttgtgcgatcttgctgtcgtaaggatgcccagctagctaaccgctcctgtcaaatgctgatgaacaggtagcacatgcaattagataatgacgcgtcagcgctgttgatacgatggctgcatgcagaggaggagatatatatggattaagatcacagatcactcctgctgtcattagaattctgaggtttgatgaattgcttaatactccgatccaagctatactgaatattacgtatactgatcatgatcatgatcatagcacactcatgtatggatgcagacatagtggccatactgtccaatcatccgtatgacagagatctatatatgcatcaaggtttttaggatcttcacgttttgctgtcttgtctggctggcccgtagctgatgctcgtgtccagaaataagcaggcagagaaacagttcgtcagaatgggcagcatagtattttttttttctccaacgcgcgaaaaccttacatgctcgtatatattaacaatttaacagaagaaaaaacttttacaactgcgaccaactgacacaatcataggaggttataagggaaagggggaaaaattaatcaggcatgaagctaatatcaaagggcaaattaatctagctagctactacagctagcaccagcatgagcaaatatacaacagggttgcattaactgatcgatcagctagctcccctcatggtgatcatagagatgacgacgaagacgcagtgtggatcgatatgaaggagagatcagcttgcagctgcagctatgcaagctcactgaggctttcatcggatggcctaatcaatcaaagaaaaagctaaattttaaattttcaaacttaattttaatattgattttgagatattttcaacgtaacttctttttcagcattgacttttaagtcaccaagaacacatatataaaagttttatctataaatttatttctattttctaataagccgttagaaaaagggcttgacagttgtacgagacgacggcaacggcaccgtacgccgtcacggctgcgatatgaatccacggcaagtgatccgatgcatgcatgtgttgcagggatgcaattgcggcagtgcctgccttgtggtggggacgtgatgctgttggatcatcgatggatggatcgagcaggctgcaggcagatcggcaggcggtgtcgtcgatgcgtcatgcacggccggtccgtccgtcgacatgcatggagattggagacgacagccgacagcaaggccatgactgcaacccattaatgtataactccgggtttcctggtattcatcgtgccagtggaggaagcagatatatctaacgttagtattaccgtaactaacgtgtacagtaggccctatcattctcggcctcatatgttaaccatcacgtcagagaaaagttacattagaggatctaaatccccgatgagtgggtgttttaattgctccctgttgatatgtctcaccagttatgttttccttttgagaaaaacaatgaaaatgttgagattcataacgtacgcaccctctcaccctataaaaacacacatgtaaacctcatccttatgagcacatttaaaaaactgggctagcaaatcttgagattaacaaataagtcactacgttgcttaccactgaaaaaaaataaatgcgagtacccgtatcaaatcttacttggactcgaatgggttagttccaccataaaaaatctaatcaactaaatcataagaaatctaatctgttgagctacgctcatctcaaacatttaatttctaacacctaatatgcacaaacacacacaatattacatgcgcttatcaatatacccttaaaacacagtaaaaaaatattacttcctccgtttcacaatgtaag

SEQ ID NO: 36249 - DNA, 673 bp, Oryza sativa
aaacactggataagggactctaacccttttttttttcaaaagctattttaatacctccctctatctcacaaacaatactccattttgtacaatttaaaatttctcccacgaaaacttcacttctagggcttacaacttacaaccaatcacactaaatcatgcgcattgaactagagcctaggaaaatataaccagagatcccactattaatttttctgagaattgctagaaattaaatcttcatggatctgataattttttttttcaaaacacaaattaattactatctccgtcgcaaaataagaacttatagagctggatacatgtattaagaaaacagatagaacaatatggaagaatattgtgattggttaagaaataaagatacgttgaatgattaaggattgtgattagttggatatatgatgttggtaaacatactcctgttcagattcgtagtattatgtgtcttatccggataaaatctcttatacgttgagacatatgagtatattttagaataaattctaaaagcttgaagatgttatattttgaaacggagtgattaaattagttaattagttaataatcccattgagaaatggcatttcattttccatgggtgaccaccaccaccaccacctccctctaccccgccctgaaatctgaataa

SEQ ID NO: 36250 - DNA, 677 bp, Oryza sativa
tatttcctaattgtatttctatatggactctatactctacttctaatatttcttatttttaattccgaattttagttatttcctaattgtatttctatatggactctagtctcctcttctaatattctttatttcttaattcctaatttcaactatttctaaattgtatttctatatggactctagtctcctcttctaatattccttattttttaattccgaatttcaactatttttaaattgtatttctatatagactctagtctcctcttttaatattccttattttttaattatgaatttcagctatttctaaattgtattactatatggactctgccttttctttttctctgattaatgtgagaatttctaggtcatgagagcgaacgtggaggctccttttttttctgaattttagttagttttaaattcctataaggactctatactctacttctaatatttcttattttttaattccgaaatttctattttttttcttaattatatttctatatggactctatactctacttctaatattccttatttttaattcaaaatttctattatttcctaattgtatttctatatggactctatactctacttctaatattccttatttttagttccgaatttctataatttcctaattgcatttctatatggac

SEQ ID NO: 36251 - DNA, 3386 bp, Oryza sativa
cgatcgctcttgggtgtggtttggtttcacacgcagttcaggtccagtgacaggagatgtgatctgaaaattactcttggttttagcctagcgatttttccactagcatccaaccagtcgattagtactagtacaagttcttacatcagcttcttctggagactgacacttcttatctgaagttctgaacaattacaggcacattctcttcagacattttccttcaaaaactctcttcaaacaagaaaatccgtttcaaaaaacagtaaccacggaagaaacaagtgtccaatctagccacgacagttgagtcatttgacaaaggataaaacgacccgttcaaactttcaagcttgtccaaattcattatcagaaattatatttcttttcctgaaactatggaacaaagcattgcaaggtggctagctatcaacttcatctgcctatctcttgtagggtttgactgtgcaagcattccctaactaatttaaccgtcaatagcttgctgcatcggcagagtcgcagttcccgatactactagcgctgttcctctgcatccaccggccattgccggtttggtttggtcagtcttttgaccggccggccgcgaatctcttcagtcttcagtttcactgttcttctggccagggctgcagaggtaaccgtacagtttaggtgtgtttttttaaaccgtaattaggagtgttaattaatgttataggacggttactgacagtacacgcgaggagattaacttaagatataaaggacttgaccgttggcagttttggcatttgatcctgtgagcggcagagaccggatatactagctgatggttttctagcgggttgaagcagattaactagattattatagtatattatcaacatgattataaatataacaaattaaatagtttgatagctcagaacaaggaatctatgcaatgcagtaagtttttttagaaaatttatttttagaggcacagaataaataattcgcgacaatcaaccggtgaaatatcttaaaaagaattcagcttgtgttctctatgaactgcttgtgtgtgtttcttgtacaatggagttgactgaaaattacttggaaaatcttgacagacttgtactaactgggcggccacttggtcagagctgaagttggatatcacaaacacattttgcattccacaatgtgacaatggtttactgctgtactcgatctcaaaatttaagatcaagttagagtcatagtccagaatgttccttgtgaaatttggtgacatgttttagttcagctaattattgttttgctcggagatgtgaatgaaataaattaaataatcagtggcatgactcgcatgacactgtactaaaaccataatgcaagaggattttcacatgacaaagcctgcaagttgtacggtttgtgagaaactccccagagtataacctgtgatttagtcatgttcattctgatccaagtagagcttgctagcaagaacaatgtttttctttaatacatccatgctaatcttaatcgtagattctttctacctagtggactagtatgtgccacaagtgtcatgttacaacctgcaacctctagaaaccaaaagagatgctagatggcattgcagattttatggttttcttactgtctagtttatgttcatgatgaaggtacaacaacttgtacttgtcgaacagtactcatcgtgtttgttaattgtggtttaagtgacaggagatgctctcattaattagtgccgattatactggagctttcaagtatgtcacgtgtataccagggcaaattgcgagtattatacaggtgaaaaaacacactcgaaaagcttcagtccatgacatgcctgagaagcttaattagactaacagaaacagccacttgtcatcaaccaagtgtgcatcgtgttaatcacttaattagctgttgtttaaggacaacatatgcttttaatttcacctcgagtcaccttaattagaagaagcatatcaagtcaaggatagcttaattagtgatgagcaacagaacaagagaaagaccaaaatttcaatgggaaaaaaagggaacaaagaagttcagagaatctgccgctactgagcaaatgatttgctaccggtttgatctttcagaaaaaagaagtatttgctaccggtttggttctttgtcgtgatcgcaagtaatcttaccaaccaaataatcagctcatgaaccacaaaaaaaaaacctatatcacatttgcaacctaccataattcagaagagacaatgctctgaacctctttgccatgaagaataccatacgtttcgcctctctttaaccaccacgttgaatgaaaatccatgtgttaattaggcgacaagacgaacggtatcaccgatcggtgagatggaaaggacgatgccgtagatccccaaatctgaaagaaccctgccaaaaactaatcaagtcaatgctgctgctgctcctgccattgccaaccgccagaagaaaaatgattagagcagcaatcacacaggctagctggttaagcagagctgaactgatgcagaaaatggagtagtttataatgcattagccggtacagcattattgttaagtgcgtgatcacatgttagaaggctcaacagccatgttctgatgtgaaacctatcctctgctccatcagccattgacatgctggattcctggccgtccaaaactgcaaaggatctgaaaatgtgaactgctgtagatctgtttcagaagcagagaaaattgtcaaatgccaactagccattgatttgaagcaataatgattggcaatggagtttaacagatttgtttgactgaatattttcaggtgaaggcagtatatgttttagatccaatttcttaggatctgaaaatctccaacccatgcttaacagactttttcagttatccgaaacagaaaaggcgaacagaatcgcctcattgactgaatcacgtaacactatctactttccataactcctaaaaatcatggtctacttaagctgatgaagataaagaaaaaaggttcactgcttaaccatttaaagccgaatgttgaccgtctcaattagcaaagatatttgttttctgccactagcttgttcaatcatctcatatttgcaaaattaattagtcatagtgctctaataaacatattgttttttttgccacttaacttgttcaatcatctcatatattccaaattaattagtcatacagctctaataaacataactgtagccctatgattatatataaaagaaaaatgaatttgcagggctattgctctgaagatctgcattaagccagactctggccagcattttccccaagatggcattagcaatcag

SEQ ID NO: 36252 - DNA, 1045 bp, Oryza sativa
aaaggaaaaaatgacttgtgacagaagaagactgctttgttgtcattgaaattatcttatcttatatgcacaggcagacagatttcttgctacagcattataaattggatgagaagaatgggagtgcgcatgcacaagaagaatgggagatttcacggcaagttggctttggcgtacaaatggtccatacttcatagaattacagaaggtcagaagctctccttttcttatagggctgtcagctctctgcctagactcaagcttgagctaagcctatttcacctttgagctttttaagcaagctcgtccatataagtagtacaacgaatattttaatgacaacctctttataagtataagtattttccatgtaatcacactaataaaaagtagaaaaatgactaagataaatatatgatgccaatacatgctaatttattgtgtagataggtgctaatatatatttatctattagcttatcaagttaacaagatgaataaataataaaagctatacacagtaagatttggtaggacctcgagctcgccccggtaaaactcgtaagctttggcttaggctttgggtctttagctaaactcaaatcgagcttgattttttttttggacagctttactttcttaccggaattgagctccataacgatagaagccacaacgaatttatgttcaaatcatcacctaacgatagaagccacaacgaatttatgttcaaatcatcacctagttaagatggattgtagttgaatttgcatgtttatgaagtgacatattatatattgatctatcctactaaattttttaaaatttttgatgactttttaagtaacatgtaaaaaaatggatgaattgagttttccggattgtagctttataagttgtaacacgacaaacgcacttttttaatcttcaaacacttctcactatcttaatataatttggcagaaaaaaaagaatttatgttcaaatttatatccagatcaggcggtgtacaatggtgtttttgctctggaagtatgcaccctgtt

SEQ ID NO: 36253 - DNA, 9388 bp, Oryza sativa
atgctaacacctaacacccaccctgatgcatcacaacttgactttttttgtcctcatgatttttttattgacaataagaacccaaaaatccatagcaaaaacaatccattcatcaaacattaatatataaaatcggggtactcgatcgcatatcccattccgaagactaaacacacccgaactatttatttctaaaagagagagagaaaaaataatctctaccttttcgcggaactatttacgacgacgtggcgtctccctggatcatcatcaatggctaaagctaagcatttttctaatgcaaaaaaaaacatacacatacatgtccccccattttccctttgctttcatgatttaattggacctgtacacacacacatacatacattatattacactcttctgtacgctctgccactacattcccgaggcatctagatacatgggcagagactctcaagtatttttgatagaatattttagatgggatttgataagccgaattcaatatttggacattgataagctacctagctgaagctgaagctgaagaggaggcaatgcccatgacttattgacatatgcgatggcgggggataattacggcgaaaagcggcgagatccgcgggagatctcggtcgttcgtggctaatcaagtcgccggttgggaggaggaagtaggaggtacgcggcctcggcgtcgcgcggcaccccgcggcgcggcgaggggcggggcgtgggcgacgtgggcgaacggaggccacgccgcggggcgcgcggcgcggcgcggcgcgacgtggccggcggccgcgcgcggttgcggttgctttgaggatttaattgggtggggaaggggtggtcgtggaaggatcgcggccgtcggcgtcaaccgcgtggatggatggatggatggatggatgacgtgtagcgacccttgatgctggccgttttgggggtgggggtgggggtggtcacgaccgacctcagtgtcagtgtcactgtgtttttctgccatttaaataggagatgccttgatcattccaaaagtccacattttcttttattccttttattcaagcctttttttttggggggaggggggggggaagtgttgggtttttttttctttaagataattcttcaagttggtgctgcatatttgcgtgcaaatgtattcgtgcgtatgtaaatgtaccatatccatctcattaaaaaactcaatcatagatacgaatctggacacatgtttcatagtgaggattgactttttttttattgtatttttttacaatgttccatttgaccttcccaatccatcttgagcaaatcttagccgtggattatttgatgtttatttttcgtaaaaatatattaattcttttcattagcaaatcatagaaaagaggcaagtagctacatatacatctaatcagaaaattctctttgccaagtgttttatgttctatatccttacgacatacaatatcacctgtaacgtctgaattatctgaaccgatccttttctttatgtcatacgaaaaacagacacaccatcacacacgtacgcggggagcagaaaagcttccccgcgggggaattattggtcatggttgtggctgatcgagctatctgtagcttaagtagctatagcttagggttgacaagatataacattagccattaaaatccgaaaacgaaaggagaaaagaaaatataaaataggggcatgcatgaagagagaggccctttgaccctgcgttgaacactgttacggtggatgcatccgtgcggttggagagatctcgccgcagtggttgcgccgttgccgtcagtcataacgccgttgacatcttctccctcttctccttcttcctcttctgtacagtggtacggtcacaagtgaacattccgtgcactgatcattgaaagctgcatctttgcagattaaataattatataaaacataggggcctatagggagctactcactcccattttaaatatactaacttttaatcataatgtttgactattaggttttttctaaaaagaacagtataaataggcttaaaaaggattataataacagaaaccgtcataacataatagataataattatatcgattttctaataaaaatataataataaagtatcaataatatcgtatatttaaaaacaaagatagtagtacttccttcgtttcatattataaggttttctagcattgtccatattcatataaatgttaatatctatatgtgtctagattcattaacatctatataaatgtgagcaatgctagaaaataaaatagaggaagtagtacttttgctactatcacaagctagggaggagggacccaactgaccaaactgggagcatgtggcctcctctctctccactgaaactaaacgaactctggttgattaattaattcatctgggtaccatgtgtgtaggcgtggcaccactaatctccttgattagttgattaattaattgattattaagcaaccgtacgtgtatctctctatatatgatcattgtcttggttgtttggtaattaatcctcctttgcttgttcagctgcacctctttctacctagctagctgcttctttttggtgaaaaagacgtacttttttagcttctggggatatgtaacagaagagagaattgcatgccttcaagaaactaccttaattaggtaaaaaaaatatctcttctctggagtattaattaattactgcaaattactccatccattattttctaatatttcataacataacacacacacacacacacacacacacacacacacacacacacacatatatatatatatatatatatatatatatatatagtatgtaattaactagcatctcctcgtcctccaaattcgtattttaatcctccactaatctcattggttgcatgtatttttaatggggtgatttaaattataggagacgataataattctttcttgatctttgatttagtggttgtatcgtactccttccatccctaaatgtttgacgccgttgtcttttttaaacatgtttgaccgtttgtctattcaaaaaatttaagtaattatttttttcctatcatttaattcattgttaaatatacttttatgtatacatatagttttacatatttcacaaaagtttttgaataagacgaacggtcaaacatgtttagaaaagttaacggcgttaaacatttagggaatgagggagtataattagtaccaaagggacagttttctgacgcaaaaaattaattagctagccacaatatgtaaagaaaattaaccctcagatgtatacattttaacagataaaaaaaatatacaagaaattaacaggcgacaaatttagtgatcattgactcgatatagttaacttgcatatatatcaacttgcagacaacacaaagccttcatgaataatttgtacgaatacagttaatacagagagaggcgagattttttgggcatcttttcttttcaataatagataaaattaaggtatttcgagttaatatggatcgagtagccatcgacgatatctctctgttctcacctgatgttcctgccagccagacgcaataatacatcaattaattcggtgagatcgatcgatcgatgtgcaggtttcgctagctccgatcgacgaccaaattattagtgtaagaaatcaactaattaattaaacaaattgcgcgtgcgtgcgtggcaaagagaaaaaaatggaaggtacgctacgttcgtcgtcaatttaattatttaatcgtgggagatgggttgtgtgtgtatcttgagctagattaattagctaaaatagcttagcttaacgctgatgagtgacactgacagcgagagagggagtgtgtgtgtgtgaggtcgacgctgctgacttgctgacggcgatggccggccgcgtcgatcgatcgatcgataatcgtcgacatggcggatcgccagccagccaaacccctaattaacgttattaaccattgctataacttctccgatcctcaataaattatccgtgaaagcaaacggtgaaagcattttcatcccctcgttttttcatataactaattaagtcttatctgtttcagtttaagattattgtaatatagattattgagccagattactgtaaactgaattataataatacgacatagaataaactggtagctgttagctacccaataattaaaaaacacctttagagcggattaccatattgtagtaatctggcttatagattatactaatctatcataataagctatttgtttgtttcagtttacttcttattatccagactataataatcctgagttgaatcatacacgaccttaaatagtcatcaaattttttttaagaaaataaaaagatatattaatataaaatatgtcattttactaacacataagttaaatctaacttctacaggttgtaatagaaataacaaatataactgtgaatgtacgtaaactatttttattttatttttttttgaacttgtagaaatagaatttaacattacatgtttatagtgatttttttaaaaaaactgtatgactatttagttgttgacttgtaagaactacataggatgaccctcgaaaatccatttcccaagcaaagcggagcgttcggtcattgattcgatcgatctccatttctctccgatgagctcgtcgacgtcgacgccaacgacccattacatatgtacagccgcagctgctcgccgacgtcgacgtcgccgtcgccgtcgccgtcgcgggtacaaatcgatcggattcaacgtggttggctccaatcgatcgatcgatcgatcgatcgatcgatgagcagctaggtgactgagtgatcagtgatgagtagcttaagtgtgtgtgattagcgagtgaaaattaggcgggaattggattgaccagatcgccgaaagaggcgggcacgcacgcacgcatgcatgcacgccacgaggtcgtcgtcttcgtcgtcgacgacgactcctcgtcgtcgccgtcgtggcgtgcactgatcggccgccgccggcggccgaccgcgcggcggcggcggggggagcagagtgcagtgtagcgggatgggttacatccctgtcagagctaggattaagttaagcagcttaggtatataggctataggctatagctaaggtacttactttattttagccctttttggactgagaatatttaggctcgaatccaaccatcaaattaaaatgtggctttaattaatttctttagtgatgatagaacaatgcagtagtgcatcatgtgcatgcatgtttggaactttgaattggatttggatgagaattgaagaattcgagaagagatatatcgagcatgtgttagtgcgtatgtacggcttcctggaaacttggaccggttcttgcttgctgatatacatgctctgtgctttccacgtatgtggaaatggacccagggcttttgcactttcggtatggaattaagttgtcaatcacaaggatgtgtcaatatatatatgcatgtgcttttcccctccaaaacaataataatgtagcttgtagatcgataagatatgcgtgtttttattttagatagataatggaaataaaaagatgggcatctttttttaaaaaaaaaattacaatcaattgttacatcgttcgtaacttagctaggcaataacatcaccgataagatatcctgttgttaaacctccatcgaatggttagcaaagaacaagctaggactctatgcaaagcgtgaatgcgtcataaaaaaaagtaactgagatttgacaccaattagtataataaatttgaacaacctcacgtcttttaagtgtaatgcgcgtgttaatgaaaagtaaaccggaaaacaaattggctaaatatatgttaaatttgggcatgaattttgttagcttaatcgcttgtcaattttgacttaaatgctaacattattgaccgctacatttttaggaaatacccaaaaatgattccatatatacatgtatgaattttcctagaattttttgtgaaaatttttagttggtgtacacggtgcgtacacgcgagagcctgtgtgcataggatacgtatatatatataacattttagacgaaggagggtcagatctatcagtagtggttaaccctctcatctcacagtgtaaacacgagtattgaagggaaaaaaatgttcaacaaaagggcaattaataattttgttcgtcattgccttaatttctttcctgaaatgtgtgattgccttttccttaaccggtatgcatttcctttttagatagttaacagaaatagcaaactcttcccgaaaccaggcccccaacttctaactttccatcacatcacatctaaaacttttctacacacataaactttcaactttttttttccaaaacttccaactgtttttagaaactaaacaccgcctatgcttacaacgtacacatatatacgagtttaggcataggatttgtttggagagctcaaacttttaaatttaactctaagaactgagtcagaaacaaagttgagcagtctaattaaactcaatttcatctctctaattcattttataagagtatttttaacttattagttttacttattttgatgtagctaaaactgtttggctagactcaagctgaactctagttaagcacgtatgcgaccgagcacacgcaagtgatgttttcctaacttgttctaagcccaattaatccaggcatccagctagctaagctaagctaaggtagctaggtgtattgctgtacaccatgcaaattaagcacgaatgcatgtgtcccatacgtaagagacactagttggactgcttgcttgcatcgcatcatgcacaggtcggtcagctgctcgcgttgcatgcgcagctgctttctgcgtcgtcgtcgtcgtcgtcgcgtctccacctggggatcggaggaggaggaccactcgtacgtactccctccttccctgaataaatgtttgacgttgttaacttttttaaataagtttgaccgttcgtcttattcaaaaatttttgtgaaatgtgtaaaactatatgtatatataaaagtatatttaataattacttaatcttttttaataaaataaatgatcaaacatttttaaaaaagtcaacggtggtgtcaaatattttaggatggagggagtagtcgccgtcccagccacacacatggcgcgcgcctccccctcgccagctgccggcgacgaccaccgtaccacgtcgacgtcgcccgtcgccgccgcacgagagagatcgagagagaatcgatcgatatgattaattgcatatgatcattgcctcatcggcacaatgacacgtacggatgagagatgcatgcatatatacatggtcaataatatcagcacgttgatccgtcagagatctttgcaaatatcgcgagccatgccggccggccggccggcgccggagaagatgcgtgcgttgcatgtgtagcacggtggcgtcgtacgtcggcgatcgatcgcattctgcaggatctttttccgactgtctgaagctatctatctctgcaagtcttatacatttgacacctgtacatgtacatgaatgtacacagatcagtaatctaattaaagtgtgactttgctagctgctcatcgatcgatcgatcgatcccgtccgtatctcacatttggttgtgaggctaatagctaaggtagcaacgtacacagatcttcgtatcaaaaatgctagcttagctaggggcgtcgcttgtagatctacgaacaccgtcctgtatatatctgtagaactctttttccagcctagctagctggacacgaataatttaattcttgcctgaccaacttaattaatttcgtccaaccagccgacacatgtagatccatccatcaatccgaactactgcctccattttatattataaattattttaattttttatagttaatcatttttaagtttgattaaatttatattaaaaatatatatattaatatttttaacaccacaatttggtgtttaaattttactaattttttttataaactaagtttgattaagaaaaaaaattcaaagcgacacaatatgaaacagagaaagtacattgcagtatttagtagtaatgtgtagctagttacgtgtggttggtttacttgcaagctttggtcactgcaacggcaacacaaatgctggaaaaaggcagctaaaggctttcaagtgtttgaaactaaacgtgatcacgcattgaccgaagctgaaagtgatcagatttggagattttcgttcgtgtcccgttaatttcttcttcagacaagaagaaaaccctcaattaattaaaggcgcacgccgccgtgccggccggcgatggagaccgccgcgccggcttgccggaaggagcagcgacatgcatggggccggagctccaacgacggcgaaagctttcggcctctcgcctttttccaaaatgataggtcagttttctcaatttccaggggaggaggacgacgacgacatgttggtagtgttcgatatggagaggtataatacctgaagcttcttggtgccttcagagagagataaaaaaaaaagggtgtcttcttcaattttttcttttcgagttaagtgttcatgaattgaaactgcggtggtggtgtttgaaactgatgaagatgaagtttaagttagcacacgtaaaacgagaaaacttaactcgaggtaattagtttagtggcaaatggatatattcgatattttaaagcaacttttacgtagaaaatttttacacggaacgcaccgtttagtagtttgaaaaacgtgctaacggaaaccgaggtaaaatctgtaacttagtgagaaaaagaacagggcgaaactattcgatgattcttgttcatgcaacaagaacttgtatcagtttttgctacgtcagaaattcaggaaaagaatcaaagggatgcattggaacaaagctggaatactaggtagctgatcatctttgtctgaattaaacaaggaactggaaaaaggagatgagaaggaactataacagcaaacggcgatccgatgattgcgtcgaatatgttctgctctttcctctgccttttttctgcattggtcatcagtatgcatgaacgtcctcatcagctagatatgaatggatggatgcattccaacacgtcatgcagagcaagttgctttgaaagacggaaaaaaaaaagaagtgttttttccttgggcttagttcgtcacaagagattccttggttcttgccaatctgatggcatatcttttatgatgtatatttcttt

SEQ ID NO: 36254 - DNA, 2243 bp, Oryza sativa
tttttttaaaaaaaatatatatctctttttttttatagtatattcaggccatgcatgcgtgtggctgtatcctcatcacattctagttgtcacacactatctcaagctcttgaataaatgaatagtgctactacttggatctgctcatctgacagaggattgaatgcatgtctccaagagggcaatagatgcaaagatgttgatgtagtatctttttaattaaactatgccagataattcaacaggggagaaattcttgcagtacctgaaagttgaaactcttatctctgtctctgaactgagccattgacaatttcatggatcaatcaaccctgcatgcttgtgagtacaaaactttatcccttcaatcatgtaaaccagattcagaagtcacctctgtcccaaacaagtcaaagtgcactgcactgcaaaggattctgtgctaactggactttgacagggttgcaatgctttcagagttcatagcaacggaaatgcaatatgagggacagcttttcttcgctgcagaaactagtttctttattcagcaagtaggagtacatggtacatgattgttcagacaattacatgtaatgtgtgaacactagagttacaacaacattgcagcaaaatttgatgctacagactaatataattactcactaccaaaggtttcataaataatagtggcatgctgtactctactttgacctcagagcaagcctatgtaaagctagatactcctagtacaacaaatgctaaggtccaagtgatgtttttcacattggcaacacccttcagctctgaactgttctacttacagttacagtaatacagtcaacactgtatatgcagccaacctcctgcaagaagcagatgatcctaacatcctgaacttatctacaagaattaaggagagttgcaaaattaacttcacacagtatcatctctggtggacgaatcatgaattagcatgcccttttccgagtttctataaccctttgcatggcatagtggcacctataaagcaatagcatcaattattttagtccagaaaaatacaccactgaaaaatactagcaccataaccaaataattatgcataagatccttgtaacgaaacaagcattgatctataattttctactgacaattatgattatattgattgaccgaaacagagtaatctgaaaccagtgtaatttcaatccagctgatatacaatggtttactctgaaggtattcttagtatgaatggcacagaaatacaacccttaaagctaacgagtttcaacataatatggtttgagcagagttctcaagatatacctccatggaagatgatcaaggaacatacgaggtgtaacaacaaggtccataaaatcttgtcgattggctataaatgctttgtaactcttgttcttgcgactcttgtgtcgagtcacaggtgtcttctgaaatggagaggtatgattctttactggaacaagatgaataacgagaccaggcagatacacctccggtgattgtccttcaggcaaacttattgtacgcagatcattaggatcaatcgagagttttgtgccatcatttgaatgaggtagcctgtattccctgctacattcattcagatcatcttcagaagacttcccatttccgcatgcattactaggttctccaaaatgaggaacatccagaacactgcaggaagcagccatgcagttccctctatcaccaagaatattcattctagatctgctccccaactcatagttgattgctgctgtggagctcactcgatattttggagtatttaccaagcaagatatcgctttaccaaggaggaatacaccacctctaattgtgtgcattagattatttccgtggatttgatcatttcttagctttgcctcattgactatctgaagagcaccagtagactgacgatgatctgcaacatttcgattgtatcccttcgtcctcacgatcccagcaactagttttccaactttggcggaattcggcaaagcatcctttgagagagctctcacagcagcagcacgtaatctaattattgaattcatggataaccgggcagaaaattcatcattgtggacaatactgtgattgatgggcacttagttagaaaatcacatgactggtatatatgaacaaataaataaatgaacaataggttcataggtatgacaagttcagtatcacctggtaacaaactgtgaaca

SEQ ID NO: 36255 - DNA, 1521 bp, Oryza sativa
ttgcaagttttatccatgatgtccatctttcagttcgttgtttgttaattctcgaggacttctgtacacattttttgtggttatagtggggcttggtgtgtgcccttgcaaaagatgataaacattttctttcacttattttactaactactgtgcatgtaaatacaaatgtgttatctgagttgtctataaattttaagaaatatcattttaagctctgaccagggtagatcggggtggtggatgctacagttttatttgctgaagttagcccaattccagggcgtccaattgcaagaaatatgctatgtcagcccaccttgtcaggaactgttaatatttcctagccactctcctcaacaacagaaactgaaaatctgtaaacggtaacaatgtggaaggtttgttgagatgtaaattcatcaggcacctaattttccgtttaatggggtgttcactgtactgcaattaaaccgaagttattctggaaaacatccactgtgtaacatccctggtaagttgccttctgtactcagttgtgaaaccttactgctcagtgcctctgtggtgttgcagagccaggccctgatacataacctttcttgtttgcatatgcgcaaacaaccttgaaggtttggtatcagtctacttcatcattcatcgttgttttgttttctaaccagatgtatttcattgtacttatgcatagctgcagaatcatacaatccagctgggaaagtcacctggaatcaaataccaggtgaaaagaagtttaaccgtccccaattttatcttgtcaggtgagcaggggtgaatggtctatctctttctctctctgtgctgcctcacttttatcttgtcaattatcatacaaggtttcaactgctcaaacttcttactaaccacaacatagcagctaacaaacctcagtgcaagaggtgacctttggtcaaaagctttgcaggctgccattgtcccctatctgtactgctccacaagacaattgagcaggtctaaccaacaaattttgtttgctagtatgctatttaatttgtttcattcttttcatgtggcacatgaatgaaatccagctgaaccattacatgatggctattggaggcaggaagctcatttgatgaagaaaagctggaactaattggcagttggtggctgccaagcttaaccactacatgatgaagaaacagtatagttccagcccaacttcatgatatgcataatcttgggcctatcttgcaccttaaaggattcagcccatatacacactaatattgagacatcaagaacagtccagactgcatatacaggaggaagaatggttctgaaacaatattgagctttgcttaatcttcctgcttaatttgatcagaggaagacaattagttctcatcacatgaagcatggtcattgcatcaactctagctaccattgccccaatttacaagcaggatacctccatttctacccttctatatatatatggctggttaataataatcagga

SEQ ID NO: 36256 - DNA, 766 bp, Oryza sativa
cgccgcgcacgccgtcgcccaccgcaccgtggccagcacgccgccggccatggcgcgcggcggcgcgacacgtcgacgcggaggcttgaccggaggacgaggtgggcccacactgtcagtgagcagcgcgggggtcagcagccttggttagactcgcagttgagactgatcgatttgctctctctctacgtaaaggccggaaaattctcgagttcacgcggttattctagaatggggtcactggtatgtgggccatgcacagtacaggtagtggcgttttcccggtgggcccacctgtcagtgatagtggagttaaggagggtgggaggggttcggcggtagtggttggcacgttgggttcgcgtggttctagaacgaggcctttttacccggtttttatattctttttttctgtgagcgaaacctagtttttaattaattaattataattgcgatgggccgactcatgaagaacctgcgggccgcgcgcgcatggccttgctgggcccgttgaagtggtttgctggggaaaaagtacttggattacctcaactatcgcccaagtatgattcatatcctccaaacacagaaccgggtatatcgactcctccaactatcaaaactagtgcaaacaatatccctcggtagttttggaggtggttttggttgacgtggcgtctacatggtggttttgaccgagtctttgtcctacgtggcacttacgtggcattagaataaaaacaaaaaaaagttatgtgggacccat

SEQ ID NO: 36257 - DNA, 2330 bp, Oryza sativa
gcatatatcattttatagacatactctttctagttgtataatgtgagacggttgacattagtagttgttggttagggtccatgtgtgtgcttttatatgtgttgtgcactcatttatttatttatttttgcatggaatgtgcaattcaaattatgcactggaattttggaagctcgggatttaaaatctggtgtttttttaagtatttttgtgttcttcatttgggtcttgatttagtcaatcatgtactccagcattcaactataataaactgtttctaatatcattatactcaatagctggtttatatattcacttggtccttttttgaaaagcgatcgtatattataattaccaataactaccacctaagctattttttgttgcatccgaaggacgtacatgccgcacacatgtagtaggttaaaaaagagatcctgctcaaattaaagcacggttttttttataaaaaagaattcgatcaaattaaatcaagatgatttcatggcatgtcgcgcgtgatgtttcttttctcccatcacttcgtcacgaaactgatgtttaaacaaacttagttgcgtacaactgcatgttcaaatgttttaatcagtctcttttactttagttatcttatcagcatatttgaattcacagttatgaatagttactctgatcactaggacaggagattaaaccaaggtgatctccacaaaatttcatagttaattattagaattagtacttgatgatctcaaaaaaacaaacgctgtgacctactgatgcatgcatcagaacaatttggacaaccaacacatgtttctgccaaaaacaccccaaaatatgccaacttgatttcgccaaacttctcccataaacccaagctttctctgaatattagaataatataatgtgcaggaaatggcgccaaatcgatctgatcccagatttgattaacaactcaagccagtgtaattaacagagatctagcttagctagtgccagcagagtggtggtgtgcatctcaagttggaacattttgttatgttttactccctccgtttcgaaatatttgacaccgttgactttttagcacatgtttaatcgttcgtcttattcaaaaacttttgtgagatatataaaattatatgtctatataaaaatatatttaacaatgaatcaaatgataggaaaagaaataataattacttaaattttttgaataagacgaacggtcaaacatgtgataaaaagtcaacggcgtcaaacattttgagacggatggagtactttgttagctagggatcccagctgattccatcagatgccaaaaccaaacatggccatgagacaggaagaatataaaaccaaatcttaacatgccaatcaatgcattatgtactaatcaagcaattaactaaggaggattgtgtgtgtgaaaggccacccccttccactggcttggctcctagcctctcaatgattccaagcatttccccctcagaattttaaatttgtcagagttagatcaagctctgctttccagtggatcctcacacacacatcaaatcacccaaccagatttgattttggtttgtctcaggagaaattaagaaaggtcatcacttgctaattaactccaccaggaaaaaaaaaagctctttttcctgagaagataatataccatgaggcctttaagagacaagcacttggagccataggtgatagagatattgcttagtagacttgtacttatgtgtcaaggaactattagcaactttgctatagcactaagcagagaataagggaaaagatgttactgtttgatgggcaagtttggttgatgggttagacaaattattaaaagggggagggattagaggattgaccactaatttaattccatgatgtaatgcattgcccacccatttgattaattacatatgtttgctactttgatagcaacttactgatcatctagtcttagatttctttttctttgcttatcttttatggctcttttttttttttttgcttttgaaagcgctggatgtttctgcaccaacaaacttggcgcaagaatattgcccactaactttgattcagaattcatggagaaagctgtagtagcttgcaaggagaaattaattatttaaaactgagacatgagtaacaaagaagcagagtgccgacctaatttcagaaaaatggcaaaagtagctcgctttctggggggaaatttttttaaaatattattgttttgaatatcaattcagaaccgggtaacacatgtatacagagaaaatgcagagatactggagggtacacaactg

SEQ ID NO: 36258 - DNA, 1806 bp, Oryza sativa
ccaaaaaccaaacccatcaaatctgaatatcttggaaagcgattagtttatacaacatgtagcacaaaagtacagtagtgtactgtgagctgttgaggatcttgctgacatccttttgcgtgcgttgggtgcttgattctgtccaaaggaacaaaatcttagcatgcccaacgatggagctaaacaattcggctcgatctcctgcctcttttatatataaaatatatatatggacttcagtaataattgacagagttggattaaggtacgtactaattaggcttttcttttctgcgaggagtactaataagcttttcttttatgatatcgtgacaatcaagtatagattcagcaattgtcacattttcgaatactagctggaataaacgtttcaaccattacatctaaaatagtacgactatacatgtgtactatagtactatggtcgaccgcaaaagcaaatagtaattgttgattcgataagattttatcatgatgaatcgatgtatatcatattcgtacaactgatcaaagggttgactaacgagtctaaaaaaatacgactatacatgtgtagtatggtactatagtcgaccgtaaagataaataataatcgttggtttgataagattttctcatgacgaattaatcaacttagaccatcctcgtacaaccgatcaagaagtcactaccgagtgactagaccgtactagagaatagaggtgccataaagcaaactatttttataattaattggatgacatgtataatagatcattcacgcggatctttccttttttaaaaaacacaaaaccaccaaatgcagatcgacatactaacaattatatactccatctccacttctgaaaccagaatttgggggagttgccatggactgacaaggcaaagcatgaactgttcattcctatgtatgttaggttgtttgaccacacatgaccccactcagtacaagtgtcatagtagtagcatataccaataataaggccaaggggaccccctcaatgtttatggccatattgtgagatatgtgcaacctaggagtagtcctccatgcccttgtgccccaaaggctatgtgtactactgcgtcgctcgtctcgtcatcttctctgaactttctgaacttgttcagaaaagttcagaaaggaagaaaaatgatggggtgcacgtcctcgccgatccttcagagcaagcagcagatagataggctatctagacagacgatgatgcatgcatccatgtgtacgtgcagcacaaatatatatatatatattttcttttgttcattagtgttccaattaatatctctgaacaaaatcaatacgagcagtgctacacacatacttaaaaaattcttgcataacccttacgaacaaagatctctaacagtttgatttaatcagtcgatgattatgaaaagttaagataatcacagtatgccacatcaattttcgtaagagtttgtaaacaaaatttgtacatgcatcgttttccagttaatacataaagtgtttatatgtatatcaaagtttacaaaaccaacgaaaaccaacgttttccaagccggcttaagaacataaaccgctcggtttttcaatcaagttaaaaaaaatcatactgaactttcaatttttaaaagtaccagaatttattaggagtcctttttttttgtgaaaccgacaaaactaccaattctgggttttggttcgagaatagtttggtactaaaatttaaatttttaacaaaatttgaccggaaatcgttaggaggcaatgtattttgcgaa

SEQ ID NO: 36259 - DNA, 694 bp, Oryza sativa
aacaagaacacacacaacagtaatctctctctggtgatatctgtagctttatggggggaaggagaagtggaggttaagatagggggagagtgtgtgtttttatcttggtaattgcaccccttgcctccctcccatccgcctaaaactttgaccgtcaaagctaacccctctctctctctctctctctgattaagcaaatgcaggggctctgttcaaactgaactaagctagctaggtgtctctttttttttacagttcagtttcacactgatgcagagtgtgattaggctgattaattactacttttactgcatgcatggccggtcagtaaattaaccccccatgggtagtacagtatttatgaatacgtctaatcataagttgaggagactggccggctggccggaacagagaaaagggcagttaacagttaatctcgaccgtcagaattcagaagtttgatgatctcagccgtcagaagttataccgtacgtagtctacactgcgcaacaagtgtgtggtgtacttcaaccattgtacatctgctacaacatcaacgagaacactgaaaacaaccttgtatatatatagttgtgctatatatatttacgtggaaacatatcttatgcatacaaacttctcgtatttactcggtgtatattagcctaagcaaattttaggcaaaaaatctagg

SEQ ID NO: 36260 - DNA, 4602 bp, Oryza sativa
accaatcactaagtgctgatgaaaaaaaaactaaaacgatattatacttatttaatttgttgtgcatactacagctagatgcactgatcggttcaattatgcttttggttggagtgtgtgtgtgtgtgtgtatatatatatatcaacttgacaagaatatataaacccagtggcagtcttgaaattagcttagcttgaccatatacgtgttatggcaaatataatagagtatgcatttttatttcgcttctgagatatacgtacgtgtacaactactggactccgtctgaaccaatttgtccatggtcttgggtcttgactgataaaagaaaaaactatatacatatataaatacacaattgaattactttttgaaaggatatatttaagttagaaatcttgtactccctccgtttcaggttataagacgttttgactttggtcaaagttacactgctttaagtttgatcaagtttgtcgaaaaaagtaataacatttttaacccaaaacaaatttattatgaaaatatatttaattattgatttgataaaactaatttagtattataaatattattatatctgtttataaacttagtcaaatttgaaatagtttgactttgaccaaaattaaaatgtcttataacttaaaacggagggagtaacagatactaggtatattcgtttgtctgtagggtttaaaaatatctgctccatcattgtataaatatagatacatacaagtatagctaggcacacactgtatacatttgacaaacaaacaagctaatactagattgatcacctctgcatgcatttgacagtgaactatggattaagcaatgtatagagcagtagagagttgtagataacacatgcaaaaatgatagagaaatcgagagggcatgcaggggttaatattttgtcaggcttctcacgtgcacacggcgatcatgcatatgcatcatcgaccggccaatataatcttctcttggaacgataaaaaagagcatgtgcaatggcaagcttagtccattgtcatgtgctcgcatgcttttcttctactcaatacccacaatggtaaagtaaggtgctatctataaaacatgtacatctcagcaatagactcgattaatagtaaaccaacttaatagtatgtctacattggtatctatagctctctcatgcattgcctcgtttttctctatagactatctctaagttagtagatagctttgctctctctcttcatttaatacattccaagtagaaaatatgctgacatagatctcttgtagagagcctatagataactattgtgggtgcccttagcatgggcacgtacccacacgtgtgcgtgcatacgcccaagagtcttcgattgatgcacttgcattaattcatgagcaataatctctctgctgttcttttccatttgccgtttagcacattgacatgattctaaacatgttttttttaacgaacaacaccatacggtacatatataaggtgagaagtttttattgatatagtatgaaaataattttacaaaactcaagccttgggaggctataagggcagtcccaacccttcacctagatggtgtctatggaattaactacattgtcatgtaggacttttaacttatgtggcactatattaattaagagagagagtgaagagaggaaaaaaattaagtctcatgcaagacacagcttcaacacgagaacctatgtactagacactatcaagttttgcattgggaaagactagtgtattcataatagatgaagaataaatatgattggtagagaagaaatatgatgcgtttattaatggcccactttaagaaatcatgtgttgcggagtgtagtttatattgtgatgtcttattgacatggcaccatagacactgcttatggatactatgggttgagactgccctaatcaggaaaatgaaagaagacaaaggaaaaactcaacgctgacaacatcaccgcacaaaacactgaggaaggaaactaacactgagccggccgctgtgtgagactgatagccggctcgccgctatgccaacgacagagctacaccgctcaacgatgataaagccaaaccacggaaagggcgctagggcttccatatgacatccctactttggattgcaaagggagaggcgagagaaaagaaagagatcatctttggtcaatcatctgcgttttccctttatgaatatgatttctcaaaaaaaatatacttaattagttagatcacacattatatatttggtaagtttattgttaaaaatatttaatttatcctaatatgtaaataatttatagtaatacctgatatactcgctgacaaatactgtatattttgcatgtctatacatcctatagatctataaagttcatccccactaattatagttaatgctaattatctcttctctcgtaaagccgcatcatctcaattgtttttagcttttgaatgattcatcaagggtgtaaattgcatctccccctcccccaaaaggcacactatataatacaatcatttataacctatggataattaataaaggtaaaaaaatatataaacacatgaaaaaaaattatatagtaggtaagaaagaaaattttagaactcatatctactatattatcatacaattctcctgtagcatttgtacataacatgtatgtatattttgcatgtttatacattctataaatttataacccactaaatctaaaacttaatatgcaaccatggccctgttggttccatgggctaattattagcactcaccttttagccatgaattagccctcaaggatccaaacaggtgggctaatttgaggctaaagtgaattagccctcctcaaaacattagcccctccatggggtgctaatggtgctaattttatgtagggaccatcaaaaagcagctctctctccccctctctctctctctctccctctttctactctctctctaccttttagtcttgaattagcctatggatccaaacataccaccctagactaatgtttagcctaccaattcatgactaaacattagctatcaaaattagccctaggctaatcttccaaacagggcccatatcacatcatcacccgctagcaataattgtatatcaaagctcatgtaaacatgcaacataatctacaatgtattgagttccagtacaaattaacatgcaagcatatcctatcatcactactcacctcatttttaccatattttaacatatttgtccatcatttttataatacttaaaatatacctatcaatatattccgcacgggcatttgtttgtttcatgattattactgataaactctgatgttttattgtttttttaatcttttgctttatgcaatgcaaattttggtccaatatttcatttacaatctcctacataatttactaaatttatttttcttcaaatatgacttggtaaaccagtttaatttattgttagtaaataatgtccttgatacttctagcttgattgttaaaggaaacatattgacgattgtttattgattcctgtagcaaagcataaaaaaacacttgtatataggagtacactatataagtagtactccagtacaaccaaaacaaattagcttgattgacgatgtgtggcagcaatatttgttgtcggcaaactgacaagccaccaagagatgcctccaactccgagctaggacaaggatcgaagacgtggcttcctccgaggatgcatgcatgctgttactgtttaatcatatatccagttttcaaaataaatatagttttaattagtctaatacatatactcttttttcgttttctaaatagataacactgataatttttaaaatgatatttaaccattcgcattattaaaaaaataatataaatatgttaatgtataagtcatacttaaagtatttttatatcacaagaaataaaatgatatatggatcatatggcaagagagaaaagtactatagacatctaaacacaaatctaaaatatcacatagaactaaatggtgaggtggaggaaagaagaatgaaaagagataaaacgacacctctcatatatataaaggacaactcgtacacaaacttttatttattagatatgagagtgtacgtaaggcttattgggcgagagtgaaatagctgtatattcacacaatttcctttcatcgaacggtgagcttaaaaatgaaaaaaaaataatgacaagttggcctaggtagtttgagatgcaaaccaaaggtagtctaaagaaatactcctactaattacatataaaaatatatatagcggtgcatgcgtacatcgcgcagatcgttcaaaccctagcagcagtgcagtaagagcagaatgcatgcagtcagtcagcctaggagaaatcaacggagcacccacccgtgcctcctcgtaaacactgtaaagataaccctatagctagcgtaaatagtagttaattaaagccataggtactagctagtaccacatatactaattaattaccgtgctttgcacttaatacagttgattaaacatggattgcatgcgt

SEQ ID NO: 36261 - DNA, 3707 bp, Oryza sativa
ttttttttatgagggactaaagtttaattagtccctttcactccctttcactcaaacactcgctgagctgtttgaaggctactcctatacgcgcgtaaacggctcagtgatcaatcttctccttttcgcccataaaaaataaacctaatacgaaatataatattatcttaattaattagtacttctaatatgaaatataatattatctaattagtactataaatttagacagtgccacataccgtattagattatttctaatgaaaccaagggagtagctcgttcagagcagatacaataacagtttagccagctgtaaatatattttaataaaataaaagatgagagagaagagcagcgggctatagatctgtagctagctacaacgcgaactacaagatgcaatgtgtatatgacatgtgagatcatatattaataatatagtaagcaattattgtatgaattggttattaaattagtaccgttaaacttgctctcagtcgtctctgtcagtgataaccgcagctatcacctatcctacctagctaggactgcacattttttgtatatcatcagatctgcatactctctcgacatttttcatcgtcatcttaattcttcctcaactgttttcttttacaactttcttctggcagatcgaccatgcaggtggtctcatcctattcctattttctgtacatgatcagttctcatgcatgcaccaatgcatagaattagtctagctagctatagcagttaatttatgcgaattcagctttgaattactgctgcaagtcgctcaaactagctgtagtttctctacgtcgtttgcgttgtttcagttcgcttcaatgaccatgatcagatcagtgatgctgctgcatgcatatgatcagagatcagttaattagcatcaattacctctcacgtgaccttggcctcttgctagcgtaggccgatctaggggaaaaaagaaatcctagcccaatgcatacatataacatatgtgaaaagaaacttttgaaaaagaaaaaaactcatttttaatatattaaaatgcacatttgattattcattgatatttttcaacttcttttatatttaggatattataaaaattataagttggatcacccatacaaaaattacgtcactgcttgctagctaaattaactccaaatccaaaatgagatatgaatgatcgagactatagctatatatatgcatagtttttccatcgttgcttgaggaacgcacacaaacgacaaagctaacgaggatgcggttcttgttcagtttcagtttggtggtcaacgccaccagtaagctggtcctacagtttctgtttttattccttcatttttattttattatttttgataggtaggtgggctcatccaaatcctaggccttgtatagagcaaggagcatatgctataagttagctataagcacatgcaggccactactacaataacaatttttttcgtttagtcaatacgaagggtctgcgaatgcgaaaatcgcacttaagccgcccgcacgggaaaataaaaaatcgaaacaaaaaaaaaagaaaatcgaaaccaaaaccctaaccctaatccagttgccgccgccgcccgcccccgtcgccgacggtctcccagacgccggatctgccacccgctcccatcaccgacggtctcccagacatcggatccgctgcccgctcctgtcaccgacgccggatccgccgcccccatgccttcccaccgccgacgacgggaggggagccgaagggagagggaggggaggggccgcgtgccgccggatccgccgcccccatgcctccccaccgccgacgacgccaccatcctctccagccgtcgtccccatggttgccggccgaagacccccctcccctccgccagatctgcaaggggagggaggggccgcgcgccgccgctgtcgctgtcgctattgccgccggatctgcaaggggaggggtggcgagccggtggcctcccactcgcaccatgcgctcaaagaggaggggaggagaggaggaaaggaaaaggtagagagagatgagaggaggagtgaataataaaaggaaaaagtagagagagtaggtgaaattttgaagtgtgtggaagggaatacatttttgcgtgcggttaattaagacatccgcctgcaaaaatagtctcatttttgcgtgccgttcacttaatatgtccatttgtgaaaatcaattttttcgtgcagtcctcttaaatggaccgcactagaaaatgagctgattttttcgtgcggatcgagttaccgcccgcccgcaatctaaaagtgtccctgtccaggaaaatcgtttttgtagtagtgtgtgaagaaagcaggagaagaaagagagaaaaaaagcggactacaaatttgaaagcagctgtgacacaggctttaagatattgtgcatgtatgaaatgtatgccaagtagtattaatggtgcaatatattttatataaaatattgtatgaatagactattaaagtggatatagatgatgtattaatttttagaggtagtagtggactatactattaagagcatgtacaataacagactataagctagctataaacatattttaaggagataacagattagagataagagcagcgggctacagatttgtagctagctgcagcatggactccaagacacatgtgtgtatgacaggtgggaccagacattaattacgtagtacatgtttatatgtaattattgtatgaattggctattaaattgactataaatgatctggagccaatagttattgctaaacttgctcctaggaaagctttatgcggcttctttcaaaagctctgactcttccaaacagtctaggttctcattggttgcccatatttcttaataggccaaaacagcttgtgagggaataaaaaataatttataggtaaaatttttatatatgtgttcttcgcgatttaaaaggtaattctaacgctaaaaatatcttaaaatcaatttcaaaattaagtttgaaaatttaaattttaactttagatttggtttattagggtaacgaatggggctggtagattctaacttctataaagctatagaatttagaaaataaaaggttaataaatcagtttctctactaattaggtgatgattctcgaaatgttaaggtcccctaaacaggacgcgtccttcctgcatatactagttgtactcctacaaactgtgtgtgtatatgtcacgtactcacgtgcctccgcgagtacagtacagcccagcaaaacacgatcggttagcatcttcctccaaatgggccgcacgtttcggcccatcaatacgggcctcataccaacaaacggaaaaagtatactttgactccctcaactatcacccgagtatgattgatgccctccaaccacaaaacgttgtatatcgactcctccaactaacaaaattggtgtaaacaatgtccctcggtggtttttgagatggttttgggtgacgtggcgcctacgtggcggtcttgactgagtctttgtcctacgtagcattagagtaaaaacaaaaataaaaaaaatatgtgggacccatatggcattcacaaaaaatgtattgtgagacccacatgtcatcctccatctccttcccttcttcctccctctctctctcccttatctctctgttg

SEQ ID NO: 36262 - DNA, 659 bp, Oryza sativa
agttagtcagcattacatgcccaggtgagtgctttgtggtggagatgaagggttggaaggaaccacggcctcttcagcttgacatagacagcaagagcattaaggacgtggaatcttttacaactggaatgatcagtaaagagctcatcgcaggtccagatccacccatagttccatcttcatcaagcttgaggtcattgacccctgactctattgaaggaaaatccactcttcatcactatattaaagttttccatgagtactacgtggagtatgggcataaggtaagaaactgtcaccatgatactttgcatataactcttatcatattcacatatttccagacctcagaacatgtcatttgtcattgttggtgaatggttagcggcaactagaattaataggacctgcagatgcccaaatccccaaacctattagctataaatgtaccatcactaatcagatgagaataaatgggagtataggcaaacataatgatcaagatattattttaatgattcttaggttttcattgagctcaggaacatggggattacctgaagacagaaattgaggacaagcagaaacgcttgcaagcagtgaagcaatcacttctatccatagaagccaaagaccaagatataaacaaccggataaat

SEQ ID NO: 36263 - DNA, 722 bp, Oryza sativa
aggcccaagcccaacaatctccatgatccgattgcttttacagttcatcagccatcgctatcgcaaattcgcgagtgctccgccgcgcgtacggtctgtcgtgtgtgtggttctcttgtccactccaatggatttctggtggatcagaggaaggcgacgacgccattgtggaatcgcgtgcttagctcgacacctggtggagctgctacgcaaaggagcaccttctcatcgtgttcttctcctcgaggtgtttcaggctccgaaggtacaggattcttcaggttgatctaccgataatcggagtgattcttctccttcttgttgactgtttatcgttctttgttgcgtgcttcattgcaacagcacgtgctggaaggagaggaaggaagttgtgatgctctgtgattctctgggaggtttcttggctccattagccgtactcggggtgatgtgatgctgatgttgtatgggcacctcgaagatgtggtatcttttccatgaggtttatgagctgctgcatgctgcgcccaagtgccaacactgtccggctcactgttgaggagactcttcagaagagggttcatgcatgcaaggtgtttgttgttggttcccaaaggaggagggtgaggaattgggtggtgtttgccaagaggaggaggaggagtagcaagaggcagcgttgatggaagagttggttcttcgatgcatgggtctggcctgat

SEQ ID NO: 36264 - DNA, 699 bp, Oryza sativa
tgatccccattgtttgcaggactgttgaattcaatgtccaagctgattgaaggtaaacttctctggctgttctcatttctgttggcattggcattgttgaagtagagccctagcattgatgtgaacacctctcctcccattagcatcagaaggatcagaacccagagttgcctgtcagataagtcttccatctctactgttgccatgctcgagacagtaagtgtagacacagaggtgaacaataggtccaaatcctttggacctggcttaccctggggcttgagattcttcagagcaaggaaaccagcaaatgagattatcacaaagtaaacgagctgaactaccaaagggttacttttgcaaaccagcgatgatcttcttgtacctcttgacgggctgacgcgagcgcgcccgcagcgaggggcagaagtagcagaggctgctgcaggcaggcagcacccgccgcgacatcacccccatcttcttcctcctcctcctcaaagcctcccaaaaaagagcctttttgggatcgaattcggctcaagcaacacaattctcagaactccaagaactaaaactctcttcgatccaaggctccaagcagcaagatgcttgagcaaacagcagagaattttcgcagcagagggggtagaggattagatagcaggtcgccttcttcctcctcccccttcccacgca

SEQ ID NO: 36265 - DNA, 693 bp, Oryza sativa
ccgttgaaatcaacggccgggcaattctcaggtagagccacaccgatctattatactccttccgtcccaaaaaaatcaacctgaacgaaaatatgatctctttacaatgaatctacacagaagtcacatgttagttttttttttacgaaggaagtaagtttttaattgtcacgcaaggttagttccacctcgcgcgaccgcaagcgagtcgtcccgtgagccgccgtcgccatcgtcctggtaagtcgtcggcgacggcaagtctctgccgctgatggtgcttgtcgcgcagtgcgacgcgacacgaagttagcatcagctgcagcgaaattgagaaacgggaacatgttttacataaccaaaccgatcagttcaacccatattgcgttatgggctggtccaagtgaagctcgtagtgatttcctttttttgggccaagaactcgacggctcgacaaatggatagttgggcccatctggtgaacgggctggtgctagagtactagtggaaatcttttttcgaaacttgtgagctaagaatcaaattcgtgtagtaaaggtctaacctcacaattgtccatggcagcataatgcataaccttacaagttattatccatagcacatcagttacattacatacagattttaggcctgttcactttgatgcaaaaaaaaaccttactaaattttagc

SEQ ID NO: 36266 - DNA, 667 bp, Oryza sativa
ctcgtggtatggtttttcagttggctatattttgattcatggccaccaatattagttcttacgatactgtttgttccggcaaatcttctgctttagtaattactccctccgtccttaaaaaaactcaaactatcctcttagtacaatgaatctagaccacccataaatctagtttttttttgggggacccaggggtaactggcaataacagttttaaaatgttaccccaacatccccggagtaatcactgaacaagaatagggatggaaggcaacactgttgcattgcttagaagctaatgctcactgatttcgttttctaaccacaaaactcctgtaacagagaaaccgcagagctaaatgtttctacctgaacattaatcttccccaaaacaagaatacgaatatacgatgaataagaaagcacgctcatcttctctgaaccttctgacgcggcagctcggtgttcgctagctatggcgccttcctcgctggctttgcaagcaaccaatggtgaaaggaggaaggaaggcgaaagggtgtgttttgcaacaaatggtaagcagatcgcaaccgaagattgcaacaaagcaaagacgtgctcaaatcttaatgacaccttagcgttggagaacaatgcaatacaagcatgacaccttagcgttgga

SEQ ID NO: 36267 - DNA, 1875 bp, Oryza sativa
gagcacgatgtagaacagcgcgcgcaccgcattgtgccgcagcgtgtccgcgtccatcgggcggcgtcggctcgccgcctcctctcccgacgacgtcgggttctcgacgtcgccgccgtcgatgtcggcgagcgcgacgtcgccgtggctctcgacgcgccgggatctgtccatggcgtcgctccgcagcttggaccacttggacgcgagccccacgagcgagacgaacacctcgccgccgaggagcatcaggacggtgagcaccacgagctggccgttggagaacacctccatctcgacggtggacatgctcgacaccgtggcggccgacacggcggtgaagaagcggtcgatgcggcgcggcgcggcgccgggctcccgcaccttgagcaccccgaggaggccgtagccgaggcaggagatggcgaggaagtaggcgacgtgcatggacaaagcgccgccggcgagcgcgcgccgcgacgtgggcatattggagcacgcacgcggccgccgtgtgctcgctccggcgcggccggtgcaacggctggctcggcgagcttgtggatgagctccggcgatcgatcgtgctgccgcgctatatatagtcgtgcggacgtgggaggctgggagctatggctgagcaacaaaataggccacgcgtcctacgtaccactaaccatttgatgtcatccaatttcgaatagagtaatactccctcaattctacattgattattatataatcaaaaccagaatttctaaactgattatcatatataatcatcctttcatttaagtgtggcattattgtatctaggcatgtaaatttagtctacatgcatgcatgcagttacaaatgctcgtttcttatgcatgcgagaaagttgaagtatgcttgtttctattttttccatcacatagtcatattaagtgaaatatagggaagttaaggttttcatgatcttgactaaaaagtttatataataattaatatagaacgaagagagtaaataagaaaaaatgataaagtatttcgttactctctccgttctgagctataagacatttttattttctgcaaagtcaatatttaaaatttgtgtactaatgattgaacctaaaatatatggatagaaactaaggcccagttttttagctactaactactagattatggcatgcatatttttaaaactcctaaagattaagattttctttttgaaaaatgttcttcctatatagaaatttcctctttgatgatattcgatcagtctgttagatatcttttaatttagacctctcatcatctttaatgatgtgcatttcttttcctgaagagctacaaaagcacatccaaaacatggaaattgtggaaaccctaagaattcatttcagaaagaaatagaatataaatgatatttgctcatatattccaaagacttgtgctattggaaaatatgtgctcaaatattcctaattctctatgccagtccgccaaaaagattatccataatattcttagtccttagaaagcgagacaaagaacactgaacattgtcttgaaaaaaaaatgtatacttggtactcagagctttgtggttaacctagcctacaaatttcctatgtttttgaggattttatctttttaaaaaattttaagacctacggccgagagttaacagatcgacttggtctgtatgattggatcctattcattcttgccttaggcttttacttaaactaattactccctatgctttttaatagatgttcctattgatttttttatacacatttgaccattcgacttatttaaaatattatatagaaatatgtaaaagatataaattatacttttaaaaacttagtgataaga

SEQ ID NO: 36268 - DNA, 1277 bp, Oryza sativa
cctatcaaaccatacacgtggagactgcttcacattactacaaatccgggcttcagtgacgggtcatctgtgacgggccaacgcaactcgtcaaagataagtcatctctgacgggccgaaaaaatatcctcttcaatatatggctaccagggaggacccgtcacagatgtgaagtcatctgtgacggcttgcacttgtaacccgtcacagatcgtctgtgacgggtcacaaccatggctcgtcacagatgacatgtcatctgtgacgggtgtagtattatgaaccatcacaaaagagaccactcatctctgacgggtctttaactaacacacgtcacagataacgttatctctgacgggtggtagttatgacccgtcagtgatgagtgaaaattcaaatttttaaattttgcaaaaaacctcggattgaaacatgtcctatataaaagttgtagctctcaatgatatccacaactttataactaacaacatttctattagagatcgtttacatccccgaacatgcattacaagtgatcagatctacttttaaaaacaaaattttgagttttttttttcaaatgacatggatggatacatgccccgtatcaaagtcatagaactcaatcagatctacaacattataattgaaaatattttcatttcacaaaatttacatgttataaagtgagatatattttgaaaaatgaaattttgaattcttcaaacaacatcggatgaagatattttctatgtaaaagttataaaacacgatgagatctataactatttagttgataatattttcatttgaagttatttagggtgttaaatatatgttaaatgattcagacaagcatagacaaaataataacattgggttagtagtcaatatgtgttaagtaggtgagttggtaagggagctctatatggaggttgaggtcttgagttcgaatctcacttgtagcatacaagttatattgcgtgaaaaattgtgaatttgtaggtagtgatgtgtaaccatgtataggatggctagtaaaattcaaaatatttttttgaggttttttgttacgtttaaaattcaaaaattgtatttcttgctttgtcatcagtgacgggtcgtaagttacaacccgtcagagatgagtcatcagtgacggtcaggtagttactacacgtcagtaatgactcatctgtgacgggtgacaagttttaaccagtcagagatgacttatataccggtcacagatgggttatctgtgacgggtgtttcat

SEQ ID NO: 36269 - DNA, 744 bp, Oryza sativa
ccatttatcattcacacaaaaaaagaattgtgggacccacggacatgtgtgtcccacatgtcaccctctcctatcccttcttcctcctccccctcctcccttctctatctctccctctttctcttcgtgcgtggggagcggcggcggcggcgacggcgacggcaggcaatggacggagcggcagccgacagtcttcgcgcctcctctatcgccgccgttgcagcagcagtagggattcggggatggtggcggggcgagggcatggcggcgagggcaccttgagcgcccgctcagcgagggcatggcggtgagagcacaacagcgacgagcaggatgattccgacgatgatggcgcggggcggccacggcggggagggagcaagtcgggcgcggtggcacgaaggaatgtgcgcagcgggggacaccgagcgcaccgaggaggaggtggaggagcgcgaaaacgctgccgccccggcggccaccgagccccctgctcctgccgccaacttcccaagcctccacgaggccgctgcgggcgcggccggtggcaaatccaagaggaagaagggggcggtctgcggaaggtcaacggacggcgacggcgacgaggaggaagcggcgaagctcttcggcttgacgatggcgacgaagctccgacgatctccggcgacggcgaaggggcggacgaggacggcgacgacttggcgagcacgacggtggtctcccgagcgacggcgacggcta

SEQ ID NO: 36270 - DNA, 864 bp, Oryza sativa
ctatgcatttttatgaatttaatgagacttgaatggacttaatcggagctcggatgaattagatataatttttagaagattatctgtgtttattactataacaaaaagtccttaaataatttatcgcgcaataaatcccagggctggcgtcatctaaggggggggcggctgcgccgacaggtgggccccgcttgtcagcggctcaagagagagagggggcgccggcacgtgggccccactggcagtggcacaaggcgggagggggtgcggctggcaggcgggtcccaccggccgcggctccaaagggggggtggcgcctggctcggctcggctccgagccgaccggccggccatggggcagcggcgcgcgtggagctggcggcggcacacggttatcggcggcggcgcgggagtcggaggcaacggctggaagcggcggcgtgggaggcggcggcgtcggccgaaggcgacggcgagtgcgtggagaggggcggcgcaaacgagagagaggggaaaagggaggagaggggatcctcaccggcgagcacggcggccggcgcgaaggatgaaggcggcggcgatgacccaacgagcggaggggcagacgggcggcgattgcacctacggaggaaaatggagaggaattaggggttgggaggaagccacggcagctagcgtggccggccggagatgggaagggcggcgaaattcaccggcgcacggagagagaggcgttccggcggcaggattggatggggatgcggcggccgaggtagctttggcggcggagaagctaacggcggcggcggattggctcggcggcggcgctagaggagatcggcgcgggcgcggtagaaggcatgc

SEQ ID NO: 36271 - DNA, 874 bp, Oryza sativa
agatgcagagatcagttggccaaactcaagaagatctccacgagcccacgcatctcttcttgaacacagagtatccggatattgttatactataatatgtcattgcactttcagttcaaatttggtaaagatgcaggttcgaagaatatatgtactctactaagcattttgattcctaagatgacaactcaatatgttgattcctcgtgcgtattggaacacaagaaagaatatcataatcttgcctctttcttttgcatatatggctttaagttaagtcacaacgaatgccaaattttagtagtaaaggcagttcatctatggagacaatagaggtagcagaagtgtgcaaatatagttcttcatgatgtaaggtctacagcaagtagtacaatcgctaattattacgtaatttgctatttgtgttcatgaaagtacatatgcatcgagtagaaatttaaatgagtggaccaaatactaaaagagcgcacggaaaaatatttggttgtgctcacccttgacaactcgcttcatctcagagaagtagtgctcagctctcctagcgagattttctttaatatacactgcaagaaaagagtgtgatggaatgtattcagattcaaaatatggtacaagtaagaaaatattttaagagagagaattcaaatgacaaccttctgagcctcgtatatggctgggttaactgtgttagaagaaaacaaaatggtatcaaccttaaattttagagttggtcataacaaaaagtacatataaatagtttaccattacgaagaatacttgatgcatcttcacagcctgaagcactgggaattcaaacaacaaaatgataattgaaattgggtatgttctgaac

SEQ ID NO: 36272 - DNA, 877 bp, Oryza sativa
agcgacgatcccgtgggacgaccgcgagaccatcaagttcgccagctccaaaacgtggaaccgcgacggtcccgtggcgccaaaacgcagaaccgcggtggccagccatttcggcactgcgtagtactgtttgtacaccgttttgatactgttcaagggctgtttggaactgttcatgcgctggtgccgcgtctccattgtgcggaacggagactggaattgtgtaaaacagtaccgaaacagtgtcgggtacagtgtcacgtagtaaaaatatgctggtgccacggttccgcacgccagcgctgcggaagtgagccggttccgcgttcccggctctggtcccgcagcctcgttccgcgcgagcgcctcggccgtctgctcggcgccgccacctcgtgctttagttgcgctcccgcggaaccgacccgcggattagggatattttcacaaattcttcactctagcgtatgtaaacgtaatttttttataaaaaaatagatattttcaaattttattccgtgttataccttagtttcatgctccttcacaacttttagccctcaaggtttatcctaaaatataacaacttgttcatcaacgttctcttcttaataaatcacaatcctccatcatttaattttctcacctacctccacttttcaaccaatcacaacattcttctatttaattctatctattttattaatacatgtgttcaaccttaaaaatctttatattctgtaacggggaacggagggagtagttaagaaacataagttggacttttcctatgtttccaaactaccatgtctcagcccctctattccagatttctaaccctttgcttgtaacattggtgggctaagcttatgcgcta

SEQ ID NO: 36273 - DNA, 759 bp, Oryza sativa
ggtgtttaattcactactgcgaatttgagatcacgtgcagttatactagggactgcaagacaagaactgcatgtgatcttggtcatctatttttcttatggagggtttgaagctacaacacaggagctacagtaaatatgcagtatttcttttgtttgaatagtatctttgattatctgcccgtttgatttacatccaatggtcctagtgtgactgcaaggtccagtgtcacgccacattttgttaatctttaccactatattttataggttcaggtcgatccatatgtaagtgtcaaatacaactgtgagtctgtgacttcgattagtcatgaatgtttgtttgtggacggtcgaccaacattttgctaacgaggtgtacttgcttgttcgttgccatgtttgtatcgtgccacgggttgccctgaatatacatactatgctacaaccaaaacgcgacgggttcaattgacagatcagccaaacctttgttggcaaccttgtatggcttggacgatcgagccatgcggcctgcgatctccagctgtccgttcttgccatgcgcgggaggagcgggcgggaaccgtacgacgacgtggcatgcggtgtccggttcggcactcggcagcacagcggcatcgatcggctgagacacgtggtgatgggcgcggatagcatgcatcgacacggatcgtgggccctgcggagggcgcgtgggacggatctgggacgtgcgtctctatccggttgggccgcacgg

SEQ ID NO: 36274 - DNA, 695 bp, Oryza sativa
agctgctggtcgcctggtcggtcgtcccctcgatcgatcggtagaattagccgcctcgtgggttgggtttgtcacggacggtttctttctttcgccggcagcgacgggcgacggcgaccggggcgggcatgcatgcatgtggcgcgcgcgtgctgtacgtacatggcggtggtttcgatcggttcatagtacgtaccactgctgcagaaaacacgattttttacgtacgaggatgtctatagattacatgcagactgtaactattaaaatcgacgtccatttttaaatacgatttcataagaggtttatatacaaaaatctatttttcacttatggacggatctcttgagacaccgcatgccaaaacaagcttattttcgtaggcgggtctgttaaacggccacgtttttatatgctggcctataaaaaaacccgcctataaatatgacattcctactctattccctttcaatatgttcaaaattgtaagtcatcgtccttatctcctcgccttctctatgtcacctctcattttttcataccctctcaccttatctctctccccactcatttttctctcctctcccacttcctcctccactggcgggcgggtggtgtggcggcggtgggtagtaggtgcggcagcagcgggcgggaggctccttagctcctcctcctccaccgcctggcaagaa

SEQ ID NO: 36275 - DNA, 789 bp, Oryza sativa
tccgcgcctatttgcttgccagttgttgatcttggagatggcggcagctcagcaggcgcaagattcagctggttcgttgctttttttccccttttatttgggttgcttgttgattttggagttcttttttttttttgcttcactttgcatatcttctgtgttgaatttgaggagttgggtgggagtttatctgtgaaggtcgcgatcttggcggtgtttgttcgtgtggggatcgtggtaaatttgcgaattttcatggttttctggtcaaaattaaaattagcccaggactgagattttgtacgacgctgctgttctgatgctgtaaaatctcgaccttctcttctctctcttatttcttttcgttttttctttatttttttgttagggttgattggagaatagcaattttagatgccatttatccccaaaatcgattttgctgatagtgatttcttcacttgttagttagcatgtgctcaagcttctactctatttacttcgtaagttggtaaggtatctagttgtggcaaggtcagtaacaaagtttgagtaagtaatgacctaaatggtagttcatgatgtattaggcgaccaagcgttcatcactgaacaaaccaacatggataatttacagtgtagtttattatgggagcttgttgctgatgtcctggtcttacagaatcaatgcaacttaagcaaaagaaaaaactagaagtgcctccacatatttttttcactaataagaatttctaccgtggttctttgtttgttttaacatgttagcag

SEQ ID NO: 36276 - DNA, 2130 bp, Oryza sativa
ctttgcaatggcgatcaggagagctgtgatcatttgttgctgggttgccctttcacgaataggatctggggtctgctgagaacgtggctaggaactcctttccccctgcctggcgatgacgactgggagttcgcggactggtggattaaaaccagactctgttttagacgggctacaggggcgcttttgactccctttgtatcctcatctgctggttcgtgtggtgagaacgaaacctcaggatctttgaacaaaaggcgagaacggcagcggagctcttcagtgatattaagaatgaagttgcagtgtggagggagaccaacattttgagagaagtcggctaaagagcccgctggtggcggattgttttgttttcctttcttttcggtttctctcgactgtttaatgtcgatttgtaaatgttttcaaacccttccttcaaatcttaatacaatttgggcggcctgccttgggccgtcccagctaaaatgaggcctgccttcattcagaatagaaaccaaacaaacacagcatgtaattcaaataacaagaagagagtgcacttcgatatccttattttgtttagttgtttttcagatatatggtttccttcccaagctatcacctactgtactaaacattctccgagaaatgaaacggcattagagaaattttccaccagggattttgtctcttttgagaaaatttctcagtgagggtcgctctccagctatgcacttgctatgtcatactttattccctactgtgttaagcatgctttgtaatctcactgcacggatcattttgtttcgagaaaagaaatcacccagaggcctaggttaagaccctggaaaataataactaaagaaaaggttatcggtagatcacttaatataattacatttagatatttggctcggatatttctgtatagcactgtactgcttggaaatcattagaaaatttaattatgtgtcgctgtcaagaatcgtatctttcatttgaccagaatcttgagccattatttgctttggttaatgcttttcctttgtacaggccttgtctcgaatggggactctttggatatgccatggttggatgtcgcaggtgtcagggtccacctgacctcaatttgtctgtatagcagggcaacatatatacctgtctattccaagttccaacaggatatatatcagttgatcatgtgatgctagaataatcttccttctttccaattcactgtaatgcaaaacttctgattttctgaagcagctgttgctatatatacatgcataacaagagctcaagtatacagtcgcaaactctgttgttattctgtggtttcagcaagtaaaactgtaacactgtaaactgcagaagttcgatgcgacaagtggttcaatacatcttcgtctactacccgtcttgaaaatgatccatccatccctgctgcatcctgattgcttcagatggtggctacctgcccgcctgcctgccattggtgtcgcactaacttcaccagtttagggttatagttacttaaaaaaaattggaagtttgaagaaagttgagagttttgcactaacttcaccagttcagggtgttagtttctgaaaaaagttagaagtttgaagaaagttgagagtttggaaaaaagttgaaagttagtgttaatttctgaaaaaagttggaagtttaaagaaagttaggagtttagaaaaaaagttgaaagtttatgtgtgtaggaaagtttttgatgtaatatgatgtgatggaaagttaggaatatggaagaaactaaacacggcctgttcagatgcaaatatcatggtgatccctcccatgggcttgcaacgaagtttacgcggtctctgatgaaactcgttggcgagattggctggtttgattggcgagattggctggtttgatggtgtccctacgtgtaagttcgcatgtttctcacggccatctctttcacactcacagtcacaggacccggaaaggcaacgcttttgtttctttagcacggagcaatccccgccgcggacgcaccgcacatggttgatttttttaaaattttttgaatcatttaacttttattttaaaaataaattatttctaaacttattt

SEQ ID NO: 36277 - DNA, 2114 bp, Oryza sativa
  unsure (1)..(2114): unsure at all n locations
atttaagactatcattttaaataagaaaaaaaagtgggtgggtttatctaatttaagatcatttaaaaaatgatattgaacattttcttaatcgactttgttgttcaattcctcttgttaaatatggacagcctgattgtaatgaataaatgggtcattttcggtttctctaccctcttcctggtattatccaggttagtgctagggttaaaaatagtatctgaaatgtaacaattaggaactaaacttagtccctgtcacattcgatgttgggacactaatttggagtattaaatatagaatacttacaaaactaattggataaataagagctaatctgcgagacaaatttttaagcctaattaatccataattagcacatgtttactgtagcatcacataggataatcatggattagttaggctcaatagattcgtctcgcgaattagtccaaggttatggaatgggttttgtcattagtctacgtttaatacttctaattatatggattagttagggataatcatggattagttatgctcagtagattcgtctcgcgaattagttagtccagggttatggaatgggttttgtcattagtctatgtttaatacttctaattagtgtgcaaacatccaatgtaatatgcactaaaactttgtagcctcatccaaacccttaagacaaatatacctaaatctaaatgcaaagaacgtggaggattggttgtctcatataaggaatgatcccataaaaatgagctattagaggattggttgtctcatataaggaatgatccataaagctattgatccaactatcacacatcagaagcgatttaaatatattgaagcagtagtgagaaaaaaaatagagcagagattatgaaagaaatgccagtacaaccaaagaagaaataaaatggacgatgaaccacaagtaacaccaaaggatgtagtgaacaaactaacaacaatgagctctggacaagtaagtaaagtaggtaagtagtaagctatatgagatttgatgagaaaaattggttgccaactgctgaacacaaccaatctatctggagatatacaaatatcaatagatgacataaaagataaataagagagaggcttgacttcaatacttcggcattgtgcaaatcatatgataatacattagtcggtcaacgaataaaccagagaagtactattccagaattttaaaatatattacatcatttaagaagagatgtttccaggggcattatccaatttttaagaggatatcatgtaattggagagctggaatatcgaagttgagggggtaaatgagagcttgactcagattccggatacgcttaattggtgagctagaacatcctagtttgaatgagcaaatgagctgaacatgtaatatctttgcgttctgtgtcatatgaacgagtagatgagattataagagaagatttcctgtaattnttttaggtttcttgttatcataatttgtaggttggatcgtgctttagttttgataagtaaatgtaattattagatggcaaatatgacccttttatttttgaanggaaaatacgttgtttactgggtcttttcagtgagccttttaggctaaatattcttgcaaaccacgtcatgatgatggtcagtgttgtatatcattcctaattggtccctgttatctcgtctacacttgactactcctgctagttttgattggtgctagctttgaaacttgcatactctctctgtctaaaaaaaagccaatctagtactaagatatgacacattctagtatcacaaatctggatataaagtatgtccagattcgccgtactaggatatgtcacattttaatactaggctaatttttttttggacggaaggagtatgatgagtagcattttttttctatcataacaggtaagtacatggtatattgtttatgcatgctccgtctcccaagaaatttacattacatattgatatttgtacctttgttatgttattgaacgaacaaatgttgctgctcttgctatacggtggttcttattagttactctctccgtcccgtaatataagagattttgaatggatgtgacata

SEQ ID NO: 36278 - DNA, 854 bp, Oryza sativa
ttttatctcattaaaatatgtttatagctagctaatagtccgccattgtacctgctctaagctagataatcattgcgggtgccctaggacaaaatgagatgcagacgtcgctgcgccgcgcgacaggagcagcagcaccgaagacagcggtcgcttcgacatgtccgatgatcaccaagattcccaaatcccaagacgctgcacaatctggaaacctaccgggttgccttgcctctctctttagacctcggctggctcggctggcctgcttggggaagatgtccgaactccgaaccgaccattagtgcaaataggtttcccggtcaaattcgatcagaggtacgaacgtagcgtaggcgtagcgcataatttttcaactgttattatcatcaaaagtaatatattcactccagcatatgcagaaatcaacggcaaaattttgccaacaaaaatgcttgtgatgctgttcagcactaagccactaaaccacatgggcacagtgttaaatcatatatttcttgcagacacaaggtaattatatccaccagaatacatattgatcattcacacaacaaaacaacaagtatgaaagttcatacaaacataagcaaacgtacattcctgaggcaaaaggttctctactgctaggagagatttactgctgcatcaagtcttcttctggtaggactctgaaaaacttgagggagcaggacatcgatcatctgctcggttcatgtaaagatgcatccctcttctgcttgaagaaaccagagatggctgcaaaggaaaatactaaagcatggtgagattatacattagttgcgaaggaagatgaaattcatccaatgtatttg

SEQ ID NO: 36279 - DNA, 1647 bp, Oryza sativa
gtcaaggagccctttacccttctgatgactcttcagtctgcagccaaaggcaaaaaaggctatagtattatgcatagccccagaaacaagcaggagccaagctttacaccagagaccaaaggaagccgaaacttttgcccaatccaagctattattaggagcattctgctttcagagaggagacgatctttgaacctttgatcattgcatttttaaagttatcctatcttctgcgtctaatatatataagataataagactccctgcttaatcataagaaaaatgggacatctgttaatgacagaatctaacaatggaactgttataaaaaatatatgactatacatatactcctctattttagtatttagatattacaaggcgattacagatttggacgagctagtagtatttatgagagcgcgtcagctgtgcatgcaagttcatgtgccgcccactcatcatcgtctttttcactagcgagcaaccccacaggaacagagaaagctagagagagagagagtgagaaaccttcttccattactactagtctactactctctcgctctttctcaagagggagggggagagagagagagagacagttactagctctatatattctcacacagctcacaggtgtaggagaagccatgaacatgaggaccatcatatccctcatcccagatacatgatctgtactgtctcctcctctctagcttctctcctctccctgctgtgccccttgctttgttgcttggtcaattagagctaagcagcaagctagcttcctggaagcaaggccggcgcctggctgggacaagaaccacaggaaccacagctgactgattgatcaatcaatcaatcttctgctgccctgctgcctcacagcctcagcaagacagtacgtacaggtagctctactattatacagctgtatgtatgtatgtgtgtattgctagctagctaaccactgtgtaatagcatatacaccactagtaatatgtagaagtagtactgatctaatactatatagatagctacctctctacaatcttcttctatctgtagcttttagtttaattggttcttgaactctacttctgttgcgtgttcagatcaattttggccctcttgaggctccggccggtcgccgactcgccgtcgtcgaaggtgctctccggccggcggagttaacattgagcttgatttcaagccgcgctccgatccgaccggcaaagcgccgaagctgccttccgtttgtttcactctggtctctgggggctcgccatcagccatccgtaccgagctgtaggtatgaacagaggagatatcctgttccctgtatatgcatactatttcgatacagtagttttctcgacatgagatttcatgcatgcagaatttcacgctcgaagttacctaattagaagtaatccatactctcgaaacaacctatttaagtagcactactatgtaggaacagaataactgacgtcgttgcccgggcgtgtcagttaacaaacgacaaagatgtgcaacgcacagcctgcaagttacataagcatccgctcgttcagttaagctggcagatcgaccacacactagctttgatttgcgctaacagtgtatcatatctaactagct

SEQ ID NO: 36280 - DNA, 507 bp, Oryza sativa
ccgcaagtttagaatgcacagttttaacgttttaagcgggtatatagctctacagatcaaaaggttctaaacggggcaatttgtccattaattgttggacatggacgccctcatggatattggagtcaaccgtgtgggttcgttttcgttttctccggtactggtgtcttcgtcagatcaaggcgtgtcacacacatactggattactggtgtacagtactccagaagacacgccacgtacgatcaaatagtaataaagcaactcattagaaaaacaacgtcaacgacgggacaaatataccagtgacgtcgtatgttgtgcaaccagccagcttattattaagagtatgaccgtaagctagctataaacacattttgagaagataaaaaagaagagagaagaacaatgggctacatatttgtagccagctgcagcacagactccaagttacatatgtatatgacaggtgagaccagatattaattatgtaatactccctatgtttc

SEQ ID NO: 36281 - DNA, 753 bp, Oryza sativa
gccaccgccgccgccgctgtagttattcgactcgccggaggagatgttgccgccggtggtgccgctgtagctggacagcatggcgccgttcgacacggccccgccgtcgctcccgtcgcaggcggcgcccccgagctgattccgggagaaggcgagcgccgcgtcgaggaggccgtcgtcgtgcgcgccgccggcgccctcggcgacagacgcaaacacgtcccccgagcacagcaaccccaacgggtctccagccacggcgccaaatcccgaggtaccctgcagacacccgccgccgtcgccgccgccgacgccaccgtcgcactggagctgggcgccgaagcacgcgcccaggaacgcgtcgtccagctcgaacggccgcccgcaccccaccgagcgcggcaagtagatgtcgtcgtggtgcatcagctgcccgccgccggcccagccgaaggtctccatcgccgcgccgccgcaagaatcaccaaaccactggcttgtctgtctggctcacggattctcgacgtacgacgacgcgacaaaaccgcgcacactgcacgcagaaaacggaattgaagcgtgagcgctccagggaatcctcagccaaacgaatcacacgaccgatcaatcagacaccgatcaagacgagcaattaatctctctagataattacaagaagagcgcgcgcatgcgtgatcgatggaattacaaatccgtaatcagcatcaagaaacagtggcgctggtgagcggc

SEQ ID NO: 36282 - DNA, 2641 bp, Oryza sativa
aaacaatagattggtctgcatagttttttatttaacacgaattttcattacgatatatgataatgcacgatgacacaattcatctaatcaacgacggatcttttcgtcaaaaacaggaaattgtacagagctatctagggattacaaataatattaaaacagatctgcaggaagaatacagaataatacttcaccaggttgtagcatccaccataagggagttttttttttaaggattaaaatctgtatggagttgtttatagtatttattaaggaagctggataagagcagtacaataatggactataagctaactataaacatattttaaaattttaaagagataaaagaagagagtgaggagcagacaactgcagcacgaactctaatacgtaatgtgtatgataggtgggaccatttattaatagtgtagtaagcaactattgtataaattggttatagatgatttaaagttagttgttgcctatgttattaaacttgttataatgcgtattaatcggcggtttggccggcttggcgcgtatagttcaacaggtagtaagataaacatattataaattaaagctagctactagctagctgatacgatgaaatgtctaatcgacgaactaatctatggatcacacgcaatttgtatataaaattaatgtttgaagaactccgtgtgactacacaaaacctcatgtagatacgattttgtagagctaatttttaaaaagaatttaaaatcaatagttctaaagtgtagagataattttcagaggcactgcaaatattgcctaaaacacttttaattaatctctcgacacttttatcataatttattaaatttattttgtagatgcactttttagtactttcaaatttgcatggtatataaaggtattttttttagacattctaatctttatagaggcacttataagaattttaatctatgctaattaactagataaaagtaacatggaggacatatgtataagtaataatatgaggttgagataattagaccattcaagttggaaatggtatatttaagaggtctggagtttaaggattcgtaagtgcaaaggaagtcacattggtttgctacggttggcatagatacattctgtaaaatgcctcttcatttatagagataattcactataggatatttataaggtatttttgaaaatgtctctatagtattgtagagacagttaaaaagtgtctctatagtatctgtaccaccactacttttgaactttttctaaattagtccctgatattttttttgatgttatgtaatagtctaatatttgtttgaatcaagtggacacaatatattcaaataagcaaacaaagaatactagcatatttgataaaaaaatgttgtctatgacatattattatatattttattttactcatagcaaagcattggcattttgctacttagagaaatgtctctacaagatagtttgttggctgtgtttttgctatttactttctagtataatgccgaagtaattagataagtaagtttctaccagaagcatataacagcaaaaatgcatgtgcaacaatatatttgctgttttttatctattattttttgtacataatatgtggaaaacattttacagattaagctatagcttcaaattaataacatcatatagattctaagaaaagcactaattattttttgttgcttctaaacaataaaggtgaaatatatgcctgttaagtagctatctgactgaatttatggttaggtggcaatgatgttaagcatgtgaagacaaagtcatgtgcctcctaataaaaaagatagagtagatagtacaacaggacaaattcatgtcatctagcgagttgaattacttgctttggtgagttttttcatgcgcaagtatctcccaggaaacaaagattcggatcttctccgctgttgtttagcctctacatgtatactgtttattagttgcaagtttattttagatcaagtaaacatgagccaaatcgtagcgtgcatatgcataagaaaattactagtaactcagaaagacgactagcttttggtcactgctttgtactgttttttgggctataacctgcatcttgtaaaatatatgtaatcaaactctgaactaatcttgtaaaattggttgcctatcatcatcgatgtggtcctctacatcaccctatcatatacagatttgatgtggtctcctctatctcgttccgaaccatagaaaaaaaatcaagaaaaaatatattatgtgcattaatttcccctctctgtagttttggtctttgttttcccctctttggctccttggttgtcgtcattgttttgtcagtttatctttacttcttcagtaccaattttgcatccacttcagcacccctgctgtagcattttttttgtcatcttgctctgctgaaagcttcatctacagacctactgtttcatatcgctggagattttcagtaaagcttgttgctttacacggtttacctcatactgcttccactgaatcagtgcttctgttataggcaagagaatcaaatgtccaagaaagaagcaaccatttttcatgtgattctcctaatgtaaccaagtgcaaacaa

SEQ ID NO: 36283 - DNA, 1982 bp, Oryza sativa
gacgacaacgtgcggggaccgcgacgggggctcccctcccccctccctcctagatctggtcggaggagggagggggaggccggcggcggtggcgatgacgacgcccggcgcggctcccctccctcccctcccagatccggccggaggagggcggcggcggcgagctgcgcccgtgattttttttttgttcgttgaatggtgcccgcctgcgaaaattgatgatttttatagttgttgggctgcaggcggtccaacctcctgcctgcaaaaatcacttttctagtagtgacacatcccagctagccacgccttctctctctcgtaaattgcactttacatcatgttatcttaaaacaaatttcacttaatactataatacatcatcaaacctacataaatttcttaaaacatttaaaatgaacgttcagcctcatcttttcgtttattcttatgcttatcagcaaaaatttaaattttcaaccttaaatttgaagctgattttggagattttcatcgaagtttattttttagtctttgcttttagatcgctgagaacatgtatataaaaaattattcacaaattactttttgtttgcaaatatgctgtttgatttattccatgaataaggcaaaagatggagcccattgtgaaatatggtcgcgccaaatgacacgccctttttagcatgttcttacacatatgaacgtagaaatttcaaaagattttggtacgattaggacaacttcattaaattgttcatttaacatgtagatttatttaattaaaaatcattatattttaatctatttatggcatagctattaaaaagtgtttttatgtaagtctacattatttcaaatgtacttattttataaatattaattattaagccttatcttcagctaaataagccatggtctttaaaaataagtttttcaaaatggacatttttaaataacgaccgtactcttttttacataaaatataccaatcgaatttatgattaaaaaatatttttcctctgttcaaaatataagtatacaaagtttatatctaaatatagcaattgagtatctactcccttatcttaaccaatcataatatttctcttatttaactttccttttactcgcctagtttatatttggttttcagccaagaactatataataagtggctataccttttgtttaagtaaagacaggattttatccattatctaaaaaattcacctagtttattaatacctatacccaatttcaaacaattttatagaccttataacgatggggcatttctcaccaaagtagaactaacaaaaaaaaacaaactattctactccaaccccggaaactttatttctagcaattctcatgcaaattagtacttgcgagaaatacccacgatgtccttatcaatttttgaattccaattaaatatgtatatatatacctttgtttggttggctaaaaaatgttcttataagggagtacgtaacaaatcttttagtatttaattgttttttacttgacaccgcctatatattaatctttaatattttacatattgtaaaatattttacatgtaaaatataactatatcatttgcatccatcaaaacatcacaatttaaaagttatttctgaccatcggttgtcaattaaaaagaggaaaggagggagaaattggcaaaagtgaagcatttattaattctctttgttattttatttgtcgatacttatcaactggacattagtcagtgcaaagaggcaagtaaagtaatgagttttctagagattctaatagatatatgtgcacgagacatcataagagcttatatctgattgacacgtggcaaaattttggagatgtttagctaattttttaggctgccacgtggctagttcaattttagtatccagcaacaacatttgagataaacaacattagttttttttaattatgttttaagtaaattaaag

SEQ ID NO: 36284 - DNA, 602 bp, Oryza sativa
caaatctggtgtcaaaaagaagaacaggcaggcaaactaaaaaaaggcaagatccaattagcttgttttgtgtatgggtattgatttgtgcttccatcctccttgattccttttaatatggtgctcggagtatgcttttagattgttttgagattatgggcctcagagtatgacgaatgctgctcacaagagagctaaaaattttcgtagtaggtttcatgtctgtacccgtgatatattattaagcatcttaattaatagggtattaataacctccctaaagtcattggtttgttgtgccatatcatctataatcaaattgccatgcttcaattttcaacgatgttttatttcagctttgtttttgacgaaaagctaattggtctctggtattgattctgtgtgccgaacgtgctagtctggaacttgaatttgtcttgtgatcgtgcgattgtgcgatggatattccttctctttctgtgtatcgtatgcttcgcactttctactttgaagtttgaaccattggatcagttcgagtttccttctccattgaatgactacgaatttgtttaaatatttgcattccatcttctgcattataa

SEQ ID NO: 36285 - DNA, 716 bp, Oryza sativa
cgccgccgacctcacaactccggccatgatcgattgatgatgatgagctatatatcagcaatgtaaactttggagagagtatatatatatatatatatatatatatatgtagctagcttaattagcttgcttaatatggcgtatatttataggcatagctagagagatggattgatcgatgcatgggtcaatttaatatgtcggtgttgcatgtgatcgatcattgatatgcgtgatacacgagcgagtatataaacgcattatgcatgcagcatgtgttttgctctcagtggtccggttgctgatcgaatcaaactggcccatgcgcgtatgcatgctgccaaattagtcgtcattgattgtacatatatttcccatttcacgtgaagcacatacccggccgtacgtaactttttctgtttgggataacattatttatccatccctagcacacatccagaatgagaaattatttaatggaggggatcatcccccaaactattgctcctctccctctagcttgttcctcctcccatctttccttgtatcaatgacgattcagcaaggcagaaaagctctattcgctagcacccattgtcgcatccgtccctttatttagctagctatcctaccacgatcaagatgctcactagaacatggcgtgatttttttatatgtttgttgggtggtatccagcaagttgctgcgggtagggg

SEQ ID NO: 36286 - DNA, 509 bp, Oryza sativa
tgattaatacctatacttatcaacaaaacaactcaaatttaactttatttgacaatccatgattacatacctaactaattatatgtatggatgctatatacctagaatcaaaatctaacaaaaacaagttcaaattcagttcaaacttgctttaaactagtagtaaagtagttaatgttaatacctaagtaattgaaaaagtttcatactcatttgaattgggtatatactcaatttcaacaatggtgcccgggcacctatggacaccaaacaaatttactatatatatatatgtacgtatgtatgttcgttcttagcgatctaaaagcaaaggctgaaaaataaacttcgataaaaaaccctcaaaattaactccaaatttaaagttgaaaacgctggaagcggtcgagggttgccggatggtcgctccacgcaggaacgacgacggggacgacgacgacagagctggttgcgccccacgacgccgatcttggcgtgcggctctcctg

SEQ ID NO: 36287 - DNA, 529 bp, Oryza sativa
ataatcttggtgttataccttctagtaaaaatgttgttttagatgatgtaattaatgatttgaaatgtgtagaaaataataggataagcgaatatgcttgttcttctattaatcaagtttgtacccctaatgttgatactgagtcattagatgaccagttggaggataattttttactacaacatttatgtagtgaaattatggaagaggtcatggattttagtgaggactgtgagaatagtcttaaaaacactttaaatcctatggcatcttctcctaactctaagaaaaagagtaaaagggggaaaaataagaaaaataataaaaatagtttcaaatgaagggaatcttttggaattgtgatgggtttaaggaccaaaaaaacataagtttatttctgacttgaccaaggaacatcagcttgactttatagcattgtctgagacggttaagaaagaatttactctagctgcacttaaaaatctttgtgctggtaaggagtttttgtggcattgtaaacctcccagag

SEQ ID NO: 36288 - DNA, 932 bp, Oryza sativa
aatttggagtgaattttgagggttttttatcgaagtggatttttcagcctttgcttttagatcgctaagaacgaacatacatacgtacatatatatatatatatatatatatatatatatatatataggggggcgggcgcgcgcgcgggcgcgctgtctctctccctgtctaatgagccagagagagtgacagggactcacgcgcacacactcacgctttcacacacacacacacacagagtctgaacggaaccggagcgtgtgtgtgtgagagtgtgagtgtgtgtgtgtgagagcgtgacatagagacagagacgtatatatacatggagagagagatagagagagagagagatggagagggagatatgtatgtgtgtgtatgtgtatgtgtgagtgagggatacacacacacacacacacacgcgcaaacaaagagtgagagtgtgagtgagagagaatgtgggagagtgacgggggcgcgcggtctgagggacacatatatagatatatatatatatatatatatatatatatatatatatatatatatatatatatatatatatatatatatatatatatatatatgccactcatatggggcgccagggtgcccgggcaccatggtatctcatgcacacaatcactcacatttttcaaaatttttaaattgtgagtatatacctaattataataatttgattcatacatatacttatcagcaaaacaactcaaatttctctttctttcacaatccatgattacatacctatctaattatatgtatggatgctatagacctagaatcaaactctaacaaaaacaagttcaaattcagttcaaacttgctttaaattagttagtaaagtagttaatgttaatacctaagtaattgaaaaagtttcatactcttttgaattgggtatata

SEQ ID NO: 36289 - DNA, 1526 bp, Oryza sativa
gaacgagcacaaggtgagccccttccttttcgcttcttggtgggctctcgagtaaaatgaagtaatgagcctttcttatatcttgcttctgaatatggcaattgataaaatcttcgatatggatcagtgtatttacatctgctgggtagaatttatatatgcttctgttactattgtagtaatttcatagattttccctcataactgtatgtgaccgataaacttcatcaaccactagctaatttagcttgtgtgcttccttgctaaatgctaaccatcgtcaatggaggaaatcggttcaattgaacttgtaatctgctcgtaaacatgcttactgttacatctgcaatcataatacagatggaattaatcataaatcgtcttttttaattgtgttctcatggttaacattctaacagaaactacctggtaccatttttccagtcctttggtgaatgtggatataccagttacagctttttgacattcacattagagttttcttaacatagagttaaaacttaaaccaaaattttaggcgttgcttgtacatccacctagattggacaggtgcatgttgtcagagggggtggggatggcttgccactttccatcttggttggaggctactcatccctctaaggcgcatcaagtgaaaatgcagagcacaaaagaacgaggaattacaaccaggagcatgtaatattcctaggggaaaactggagctcaaagcagataagattggttaacagtataggcatgccaaatctgtgtttcgcactggggcctggcagcagtaggttttataacatagggcctgtcaccaagcattcttactgagattttgggtttctgtttcttttttattcgatgcattattcttctttatgttgctttgctacaattttttagttgattgacaatgacatctttatcacataggctcaaatttggacggagaaagcatcacgatatcgatctacagtctggaaagttagcaacaaacgcccaggttagcgatccgcagtgtaacatcctgcctatatttaagaccattcggttttttttttcctctagaattcaaggacccttcagtattctgtttttctggtatctccggcttgcatttgtctcctgcttctgtttttctgttcttttcaagtatcttgggcttgtgaaggttaaagaaagaaaaagaaaaaaaatttctactgtttctggggctgacatattgttttgttgcaggatacaatgctagtgactcagattcagatgattccaaggaaacaggcaaacaatcacatgttactggaaaggtaagtttcatgtcccatgtgccactgtgatccacaacagtctccattttctggcgtcttgtagttaaccattatagttccagatgtctgattgttgagaaacaatctttgtttcggttcatagatgtcctgcacatttgggttagctcaccacgtatagaccatttagttgcacaatgaagaatttaggatttcatgtgattgattgct

SEQ ID NO: 36290 - DNA, 549 bp, Oryza sativa
gacatcctcaaatacaaagcacttccctagttagatgtaggttagacttcccgttcgagaaactcttttttctacctgccctcaatttatgcacgagtaatgaatgccacctgggtggaagcgagaggtggaaatggaaggtcttagttcggaggtgggatctctacctgatagttgcattgccattcatgatgatcccctggcattcgtccattcagccattcaccattcacccattcaactggaattttggttgaatgccggaattgtgtccacaaattgtggatggatagttggttggctggctggatggctggctggatggctggctggatggatggtgaatggctggcggcggctcgggtgctttgaagcatttgttgctatctaaattccatttaaggtcgtaccttatcgcccagcatcatcttattctctatttgtattccctccatctttcagatacggatgtagccttggatgtgcccgtgcccaatgaagaggaaagagcgcaacatgaaacgtaagtacaaaagtaccggacaccca

SEQ ID NO: 36291 - DNA, 722 bp, Oryza sativa
  unsure (1)..(722): unsure at all n locations
cggtgtccatgatctctgtgctctgtgtctgtctcaacctcagaatccattgtggtgagagcgtccacgtagatgtcaacttcagagttgtatcccttgctgcttcctgcagaccgagcatccgaagaacgcgatagtgcttcttctgataacaatctgttcttgccagccatcacgtagttgttttccttgcctttgtccatgctgctgaatgtgtctaccatgatgtccctctcttcagtgtttgtgtcaggtgagtcagtgaaagatatctgcacttctgaatggttcatggagcagggcttcnnnnnnnnnnnnnnnnnnnnnnnnagattctgcatctgtggcctgaagcttcggaacacagatccatttagttgtcggtacttcagttgccggcgccttgttgggacttcatccaaagcttcaccagacaaatctgtctccaatctacaaaaaagaaattgccgtttgtctgagattaaaacagaagagaaaattctgggtggtatgagatgattatagtgggtgctacttggagtcattgttggctgcattaggtggtctgaaaatctcagaattttgcaaggtcggcctgatctcctggaagaaatggaaaagaaatgacaagcactcaatctattaggttcagtcaaataggatcattctaccgaagaaatctactgttttcagtttcattaccatagctctaagaggtcttc

SEQ ID NO: 36292 - DNA, 526 bp, Oryza sativa
tgttttctttgatttgtatatgacttttggttgcgacattcctgacaaaggactacactaacaagtaaccacgctttaggaaaaacaatttcatcttgtattttattcctttggggactaatagacgacatgtctacattattgtcatttttctttgaaagtcaatatataatttgacaccttttccgcccaaagaataaatactactacaaaattttctcatttcggctgcgacctgaattaaatttccaatggatacaggccggaagcttactgatctgcgataattaatcctcatcacgacatcgtagccaggcgtctctgtacaaatattgatcagcaatgtcgtgagcaacttacgacctcggcccttccgacaaactcttgtcttttttcttccgctccctccgtcctagaaaaacaagttttggatgtaacacattctaatactacaaaattagatatacttctgtacaaatttattgtactaagatatgtcacattcaggttctagaaattttttttt

SEQ ID NO: 36293 - DNA, 614 bp, Oryza sativa
taaggccttttctttatagtaaaaacacatttaatcttctaaaattcatatctaattcatccgagctccgattaagtccattcaagtctcagtaaattcataaaaatgcgtagaatccattaaaaatggttttgtttcctgtttcatagacttatagtgtgttttgcttgtgttctttgtttgtcgcgtagatttcggccgtttcgtcgatccgcggttcctcgaaacgttgctatggtctcatcagtgcgagagcaaggcaagttatgcattacgattgatcatattgtacccaatttacaaatgtctcgcatttctattaaatattgcattgttttacaatatcatgtgggatgggtcctactactcagccatatcttgtttaccttatgccattgataacttgggtattaaaatgcttagatgttggtttagggaatgcttagccatgcttagttcaactagtacacaatgggggaatcacattaatgtatagactttgattattggcaatagctttggattagtgccaccgcaagggtgttagttaattaaaatacactacatggtgtgctgtgggtgcatgggtttactagtcgtgcccatggcgatta

SEQ ID NO: 36294 - DNA, 629 bp, Oryza sativa
cgctttgtagaaaaattctatatgaaagttgtttttaaaaaatcatattaatttattttttaggaaaaaatagttattaattaattaattatgtaataatatatatttcgttttgcgtgtcgggaggagggcagcacctaactcatgctcctactagtttttgttatatttcttgttcattgaattttctcatagaaagggacattatgcttgatctggtggtgtttggatcagggacttaactttagtctctatatttagacactaatttagagtattaaatatagactacttacaaaactaattatataaatgaaagctaatttgtgagacaaattttttaagcctaattaatccatgattagcctatgtgatgctaccgtaaacattctctaatgctaaagttcttggatccaaacaccacctagcatgcataggacgaggcatttaattttacttataacgagacgtgccaaaaaatgatatccacataacggcataaaactaaacagctgcatatgaatgtaaagactaaataaaataattgcaccaaatcttaagtttttaaatgcatttttggaaaagcttactactggtactactattcttgtactcatatgtggagttgt

SEQ ID NO: 36295 - DNA, 553 bp, Oryza sativa
atctgagttgccgaggacagtgaggactgaggagtggccttcttttgagttttaacagtcggaagctgcaccgtactacggtaatgtacaagtacacggggtagaagcactagtgagcagtacaaccatcagaaaatgtctccgttcaaccgtggtgaaagtcgtcggtgagccttaatctaccgctttcaccgttacacttactaagtgcgttcactgatcagagtggacgtacaccgtgaccggctggccagtctgtgcaatacacgctgcgttgcacttcgatccgctgttagcctgttattaaggctgttactaccgttagtagtaaaacttgttgactgatggtactatgcttttttgtccggcctgtcttaattacccaggccttctctgaaacttgacgatttctcggcccagactgacagcaatggtcaaagtaggacgacgtggacgtaatggtcgctacggagtgattaatttggaggtagactagccagagagctctccgcgccggttgctccggcccggctcgcctataaaattcacccgc

SEQ ID NO: 36296 - DNA, 701 bp, Oryza sativa
  unsure (1)..(701): unsure at all n locations
gtgctgagggtgcgtacatacttttntattgtaaagcaaactagctcctgccccatccagtgctaccgatcgggggaattttgagatagagaatttgactgtaacaaacctattgaaaacatatacctcctgcgaatctttctcacgcttgacctcaaagagtttgtgcttatataacgcatcccagggggggatcccaacaatgctcctgctgcacaacgttaggggcacaaaaagcaatgcagtgacttatccttccttttaaatgtctcttgactcattctacattatgctgaatgacataggcagttgttggatctggatgctaatacgattcacatttggactgctaatcatgttttaagaccaagccagaactcaaagggttattccctacaatctttctttgtgtgcacggctgccaaaacgtaatcccaatgttctctcattgtgattcatgatatttggtcccaccgggacagattgcaaaacctgagtttccttattagccataaaggagattactgattctatgcttcaatcgctatctcctaacgttttagcccctccatactgaattacaacattgaactctccttaacaagaacttggtctaatttgcctgtcgatgtattaaatgttcgtggaactcctctagataataattcatccatgtgatcagattatgcctcaaccccccg

SEQ ID NO: 36297 - DNA, 562 bp, Oryza sativa
attcgtttttgttttggaaacgtcccgaaaatccggtgcgtgcaaacggcgtgagtcccggataagttacgcgcgacttatccggttcggttacgcacagtagagatcgtgcgggcgccctgatcaagagacccttctctatataaccgacagccgtcttcacgcaatatatgcgaaaatcattctagggtttgcctcctagactactccatcccgctcgccggcgtgcatcagcgatcgggagagcaggtctccgaaacctctgcctttgacgtcctgcaccgggagaaggcgacaataaggtttttgggaagcgcttcgcgcgactgctccctgttcgttcgcgacggctcgccttcctcttcgctcgcgtgtttcgttccttcgtagacacctgcgaaaagtttcgaccaagcagccggtcttttcgtcacctcggtacgtgttcaatatgttgcgcatttttgatctgttaatgttattctgcgtagttcacatgtgtagatctaatgatgcgttcatgctagttttcatctgtaatgtcatgatttatttatggaat

SEQ ID NO: 36298 - DNA, 607 bp, Oryza sativa
attaatttcggccgtttggcggaaacaaactgatttgacgagatgactagagtaaaccaaattcggctgtaatatgaccgaattgatcgattccccagggagtgctcaaaaatcgtattggcaacttttttgataagtcgataagtacgatcgcagcatctaaacgtcttgcagtgatatggagtcgccaaccacctcgatctagccaaatggccgaatcaagatgggttttgtagaaaaacggctaaaccggctagcggagccgatttagagatcaaaatcagcctctaggccaatttagatcgatatgaggataactacgcgtctcgtgggcaaaacggaaggacaaacctacaaagaggtgtcgcactctcgcagcggcagcggacgatttacaacacaaatcgacaaagatagactaaaactagggtaaagtagaaaacatggtaaaggaacgattcaagtagattatattcggggctttacaatgaaccgtccttatctcttaaataggggttggtcttgccctctacaggcccttctccacgtccaactcgggatagaaaccaaaggaaacacgaaacatagccttccctagcaaggaaac

SEQ ID NO: 36299 - DNA, 508 bp, Oryza sativa
tctacctaaaatgatactatagataccatagaattgagtgtccactaaccggagtcttgtttattctaaggcgaacaaggaaataataacaataacaataataatcaggtcgatacacaagaaatgagcatgactaaatataacaagattactcagaactttaattacagcgataatgccattcttaaaataaacataattatataatctgatatgcaatagtggcaaacgaggacactacttgcctcattgccttctataaacacctgatctaactgccatgagtagcagatctaccgaaactgcaacgtatacacgaccaacggataagaataggctttactctactaaactcacgtaacaagcaaaaacaaagtacacatatggtctcttgactactgaggaacaaatatagacttgaacgggccaaagccgagtacaaatggccatggtatggccataagaattgatatagctgttaaatggatatttgccaatgtcttcattt

SEQ ID NO: 36300 - DNA, 688 bp, Oryza sativa
  unsure (1)..(688): unsure at all n locations
atttctgatatgagttggggttgggttggttaggtggtttgaattacctgactttgaaagctttgctgatgcgttaggtggctatcttcttcttctattgggggccacttggtcagtcatatatgcggcaaacagtagtaccgaatctgtggcttctctctcagttttcagcatttttgcttgcgcaatcgaaacttgtcagtttgtagcatctttgatttaatttgttgaattagtctatagtacttgtgctttatttaagcctatattagccaggtgttctttcctccaattgtctgacgcaaatttcctcatattttacatggtataaatctatctggtgaaggtgatacttcgtcccatgcatagggataatcacaaattcaaaaattcatcgccaaattaaaccaccatggtaccaaataatccacccaaattgatatcacanatgaccccaaatatacagaatgaacangatatgatncaagtaacaaacaccatcagacaaaaagatggtgctcaacacatncactcaacacantaattaagtacacaatanatactggagtagtatatatgaactagtgatatacacaatacacacagcacatcatatggcatgatcaccatgcatgcatgatcgatgaaccaccatgcttgctcatcagaagcacatgtcgaggaggca

SEQ ID NO: 36301 - DNA, 1477 bp, Oryza sativa
agatttattgtagtagaaaaaagtctcatccaataatagattgtttttttagaatgaagggagtatagatgtgatatcattgttataggatatatcacatctatacaaaattgcgctcctacttatattgggatggatgtactccctacattcagctagaactggatatatgggtctcacatattctattcttgtaaatctggacacgtatagcaacttgtactgaatatgaatatctagtcttacgagtctcaggttgctatctcttggatggaaagagcagtactttctatgtttcatattttaggacattttggcttttttctaattaattttgttttaagtttagtcaagtttataatataaatatagcgatgtttttaacaaaaataaaatatattatcaaaacatatttaatattaattaaactaattttgtgttatatatgttgccaactttttatataaatttggttaaaactttttaaaaaattgaatatggaaaagtcaaagtgacaatagagtgaggtactccacaataaacgtgtggtaccatttccattatcaaatatcagtgagtacaatttatctctccaattcagttaaaagtaacctctagcacattactagttttttaggtgttctttagtcatgacacatctttgtgatgtctatagtaaattacataaaatttaagtgttttatagcaaatttgctagttgcatggatatatgtaattcatttaattatatataggccttgtttagttcgcgaaaagaaaattttttggtgtcatatcggatgtttgaccggatgttggaaggggttttcggacatgaatgaaaaaactaattttataactcacctggaaaccgcgagacgaatttattaagcctaattaatccgtcattaccatatataggttactgtagcacttatagctaatcatggactaattagactcaaaagattcgcctcgcgattttccctctaactgtgtaattagtcttttattttatctatatttaatgctccatgcatctgtccaaagattcggtgtgatgtttttaggaaaaaaatttggagaactaaacaaggccatagttgtaaagaggtgttttcaacagagtagttaggctgtgtttagttccacgctaaaattaaaagtttgaagaaattggaacgatatgatggaaaagttagaagtttgtgtgtagacaagttcaatgtgatgaaaaagttaaaagtttgaaaagaaaagttagaatctaaacatggccttagcaaactggtccgtttggatttttcttttcctcgtacagtctgcattctcactcgtcaacgtttcggtcagaccaacccaccaatgttaggccacagttcgcatgctactagctgtctagctgacacgaatggaggctaacgaacacggagtaataagtttacatgaccttctagggagttttgccgcccccccc

SEQ ID NO: 36302 - DNA, 3806 bp, Oryza sativa
gaggtccggcgagaaccctggcggaagcatctgcggcggcaccagcgccgccaccatggcgtgcaggctccccgggtcctggtcgctcgggggcggcgttgcggcggaggagagggagaggagcacgcggagggagggctccgggagggagtaggcggagagaaggaagaggagcggctcctggtgcggctcggcggcggacgcgaggtttccgttgccaccgccgccggagagcgcggtgcagaggaggcgcgggtgggaggcggcggcgcaggacggggagcagaatcccgcggcgcggcaggaggggcagggggatgcggcggcggagagggagcggaagcaggcggagcagaaggaggggagggaggcgagcgaggccgggtagaggagcagcggctgctcggtgaggatgacctccccctcccggatgctgcgcgccgcgaggagcccgcgtcctcggccggggagatcggccgcacgcagcgcgtcgccggccatggcggagcagagcttcttcctcggcggcggcggcggcggcggtgggagaagtgggggtttttttggggttaaccgtttgcttgtaagaataaataaatgggccgaagattaagtgggccttgtgatgtatgtgggccggaattaggggcccatgtttataaatggaataagttcacatgaggtctctcaacttaacagcgagattttataaggtcccttaaccacaaactaaaaatgtgtaccctaaactcactcaaaccgtgcactcaaggtcctatggcagtatatatataggtggtttcgctgacgtggagaaaaggagaggaggcggccgacgcgacggcggcggcgggacaggaggtggttggcgcggcggcgggagagagagagagagagccggccggcgcgacgacgacggcgggagaaaaggacggcggaggccgagttggttgcggaggtgagctcaagctccgcgtcttggagcgccgtgaagtcgtcgctgccgcttcgacgctcgagaagagaagagaaggagaagaaaaaatatgcagctgatatgtgggccccacatacttttttttggctgactaggatgccacgtcagtgaaatcacccatatatactgccataggatcttgagtgcacggtttaagtgagtttaagggcacacatttatggttttgtagtgaagggttcttaaaaaaatctcgctgttaagttgagggacctccggtgaacttatttctttacaaatcaagggagaaattatgagtgggcatttaatgggcttggattggaatcatgggcccaagttggaataattaagcgagaaattacgaggtgatttataatttgggagttgacaaatggaagcgaggaagcgcaatagggcacgggcatcggatgtgtttcgtgcacgcaacattccaatccatggtgaccattattcttcttcttcagattcacaaaaatgagatcccgtgaccgtgatcaactgatcattacgtgcagaactagctatattttattttcttggcgaattttttttattcgctcaatcgctctcataggagagagattttcgtacaagaaaagaactttcataatgttcgaaatactatttttggtttttaatagatggtcgtggttggctttttaatactaacgttcaataatgtatcttattaaaaaatacataattattatttatttagttatgtcttgatttaattattaaagaaactctaagcataatctctaagcacaatacattttctcatatttacataaaattttaaaataaaataaattgtaaaacatgtattaaaaaaataaatgacatcatgtaccctctttgatttatattataaattgtttcgactttttcctaattaaattttcttttagatttgataaaaaaattactatcatctaaaacaacaaattgtttcattaaactatcagttaatatattttgatattgtttattttgtgttgataatattattttattttatataaacttagtgaaacttaaaatatgttaacaaaaaaaattaaatataatttttaatataaaacagagggagtattcaaaaccagaggagtataacttaaattcctcactacttaaaataacttaatctactcagtgtactaggcctcatttgttgcccatattttctgataagctaaaatggtttgttaggaaataaaaaataatttataggtaaaacttttatatatttgtttataacaatcaaagaatcaagttagaaaatttaaattttaacttttattttggcttattaaatcaatcgatgaggctcctaggctacatggattaaatttaatagcctagttatccactatatcaaattgtcatgtactagcattactgtacactaagcagcccaacgacccgcaacatctcgtgcaccatgtgcagatttctctgcttatcacgcatgccattaaagattaaactatctgtgtcaatgctatgctacagtgacaccagctgctgtcagtgagacgaagaatcgaacagttggtttttgttaaccaacttcgaattaaaagccacatgcgagaggaatcatctgcaatagcggcgaatcagtggtgcaatgcatgtcactgtacgcctgattttggtgtcctttagtatctttttctctttaattcttttttggagactgatagggagtcttctcccatctctgttatttagtaccagaaatgcaaagcagtgaattgagtattaccggttacgaacttgagaaatgatatatttaattttttaaaaaagtttctatataaaaagctcttttaaaaaaataatgttgttttgcatttccgaaacgggattgctatatagcattcgaatgaaatttgggatgaaatcttacagattttgaaccattggatccataccaagactcgtgcattgacttctctcctccaactccggcgggctcctcttcttctccggcgctggcgacaccccaactccggtgggttagggtttggggttagggtgagggtagaaggagggttgggggagggagaagaggggggtttcctcgggacttagagggatggccgtgggcagcgaaggactggcagtgggcggtggactccggcgggcggcgaggcggcggcggcgccgcagaagccgccgggatggaggagggcggtgggccggcgtcggcagcgggggcaaagcaagcgtaagattaggagacggcggccggtggtggtggatccggtggccgggagccaccggagacggggaagacggcggggcaagggcacctcgtcgtcgccgccatgaggagaaagagaggggagggggggctcaccggcgccgttgactctttccggccagccggcgaggcgggcggcggcgcggtggggcggtggcggcggtgacggtggtggcggcgtgagaggacgggaggaggagtggaagcggcaactgaaatgggaggaggaggagtagggttaaggggctgcatgaatcttaaagcatatccaatggtccaaaatttgaatgataggaggtgggattttctatcacatgatatatagacagcccctttcggaaaacgtagggagaagctgatttaagctcagcctgagtcgaggagatggccaagaaatcgcattctcgatttcgatctgatatttcaatatcctataaggatgtataaaagcactacattggttgaaagaaatatgagtaggagaaaactatcctggtcccctttaacatttaatcacacgaattttatattcaagta

SEQ ID NO: 36303 - DNA, 537 bp, Oryza sativa
attattaataaaaaaaataaaaaaatcgattgatgttactagatttatcattaaacaaaatattataatatgtaactctttttatttagaatatatatagatgtatgtcgaagaccatatcaaagttaaaaataagtgttctgagacggaggaatatattgcatataggacgtcgtacttatcagcaaagaaatgaaatggatggacggtgatcacgtgttgaccagacctgacacaaactcacattcattactgttacgcgtctccacgtgcctcctctccctccaccggacctcatatcatatttccttcccttagtcgccattttcttcccatatccacgcgccacgtggacttcctgacgacggccggcgacacgtgaacccagaaccttccccaacgatctcattctcttgctgtcttgcgtgttcatgctgccccgcgggcgttgagtttcttctctacttcctccgtcaccaacgacccatgcatatctatctgatctccacgacgcgcctaagcaatccatctccatct

SEQ ID NO: 36304 - DNA, 683 bp, Oryza sativa
taaaaacgttattatgtttgtttatggaaactgagcttctctaattgatctgaatttgttattccaacaatgaccattgatctgataagatagtactagcaaaagaaacatgtaatatgtctattccagtactttgggacatgcctgacaatattggtatatgatacagtgtaaataaatacgaagaaattgttctcacacataacggaaatgtgtatatacaagcttagcaagaaatatggaatcaacaatactatcaccaaataatctaatttccttacactatatacaaatttaagcaaaccatttcttaagcaaaatgagaaaaagatcaaaccgttcgagcacggtacgaaactgacactgggacccacacgtcagccgttgggcgcttgcctgagcctgtcgagcgccgtggtgttcgaccgcggcggcgccccgtgcgcgtgcgcgtgctccaccagccgtctcgggaactgcggcatcgccatggcctccgacatgacgctcacgtcgtccatccacggcgcggcggcggcggcgtcctcgccgccgtacagagactcgccggtggcggcggcggccaccccgcccacggcgcgcagcgtccgccacgccacgtcccgccgcaccccgccgccggggccctccgcgacgcgccggagcacctcgccggcgcccgc

SEQ ID NO: 36305 - DNA, 659 bp, Oryza sativa
cggtggggtagacgtagaagatttcgggctcgtggtccgtggtgcggaaggggcgcgagagatcggggttgaacacctgccagaacgactgctgggtgtagccgacccagaccgaatccttgcggccggagctggagtcggtcagcaggccggaggcgatcttggtgcgtgccgacagctggatgcgcatttcctgcggctggtagtcgcgcaccggggcgggctccttgccgggctgctgggctgctggttgatgtggtcgctgcgcagcaccgacaccgacagtggcttgtagccgcggaaggtgaaggtgccgcagtcgctgccgggctccagctcgaaaaagcgcgagatctcgctgtagcgcggatcgcggcagccgccgttggtgggcaccaggccctggccgggcagcacgtcggcctgcaccatgggggcgttggcggcctgctgcagcacggcctcgggctgctgctggcactggccgccggggcctgccaggtgctggccgggggcggggtcaggggttgctgttgctgcgcccaggtgtcaaaacaggccaggcgggcctggttgtcggtggtggcggcgcattggcgccaggcctcctcgcgcacggcgccgggcgcctgggcctgggcggcgggcagggcggtgag

SEQ ID NO: 36306 - DNA, 1432 bp, Oryza sativa
ttcttacaaaaatgctttttaacaaaaaaaatcctttttaaatacagtcccaaaaaaattacgctcatattcgcacgcgcaaatcacccatacgattatgatgggttgaaaactcaaagggggataataaggcggtgtttagattaggggtaaaaaaaatttagcttgtcgtatcgaatagacggacacatatttaaagtattaagcgtagactaataataaaataaattacagatttcgcctatgaactgcgagacgaatttattaagcataattaatccatcattagcaaatggttacggtagtattatactgtcaaatcatgtagcaattaggcttaaaagattcgtctcacaatttacacgcaggctgtgtaattagttatttttcgtttatatttaatactccatacatgtatcaaacattcgatgtgacagggtgaaaaattttgccagtggatctatacaggccctaagttgcacaccataacgaggctaaccaatcaagttacgttcactttgttttagacagaattttggttcactagcaaatggtaaatttcatctaagataagggaacatgcaaatttatgtgatatcgtgacttgttgcaacttccaaaaataccttccagtaacataatgcaacagctaggccttgttcgtattatgacgtaaagttttttttttcataactggaaactgagaaacctccattattccatatatattctactagcagctgggcaaaaattaaaaaatagaaataaaaactagcagttgcttctgtccgtaaacgaattgttgtgcacgagctctttgatagcgatagaatttagcgacagctgaggctgagcttatggcatggaaggcacgtcctgggagaaaagcatcaaagaatccatatgatccaaacaaaatcggtcaaacaattcccttcgattttaaactagctttgccttttttaaatttctcgatctccttttggccactttttgcgagtggagtgatggctcaaaactgcaaagtatgcttacacttaactacttaagctgtgtctttgcgacaggatcaggttacaggcaaagaatccaggcaagcaaagcacacacaggcgcacggcgatctgctttgcagtgatcttttgtaaggcaagatcgacacatctatatactactagcctctaaggtaatcttttggcgctaccacatcattaagtcggaacaagatccttcgccctaaggctgtgtttttttaaaaaaaacgtagtacaatagtatgtgctcataaaattaggcggcatatcttgagattaataaagtcactttatatgtcttgatgtcaacgagtacgtcgtgaaaaaaaaactagttgtaaatgtgagcacttatgtcaagtctacttgaacatgggtaaaaaacccgtgtttggtat

SEQ ID NO: 36307 - DNA, 601 bp, Oryza sativa
taagtaccaacgcataaaataagagtcactgatgttgaggtttaattattttaaacttgaccaatgaatttatataatattttaaaacaatttttatatagaaaattttctcacaaaatgtatagtttagtattaaaaaatgtgctaaaaaaccaaggtaaaatgtgtaactcaatgggtcatacttcattatccgagccaattaggattatgaatgcctacaactggttacaattaatttattattatgctgttgattacgcgcagttacgtgctggatttatagtctttgcttatgtcaaatgggggatttacgcaagtagctgttgtgtggaacggttcgatgagctgagatgtggtgaagacattgccagagtgccaagagttgacctcttctggagaagtgaagagtcgaaggaagaaggaatggtattgccttaaattctacttctaggcttttggaatataaggattttatagggttccacatgaactctgttttatttacatgtaatttgggaaaagaatgatgcattcaaaatgaggactagctttggtaacagcgctttaaacagtttgtttgtcaaagtttatccaatga

SEQ ID NO: 36308 - DNA, 713 bp, Oryza sativa
tatcaagtaatacttgagaggtatcacctgataccagttagatattaggtcatgatacctaaaagatatcaagaactgatacatatttctgtccaaacgggatatggtcttgtacaattcatggaatgagaacagcacaatttccaaagagacgaacgattaaaaaaatactattaaagtcccatgtcttctcagtgtgaacatgcacccataaatacactgatttgcctagctttatcatattgtattgtcaccaactcagatactggtgtgacatgtctgctcgtgtcacgtgcccacgagtactcatgaggattgcaggcctgcaacacacttagctgctcatgtccgcgtgtcgctggaggtatgattgtgcacgaaatcaggttgacttatgtccgtatcgaggaagtcatagaatacttcattaaactattccgttcggacggtatcccgtacaataatttttctcttttctcaaagcagggggaactacatttatcttcctgcttttgttcccttcttaccgtgtcctcctttttattgggcttaaccatcgcagtattggtactttcttctcaatccacccatccagtcaatccccaattatataggtgtaggccgtgctttattcctaatctgtacaaccaactattctttaattattagggaagggcatgttccattaacaagcatgatcaagccttaaaaag

SEQ ID NO: 36309 - DNA, 554 bp, Oryza sativa
tgaactcatttctaccatgtaagtgacactagctagggaatttagtttggaactttggatgagaagcaaaacactgggggaatatcgacttaatcgatacatatctcattgattacactgaccaaaggaatcctaacatttttgctctaaagtgcgctaaacagagaaaaaggcaccaacagaccacaaccaaaaccaattgtatgcaccaggtatcctcgacttttctggtgcacatgatgtcttgtgcctgacaaggaggcttgtgatttccaggcaagcagtggctgacggtgagctaaagattctggtatgtcacttagattcagcatatgttctcggtcaccatcagtgcaatcccatctgagtctcgccaccccacctgccccaatgggacgggcaattgtgcaaccaggtttcagtactaaacttaactgtagtcgcttttgaaaatcttgattgacaacgtactggaccttgatgcacatttggtaccgtatgctttggagtagagcaatgtgctgccatgtgatgtgatggagcagctgggcagt

SEQ ID NO: 36310 - DNA, 1179 bp, Oryza sativa
  unsure (1)..(1179): unsure at all n locations
cgcgatgttgaccactgatggagacgagcttgccgtgacttgtccacgatacacggacactcagtcactgaggcggatgatttctgcgtcggtgtgcaggtagacccatttgcgctcctgaatgactgctgagacgcgatatgtgcggccttcatgcaatgccatcatgccgggcgtgacgcactggcgaatgagcggggtggtgccgtagtggttgatcatgccttcacctcaacctgttccaggaggccagccagcttcatatgccagcggttcatcgtcagcttttcacgcgggttagataccgacgtcagctgccactcgttatcgttgagctttttggcggtgtactgcttgccgttgtgggtgactgtcatctcacaccaccttgaataagaaccagcccataccgcacacaatcaggcccacaatggttattgcggaagacatgcgtacatggtcaatggctagttttgaaagtggctggcgatgttcttttttcgtcagcgagttgattgctatgtcgagcagaaacgtcccgacaaaccataatgcgtatatctttaagcccaactccaaatcactcataaatcctcttggccttatcgcggcgaacggaacgggtaatacaagacttcaacgcatttattcagtgtttcaatggtcggtggatagccggccgctgtcataacttgacccactcgaaatgaactcagtatgaaaaagcgctggttaggcggttttgagttcccgcggtttgggaccaattgggccccccgcagttattcaaatggaaaaaattctcgggccttaggaacccagtctaaaaaaaaaggtggccgtattccggccttatttgtttattgtaatcaaaaagaatggaattggctttttgagctttttggcccgggttaaaatgtaattattaatttggggaccttaaggcccgttattatggaagcgtttttattgtacccccccttttttganaaacaccttaccctttgggacccctttaagggaaaaagctttgtgtgtgtggggtggaaccttttacccgtgcgctttattttgcaaaatctctcgctcccctcttattgatatttctccctaacctcccacacctatatttctgttgtgacgccatcctctagtggtgtttttcatattattttgtcg

SEQ ID NO: 36311 - DNA, 1238 bp, Oryza sativa
  unsure (1)..(1238): unsure at all n locations
ccgctgttgatgactacacattgaggcagcaccgaagccagctaccagtaggttgggcgaccgtgtcctgaacttcacctctgccgtcttctctattgacacctattaatatttacaaaaaaattaggctgtgtttagtttttgaaattggggagaagtttgaggaaagttgatagtttagaaaaaaaattaggagtatgtgtgtgtaggaaagttttggatgcgatgtgatgtgatggaaagttaggagttgggggagaaatttggtgtgaactaaacagagccttagttgataaaaaaacgtattaatcttcctcactcgaatcatgtgctatactggctcagccactgcatggcagctgcaagcgctgcaccaaactcctcccatgcacattttgttattgggttcaggtctagcctgccccttttcatggcccccttttggaaaaagtacaccgaaggtccctgaacttgtcatcgagttaccaaaacgtcctcaaaccgcaaaaccagacatcgggggtcccctaactatcaaaaccgggtcagtgttggtcccaggacagtattgtgtccggttttgtcctacgtggcgcattgaccacggtcttcaacgctgagtcagcagggcggtagttaggatataatgggcgaaatgttttgcacgcggttaggttattcccattcccccaaaccctaacgaacaagaaccaaccgngctgcngcngcggccgcaattaccttgatagcggtggccagcggcgggccgaaattttcagctcgatgagcgaccgcttgtcgtctacccgtaagtcgaaagcatttccccggccttattgggtttggtccgcttggatttcaaccccccagtgatgtgccgatgcctgtccaccaccaaagccgggnaggttgttcttttggagccccgaccacacttggtcgccggtttacaaggccacaacctcttggaagtgagggatcttggttttcaaagtggattttaggtttggcttttagggtttgacgaggggttcttttttccaccggggggtgggattttgggttttatccacgggccgccctaaaatcttttctaggatctcttatatgattctcggcaccggtgatatttttgggtgggcgaaccaatgttgccaaaggcgctttccactcgcgtaatagggcgaacacctcacaaataataatctcctcttctgggtgttgggaaaacgcacatt

SEQ ID NO: 36312 - DNA, 1141 bp, Oryza sativa
  unsure (1)..(1141): unsure at all n locations
tggccctgnnnnatgatgcccttttgaaaggccggaggacgtgaccgattcatcgaacttgggcaatgtgacagcgaagtttgttggacaacattttagccaaggtgtttgtttgctacccctacaaacaatatgacagcgtaattttggtgttgtaactttgtaactccgtaccgcataacggccatcagtaatcaccagccaactgatcgaggccaaaatcacaacgtactccttgttgtacacatgccagttcccacgcctaagagactacgagatgtcgagattgttgtcatttctcaaaaaaggatgtcgagatggtacagcactctggcagaagacgcaggacggcggcaggagccaccgcgaaaaggccgggcccaaattggcagcttacgtacgccactagcccactactgcccaaattgcacgcatgtgtggttgtgagcaacgaacctctgaccggtttttttttttaatatcaaagaggcaacagcctccgattagaaggataggcacatcacatagccagtttgacaggacagccccatggggatagaagatctcattatgcttggctcgtactagtataatgtatttcatccatctaaaaaatctaatcctaaaggatgtatctggacataaatattgttcaaatacatatttataattggttttgtttgacagaggagtaaaaattaaaacccaacaaacaatgtattaggcattttatgggtgaaggtctttaattaaaatcttaaagcacaaatggggaagtctggatgggccttttggcgcgtttctaccacgggttaaatatgcatccacatattttgccctccaaaaaatcttgaggatcgcgggacctccctctattttcaaatggattgcgaacacagaacttctttcgcattttggtgaacactccgccctcttataaaaaaatctgtgaaatgtttaaaaatatttgtttcctttatatataagggatttttattagaaattcaccgggttggggaaaaataacactctctccacattttgaaaaaagaatggtggaaacctcttttaaagaagaggtgtaaaatatttaaaagaggggacaacctccaatattgtgttttattggaccaataaaaag

SEQ ID NO: 36313 - DNA, 1854 bp, Oryza sativa
  unsure (1)..(1854): unsure at all n locations
cgcccctgtcccaagggcgaggagagaacactgtttcacagcacccccacagagaggatgtggtgccgtgtgccggcctctcgcgcagggtcttcacccgtagtttttatatggagccttcccatccccccggtgttggggtcaaatatgaacccttaaggcacatgagtccggccttcgcgccttggggagtccaacctcctccataatcccgtgttggatggtcggccccaatccttgataattggtggcaaacacgcaattaaggtcgcttttatagacccaggtttaagcggagaagcgcaatttccgagttgggagggggcctcccctggcgcccccttctgggagaaggggattggcctctcacacgggaccgccgaccattctccgttgcatggacgccggttataaggttacttgcgttccggtctcacctcctcngacgccaccacttattgcacgtaggccaaggcacccccaacgtccacgacatgctgtcaccccacctcactgccgatcgctcacttccctctttcccatcaaccatggtttcgccacgcatggatctgggcatccacattgaagggaagctggatccaaaagtggggttccgaatctagtgtctccagcagcctctgtcaccctggctacctccaaccaccaaccctgcttccagtggcggatctaggatttaggatataggtagtccgacctaattttatttttctaaacacaacaaatctaatgatactaatatgagaatagaatagaccaaatcaccaaaagtttaccatgatatattaataaaatatcttaaaacatcacaatgcacaagagttcaaaattttaaaactgaaaactgaaaaaggtacccaagtacttcgtagaaaacataaaattgtcagcgcaggcagccgggcatcggcggcgacgcactgcagcaagctaggaggcaggtctccgtgactccatttgccagttttactcgactgatcggctcgaagacggctcctcgaggtggcagcacacactgcagcctgcaacactgcatagcagcagtgccagtgcggcgtagcggcgcggtgtgggcgtggggggcgcgtcacgcgcgcacgtgggatagcatcggcatggcgctattgcgtgatcagatgagatgagaaagcatcgctacgctaggggctagggcaagatgagagagatagagtcgcgcgacgccgcgacattctgaatgatcgatacacgcgcatgtggggcatgtgggaggaataggatcgctactttttttttcaatagtcgctatttttttaatagtgggtcgatcgcctttttttttggtggtccatgcaccacccggaccaccctctaaatccgccattgcctacttccatggcaagttggtgctggatatggcaccgccaaggttgagggggagtcaccatgtcatgtgacagcatcttcgtcgccgccttgcaccgcccattcttcatgccagaatcaggacatcagggaagccccgccaccaccgtccttgctcaccgcttgggttccggccgcagctccagcaacagcaaggtagagggggtagggtggtgggtgacgcgaggggatgagtagagctcgcacaaattaatttaacttttccaagggcccgccgtgttttgcaagttactttctgtcctgccatagagttgatttatttgtagcatttaaatctatcaaagagggtgatttgcaggcgcttatatgcacatcatcggcccaagaaaaatcgcattgaatggatcatacttcatcatatctcttatctaccaatttaattagtatagtcaaagccagaaaactttagag

SEQ ID NO: 36314 - DNA, 1584 bp, Oryza sativa
  unsure (1)..(1584): unsure at all n locations
aactgaattgactccncttgaaannncnnnnnnnnagctaaactcacatattatcagtacagtgtagcaatgcactgtggagtaccacgcaccttaagaagtagaagtgcataattaatcgttttatttttagtgagtacgtagttgtcgtcatgtcatcatgtggtcgtcctttcataagggaaacaagatgagtaataaagcagcgtacttgtgtggaattccttcttcccgtccagacacgtaagtgttcggctgtcgccgtcaacccatcagagaagggagagagaggttcgttcagtctttgttcagaagttctagaatgttcaaagagtagccacgcatgtttgaagaagcattagatcgatcgatacagggccttgtttacttcctaattttttttccctaaaaacatcacatcgaatatttagacacatatatagagcattaaatatagataaaaataaaaactaatcgtacagttagagggtaaatcgtgagacgaatcttttgagtctaattagtccacgattagccataagtgctacagtaacccacatgtgctaatgatggattaattaggctcaaaagattcatctcgcggtttctaggcgagttatgaaattaatttttttattcgtgttcgaaaactccttccaatatccggtcaaacatccgatgtgacacccaaaaattttcttttcgtgaactaaacaaggccatagtgggagatgtaaactttctcacaaaataggccattcacgtcagtggctaaataggttgtagccatccaatccaaccccctcatggtaaaattatcacataggtcctttgacaaagttctcccagtatatcccgacttcgacatttttaataatggagcggagccaagccaagccggagtaaaaacaactttcattcaaaatagagtaacttttattttaaaagaaaaccaaactaaagcaacctagacacaaaaccaacttaaaagagcttttttttcaatataatcgccactatggctcactagaaagcaaggggtcttaaatcgggccttgcgacatcgagggcaagtatatttaaatatccgtgtataaattaaaccagtttcaatgccctaaagatggcatgacactcttgaatcctaaacagaggcaccgaatcgccccttctcttcttggcttatctagctctgcctctaccccactgtctcccctttcccaacattgtcgctgctgccactaccacaatcactgcctcgtagagtggccataccaaacgagtagtgaaggagatactaggtaggaggtgaaaaaaagtccacaagtgtgaaatgaacggtggaggcaatgggaggttgtggtgacaacatcataaatagggaaggagagagaaagaccgtgtgtccgggagatgggaatggtgggagagggaggtatgtcgaggtggagttggtgcctatagcaaggatggggatggggaggaggtggtggtggagacttgaggagaccacatcggtagtgtaggcaggaggggaggagatgatgatgtaagaggnntgccantcgatnntcaaggnttcaa

SEQ ID NO: 36315 - DNA, 533 bp, Oryza sativa
cagggcccaaccaacccccctgaactacagtgcattgggtcaatttattaaggtgggactaatcacggtgaatctggtcgaccgcccataaccgtgggcacggctattcgaatagttttactctgatcagaggtgtacaactgtacccacaagacacagccccacgacacgttttcgtgcgccgacatgccaccacgacatatcggaaagagactgtgacaggacccttcgcataaccccctctagccaagcacaccacacctcaggtttcacccccgtccccagcgggcaacgggcagtcccctctcgtgcctaggtgaatccggaagcgacagaggccgtcgcagggcccgccccgctccatcacgcccacccttgcctggatgcgtcagctagaggaaagctacattacaagcccagccgttgcccacgctggcttgtggtaagcatgataaattcttccagggtttcccgcgaaccggtccttaattgccatgggtgcgactagcaaaaccatgcacccacagcccacc

SEQ ID NO: 36316 - DNA, 1466 bp, Oryza sativa
atggccttgatttgcttgtagcgtctgttgggagatggcaaaaaagaaattcggcagccgcttctctcgtcgcctccccagcccggtggccaccgccgaccgtgcctggcccttcgctgccagcctcgctggcagccgcccgctggccccgccaccgtgcacaggccgccaccgtgccccgctcactcctcgccggtgcttcgattattcctatataaaaggataagactctaagactagagagaatgaggaataggaagataaggagaggataagagtgtgagagagagaggaggaataggagatagaaatttttgaggataagtgcaaggaattatatatggtatattgatttttagtctcagttgttaacaccaaccggaattaaagatgtacataaactttagtcccggttaggaacaacaaccgggactaaagttaggatctttagtccactggggacctgacagcctctaacacgaggtggaacaaccgggacttgcataaaatttttgaataagacgagtggtcaaatgttggttaaaaagtcaacggcgtcatacattaaaattaaaataaagtaggatggagggagtataattctttttccgcttcatcaatacgaagcctcatattatcgtgggggttgtttaacaaaaaaagaagtaaaatttgtgcgaaatgcagcggcacgcggtcgtgccggcgactagtacgtacgtacttcccgtgagtaggcatgaatcatcatgactcgcgggtcgcacgcaaagttcaccgcaatttcatccgcacacatacgcacgtatacgtgttttctccgtccggtttggtactggctaaccttgatcaggaatttggattaatatttcggccacactggagatcgtctcttgaattcggcctcatctctggtgcagtttatgcgaaatgcactagccagctactccctccgtccaaaaatagaacaaatctaatactaaaaaatcaatctagtatagacgtgacacatcctagtacaataaatcgggatatacctctgtccagattcattgtactgaatatatcacatccattactggattgtttttttccggaggaaatagctagcttcagatttggtctagttgaaacccgaccaagccacgtttacgttccgtccggtgccacgacaccaattgttaagttggcaccccaaccacgtttgggttccgctccgttacaacatatcgggaacaattttatttgtcggtattggacaatgcctatccccttcaggctttttaagactttgggtggggctggttggttatttcgctttcttaaaaaatcaaaactttttctgttttttgttatacctaccttatttttccagaggctttttatttcacagaactttagaaacatattgttgtcttttatattttggcacaatatttataaaaaacccggcgcttatacacacg

SEQ ID NO: 36317 - DNA, 1254 bp, Oryza sativa
  unsure (1)..(1254): unsure at all n locations
tcctccgtctcctactattacctctactttaactnttctcccttctctttccgctctcacccctccnttacttttccaacntccgcccccccccaagtgatgcactctatanacccccnnnnnnnnnnaagaaaaaaannaatncgggcgtatacgtcacgccgtcgaagaagctataaccaattattatagatctgcagttcaaaataactgcaaattagagaaaataaaagacgagcacagtttgatggaacacaagagaactacttgctaaagagaaattttacgatccttgataaaatacctgaaggtatcaagtttaacattacaaaatgtggcattccccggtaccatccgaaggatggtaaatttacccattgctaaatcttcaccaatgatccgtgaaaatctgtataatctgcatacagtccttatccttctcaaaccttgaaacctgtatgtatgtctaatcataatcaatctgcataatgtcctacttggcgtaaacaatgcgtggaatttatgatgttggtggtgtgtcattttgccgagaatttatttcagtgttttaagatttgacaggagagatttacaaggttgggctacaattacagatttcattgattaagttttgtccaaggttgaagggttgctttcacgaagacaggttgaaatagactcataacagggtcgttttctttccgtctcttttgtcagagtcacggctccaagtacgcaattcagttgaatagtaagctcacatgaagcttgctcgctcctgtcacttccagaaaagaacccaacggctaggaatagttgaaaccggacggggaaatcacatctaaattgggtgggaaaatttacccattcaccaatgagaccattggggtacaaaggaagaaaggatgaaacgcaattgggagtccgaattccaaggccacaaataaggaccggaacttggaataaaatatttttttgcgcggaacacggaatacccattccaagggggacacccttgtgcaaaaaccaaacgggaaataggtccggggggaatcggcacctaattgggggaattccccccgcggaataaacaattccgggagattaatttattttccaattaaattctctaaggagagaagaactggacggggagggggcaacaacacgggggaggaggattgaatgggaataaaaaagaacctcccaaaccggcccgggggcaaaagaacttgaacacctaaaaggagaggg

SEQ ID NO: 36318 - DNA, 1317 bp, Oryza sativa
  unsure (1)..(1317): unsure at all n locations
cacaccccaccttctcgttcctntctccctttctttcttgcatcttccctctccttccttctctatataccctanttatactcccnnnttcccccnnacnatccccccctntcccncncccaggcagcccatgattgcacctctttcaaccccgcacagatacatggatgttaagcgcaatattgttggttgaattcaacagaagggagctagtgcntctattgtttttccatatgcaagccaacatgtaaatttctgcagaaacatccagtcagggagcaaatggtcctgaaataattggatttgcaccattaagagaatagcaaatgaagttgcacaccattaagtctcaattaagtaacatagatagccaaatcagtatggcatcacaacttaagtcttacatcacagataagcaagccaaatagtatggcatcacagaaatagttggctgtctagtatctgccattacatcacacacagatatagttggctaaatgcagtctgccattacatcacacacataaatagttggcttaaaagtctgccattacatcagagagcatgtttcaacataacatgacacacagaaatgggcacattcagagcttcttggtttcccatggaagaagaatgagagctcctccagctttcttctttggcagattttttgtaggctcttcagttgagacagacacaattgccttaccagatgtcagcctcacagatgcagttgtggagcttttggaatggggaactattgcttgcagatcaacttgaacagatacaccatgttctgtgcaaactttggcacttgcaacaaccctgaccatctcctggcttttcattggtgcnnnnnnnnnnnnnnnnnnnnnnnnnnnnnnnnnnnnnnnnnnnnnnnnnnnnaattccccctaaatgaggcggtttaccaattacttggccgcggtttaccaacgtcgtgaactgggaaaacccctggcggtaccccaacctaaataccttggagaacattcccctttnnnnnnnnnnnnnnnnnnnnnnnnnnnnnnnnnnnnnnnnnnnnnnnnnnnnnnnnnnnnnnnnnnnnnnnnnnnnnnnnnnnnnnnnnnntcaaaaagaaaaccccctccccctgttttggaagttccacagggatatttttacaccccgggccacggaggggatacccctgccacaggcacactgtgtgcaaaaaaaataccccgaacttataccggggctattttggattaaatgtgcccttaaccacccattggccacgggccgcgctctctttgggaaaagagctattct

SEQ ID NO: 36319 - DNA, 1304 bp, Oryza sativa
  unsure (1)..(1304): unsure at all n locations
catggnaataagacccgtgcttacgacgcncccgncattggcgacgnnttctttcttccgcttggtcgggcatgggaggggaggatgccggaggcggatgcgagctccggggtctctcatggccaccttgctcctgaccagcaccgagttggtcaccccctgcacgttgttgttcacgtagatgttgatgctgcagcagcagctgccgctcgccgccactgacatggtcgcccccgtgctccggttgctccgctcggaggagcaatcgtctgcaacacccatcgccggcgaggtaggccggtcggaacggacggaaggttgatttctgaagctggagaaaacaagatctgcaacctgcagggatgcagtgcagcagcagtttcagttatatttggcatagttagtacgttgctgcatcaccaagaaaagcatagcatatgctactacgagcacagctggggaatcacactttgcctctgcggttgggctactccccaggctccagcaatggatgtcaagaaagagcgggttaattacatgtcgctttgcgcttatctttgtatagcgtcctaacatgacataggcacatagcaaatcaacggtcatttttgtgttctattgttgaataagctgcgcgatagaaggcccatttcagttgtcaatgatattactgggctggactgtggatttggagaaggtcagaaggctataagaaaacgccagcccattctgctcttctagtcctttctttccccttcacgacgttaagaacattgtcgttttttattcaaactttgaagcatcgccagtaaaatctcgaagcatcacacgaataaaaataaaaaagaacactttgaagcaccaccagtaaaagtttggagcatcaccagtagattaagctcatgcgaagtgcaaactagggtcggcacaacattaatatactttggatccacatctgtaaataaaacacgaggctatcgactcaaatacttagtactcacatgctgcagtcatacgggccgaacggctagctgatactaccagtaaaccgtgttcaacggaaggtagtactaatgcgttaggatgagggcaagcaagttgaacttaattaatcacagtactctacattttctcaattcatccgtgcacacattttatacttgaattcaaacagaaccaaacacacagcagcaaacatttgaactaaaaccaaaccaaacggtacatacatatgattacgaacgtcgatacagagaacagaagtttacatacggagagtgttgtaacaaacagtgtctactctg

SEQ ID NO: 36320 - DNA, 1258 bp, Oryza sativa
  unsure (1)..(1258): unsure at all n locations
ttttttttttaaaaaaaaaatatggcgctgctcaaaaaacccacccttttccaatattttaaaaaaccaaattccgcgccgtagacataataaagccccaggcagggcaacccttatttgggggacctttaattgagagtggggaaaatcggccccccctttttgggagatttaaaacttgcctggccgggaaaaatggaagttcaccatggtctggcctggataggattgcattaaaaataccccggcccccaattttgtaatggggaattttttcccaggccaaaggggcatggtatttattaggttaaaaaaacccccttaaaaggtttccatggagggcccgggaccctttctttgtcacaatattaaacggttggaggtctgttctaaccaaaatttgccgttctgggctacttgagccccagtaaagcaccacaacgcagtagaaaacaatctactccagtaagaattagagaccatcttattatctggtaataaccattgtcaaagtggtgaagaataaggccccacctttttccccactctcacaaacaaacattgtggatgccgtaaaaatctgaccactacattgcagatatatatgctctaagcattcttatgtatgagtgcaatacaaaatgctgccactggtctagcattgttacgaagtttacagtccacctagctacttatggtctccatactatctactctctcagtttcaattttacttgtcgtttcaatttacttgttctagtattcaaaattttgtcaaaatatttatcattttcatattccaaagcactttaaagatgtttttccctactattcatcaatatatccatactaatactactcctcacattattttaggtaaaattggttaggatttaattaacttagcatacctcctgtttaatttgagatttatgtataacgataaataaattgaaatgaagggaatactaattaacggactagagagatatcttcatggatggatgtttttttctgaaacaaattcatggatggatgtggattattcgtgctacccacggttggttggtccctttcataattaaggagcttaactctctctatatatagtcgcagttcttactattacattaccacttctttatagggattttctaagatccatgttttactttagactatgtgtatatatgatgacaatatattggtgcgtgattgttcttcngggnnncgtccattgcagcgcaatcaatgcgct

SEQ ID NO: 36321 - DNA, 4499 bp, Oryza sativa
  unsure (1)..(4499): unsure at all n locations
tattcctaatagtaagggatcatatatgctacacaggggaatctagatttcaatcacctgaaattttacaaaatttcagtcacttttttgctgccactagatgtgcaacctacggttgatagcccttcacttcagtcctgtcttctcagcccagatattcttaacttgtgaaatttctatacatgtgttgtgtaattcctatacatgtattgtaatctttgtgtactagtggttcgctagagcagaccgacagttgggatcacttcctaacttacaaaattgttcagagaagttggtcaacaaattgcacagaacaaacatttgcatgataagtccatacagttcaaaaaagctatttcaagtttgataagttggaattgttgccccactaattcatgccattaatttgcctgcatggataaaagtttccaaacctcgtatagtgctccacatcaactggagttccaaaaacatcttctacacaagagaaatatcacttacaggtagctaaatttagacatgttcccaagctccaggggaatgtctcacagtaagtttgtttccctttaaatacctgaacaaaaaaggagccaggaagtcttatagaagaaagtacatttcaggaccctaatgcttatggacagaaacaagcatacaaatatttctctaagtccacaaaacataagatccaatatgtacatttagtaaatgaacaatttgcagaaatttcagataaaataaacaaaactgatatatttgaatttggtttcctcaataatagcagatgtcatgtattagaattgcacaaggatatgaactgcaacaaaatgaaaacaggagcaacagattgagaaggagaacttggaaaccaaaataatttgttcatgtcattgtcaaatatcaacatctgatataaacactgcatcacatgcattgaagctcaaaacatgacttcttatcatcaggtacacttaccgagatccctatttatctttcaagacacgatcaccaggttttagcacctcttccttcactgactgactggtcactagctttttaacgacccaacttctcaagctctttaagctgaaaccataatcacagacagctatcaaaaatagcattgctaggcattgacaaacgatagagattcataaaaataatgaacagtatgagcatctgaacctacgcttataactccaaagaatataaacccataataaacttttggtactaatatacaggtatatgtacataatacttgtgttggtataaagtagttgcatagttgtatgcccaacaggattacttgtcaatactgaagactagtattattacaaaatggaacagcgtggccatgacaacttcaaattgcagtactacaattatatgtgtctctacacttttcagaacaacaaagaaactggaattaaattgcactactaggtttgcacttggggtactagataaagcagagagaaaaaaaaaagggagagcccacattagatacaagggccattgatgaacaacgcagcatttggactatggaagcagaacagcattaagtctgaatcaacaaatctaggatcagatcagccacacgataaaattaggataatagggggaaaaaggtgtttccaggtgctcaaacatcactgcacagtttcttttttttaaaaaaataaaataggcctactaaaattaagccaagaagtttcggaaaccctgcataatccaagcatcactacatgcatgcccagatcaaggggtcgaagtgatccatatccaaagtgattagaagaaactgacaatacgattgagcatagttggtactagaaacgaggtggggggagtaaaccttactgctcaccgtcatcgatcgatttgcttccggatgtccggctccctgggctgaggtccccatggctcggagagtcggagcggaggcagctcccgcctcctccgttccaagctcttctttccttcccactgcctgaagtcggaggcggaggcggcctcgccgacggccgccgcctcgccgggaggagaaggggactggggaggcccgggtggagacgaggaggatgcagatggtttcgagcttcgactgaggtgtgactctctgagggttaggcgcacggatcttgatgacagatgtgtgtaagattgggttatttcgttttgggagtatcacaggcctgttcactttaatacaattttcaacattaccaaattttgataaaattgttaaaaaaaatagctacatttaggttcgtgccaaattttggtaactatataagaaatcctgcaaaaattttagcaagttgccgaaattgccaaaattttggcaataccaaaatttggtaattttttttttcgtcaaagtgaacaggccctaaaaaccaccgcaaacttttttaagttaaaaactataacactagtataattgtattgtaattatattgtaactatattgtaactacataccatatagtttatataaaacttgcatttaactacggtttgattagataacaatgaaatcttatgtataatatgtgtgaaaaaaattttcttacaatttattttatggacaaatctctcgagacgatacgatggtcataaatctgaaagttttgggaccagaaaatttgtgaaagttttctagcaaatccgtttttttttaacatgggtggcgcagttgagataagctggacatatttttcggaaacttcaatcttaactaaaagtattgatgaggtagagaatatcaaggatgtaaaatatcatgtttttcttgtatatatattattattttccgtcggagctgtagaagaatgctgatcgagaaaacaggaataaagtgatccaaccacatcacataatgccacggaaggtaaatcagaataacaaatcactcaataacgtacctgaccctgataaagccaactggcattacacacaacaacaaacggctacaacatttacaactaagacaaaagccgtcgatcgagctacgaaaacaagtctgttattttccaagaaataagaaatccttccaaatagcgttaagaacttgtaccgggggatatgaaaaatttttgaaatacgtgcgcgttgtgctccttctaaatcttaccaacaaacaagaacgaccgcaacatcaacgtctttttgcttcccatagttcttcctcatcaccggccaccattcaaacacacatcattgtggctattcggtcatggccagcgagaagcagcgaatcatagcgtagccccctcacgaactcgggcttgcacggcaccagctccaggtccccagcgaaagattcatggtaagtcttcagaactccaggtctccaaatctaagaaacagcacaagattcagaagcaggatgaatccacaaacactggcatacctgaatatgctgaaaatggatgcatataaacaaaattacgataactctagggaaatatattgggggaaattataaaaaaatgtatcagggagcacacctttgtttggttcacttggtggaaagaagtatgcaccacctattggttatcagatgctacacagaaccccatatcctttgggtcagaggtagaaatatactcccctccatattttaatgtatgaccnncnnggcttnnttncnnntntttttcttcttttcttctttnttcntttttttctcctttttccctcttcctctctttctcccttctttncctcccctcttcttcctcttttctcttttccctntccgcttttctctcctttcttntccctttccttctttggcttttcccctctctccctcctcccttttctctctttctctttccgtttcctccctctctctttctccctgtggtttcttcgcttgccttgcctgtgtcgcttttccgtctttttctccgctttgtgtctcgctctctttttttttctcccttcttcgcgtctctccggcctggctgtttcttgttgtctttttcttgctctctcctctctcctcttttttttctcctcctcttctntgcctggtctcgtttcctctgctgctggggcctcgctgcctcttcctcctcgtgcgttctttctcccgggcgctgctctgtcgccgtgcttgttctcgctctgcttcctttgctcgcttcttctttcctcctgcgggcttattctcctcctctccttcgtgtccgctcgccggtttctcttttcctcctcctccttcttctcgctcgttcctctttctactggggccttcttatcgtgttccgtgtcgtgtttatatcttcgctcctcattataactccagcctctctactttaaaaatctatgtctgatcgtttacacctcgcggttcttctatactcatcagctctgctctattatgtcactcctctcctccgcgtcttctngtccatatctcgtcctctctttactatattcgctcgtggcatatacttacttaaggtcacgcttgctcattatcg

SEQ ID NO: 36322 - DNA, 1136 bp, Oryza sativa
  unsure (1)..(1136): unsure at all n locations
cctgcctttccccaaaatttctttcgcctgtcccccttatcttnnaaatttatacctttcctaattccaattcccaattctnaaattaaaggcctaacttttaaatgagaaatttccaacccccccaaaaataacggggcagggcggcctgtcacgtggcggggcagcggcgctcaagcgacaaaaaaagaggggtttttttttgggaacaaaaaagagggggggggggggggccaaggcaccgttcgccggtgccaacgggctggaaggcgacgagaaaaccgcttgcagaattcctattgtttctttttctaaataattaatgattcattgaatctgtgttatttgatctgtgatgtatttgtgatgtaatttttttagaatttgtgatgtgaatattttgatttgtgatgttgttactttgatttaaggatgtagggagcaactcgatttggaatttgtgatgattttggtgagatttgtgtgaaatcaatatgcaaagaacaatgaaaaaaaagaagaatagggaccagagacgtggtgctatcctctttagtcccggttggtaaaaccaactgggactaaagatacatctttactcccgagtatttgaatcgggactaaagatagcgatttttagtcccggattccctctcccgatttgttacccgggactacaaagggttacaaactaggagagatgagggtttctccagtaatggaaggagaggatgagagagaagatggatctcccccgctcagacctgccagcatagccaacttataaattaaggtcagaactactgccacaagaggacaatcatctgtagaaaaggttggtaggatttcatggcacctctagggagccatcgtcgccagtaattaaatgggatgttattttcaatagaagggttgcaccagtgagggaaaggaagccacaacaatgccctcgggaggttgcggcgcccgaaaacgtcattagtactgtcagccctgacaggttgggctttcgccccaaacttcccgccctcgcatgccattgcttccctgttgttaccatcagccgccataatcccaccacctttacagcgtagtcgtcagccntctcgaggnggtgttcaagaantcatgggata

SEQ ID NO: 36323 - DNA, 1803 bp, Oryza sativa
aaatgatttcaactgaaaaagtcatcaacaacaaagttgtataactcagcaatatctataacttttattttggtaatttcttcatccgacaaagtaataagagatacgtacattttgtgaacaatgttacaaatcattttaccgaatgaagaaatgacccaaataaaagttataaatcctgatgagttatgccactttgttattgatgattttttcagttgaaatcatttagtacctgtaaatgttgtttgaagttgtcataatttaaaattcaaattcaaaactgttcaaacaaagtcatataaaaaaatgaccataacaaaagttgtagatgttgataagttatacaactttgttgttgacagcttttccatttgaaatcatttactacccgaaaaattatttgaatttcttatattttaaaattcaaattttatatagttcaattaaacttggatggagaaatgaccaaaagaaaattggtagatctcaatgagttctacaactttacttttgacaactttttcacataagttcatttagctgtgatgtagcaggtaggacccgatttgcttcgttcttgatgtggacgtgatttcattgtcgacttactgttctatgctgctgcagcgagctgtctagaagtactattttcattatagggcaacatgtgctatatatacagatagttgtatttcgtgcttttgatacaatgttgttagtgtatataagtaacttcagattttctatctccattttgctgaaaaatgtttctttatttgtgtttatgcaatatctgtttctgcatttttgtgagagccatgtgagattgatcatacgcctcattgtggttacgtagttgcaggatgcaggttctcatgatcagagatgacaaaatgcatgggcaggttgtagttatcaggtaatgatgcagctactctttagatatctcaatcactcagtgtactgaattatgtttttaaatcatgtatagaggtaaatcatgtacaactgaatttgttatgtctacgtcttcttattgtgctatgcctaactcatgaattttactattcctcactcattccgtgtgtttgttaggtgtctgctcaatatgtaacaagtttcatttactattatttcttctacttatcatgcaatgcaggtttctctatcctcttcatgtcgatttgctgattcatgatggagatggctgtcttttgattggtgtcatttcgacacgtgacttggtttggttagcgaatgtaaatgactatttagccatgcgacttctgttttggcgagtgacttttatgttcattagtgacttgtggttgcttattttgctacataggatatggtcatgtactgagtaaacacgtcgctgaattgggctatcagatgtgtggatgttaattgggttttgtattgaattttaattgggctgaatccatttgatatatgggcttcttgtagcgcccgttccgtcgtggcgcctagcgggaaaattatctcttaaaaaccctaattgcgaaatttgtttctttgcttgttgtctagtgtccgtgccatctcaagatctcaatccctgatctatcgtcgagtccaatcccgaatccaatccttccaaatcaaattcctccgcaaaagtctattttgcctcccccgggggtcgatgggccgatttcctcccggcccatctacccctgggggcggctcctttgacttttgcggcggactttgatccggacggatcggattcgggatcggactcgacgatagatcagggattgagatcttgagatg

SEQ ID NO: 36324 - DNA, 2606 bp, Oryza sativa
  unsure (1)..(2606): unsure at all n locations
agctgtatgcacccnctngcnacnnncnnngnngntttataataatgtcgatgcaagttgttttgaatcagtccaagaccatacatctgaaattctgaatcgaatcgttcccacaattaactgagataatggcactaaaacatacagaaaattttaggatgcatgcacttagctagtcgatatgatatcaacagctgttagccactcggtacagcaccctgtcaagcttgcattcaagctagatgaatgaatccatttgctaattttcccatccggaacagtgattacggaaaacggagtgatccatctggaacagtgattacggaaaacggaacgatctattagcgcatgattaattaaatatttgctatttttttcaaaaatggattaatttgatttttctaagcaactttcgtatataaacttttttaaaaaatacactatttagtagtttgaaaagcgtgcgcgcgaaaaacgagaaagaaggggtgggaagaggggcatccgaacacaccgttcacagcaccctagcaagatattgaaatgcacaagttgttacattattatcgttacatttatgtgtgccatactgtcattttctattgacattgtgccaatgaaagagggaatttcctggacatgtgcgtattactgctaaagagatatttggtgaagcgagttctgttatgattgggtttatgcaacaatgcagcgaatgctcattgtactttcactggatttattgtgataatctataaagtaatagaaaaagtagtctccacgtccgctctcacggtctagaaaatcccacgttaattaaaataaaataagaaaaaaagaaaaatagaagggtattaggattaggttttgtgtaaacggaaaaaaaacaagagtaaacggacaaaaaaaaagttggaaacgaaaaaaaaaatccaatcggacaagaaagataaaaagtgaaaacggacaaaaaaaaaacaagaaattccaatattaatctctacttccgttgtccgtgtaaagaaaagggcgaaaaaaaagtctgagcgacaaggaaaaaggaaacaccatccggaaaagaaaccggtggaaaaaaagccggctgtaaaagaaactaaaaaggtggaaaacaatccgatctggatgcaaccgaaaaaaaaaacaaacgccgtaaaaaaaagccaaaataaacgaaaaaaatccgatctctactcaaaacgaaaaacggaaaaaaaggaaacgccacagtaaaaaaagagaaaaattcccatggaaaaaacggtgaaaaaaaacgccgtctgtaaagaaaataaaaaaagtcggatctggatgaaaaaaaaaggaaaaaaaacaccgtccaaaaaagccaaaagaaaaggaaaaaaatatctgatctctatgtccctaatacctactattataaaaattaaatatatttttaccggtattttggtacgtcatctgtgtttaaatcggttttaattttatgtttccattttaatctatatctctacttaaaataagaaatttctgtcgtatgtagaaaagaaagaaaaaaaagtccgacacaaaaaggtaaaataaaaaataaaaagtccgactcaacgagcgataaaaaaaaagcttctgatgtaagtaaaaaaaagcatctcatcgtaaaaaaacgtccgactcaaaaaagtaaaaaaagaaataaaaagtccgactcaacaagcgataaaaaaaaagcttctgttgtaagtaaaaaaaacatctcatcgtaaaaaaatattgtccgactcccgtagaaaaaggaaaaaaagtctcccagtaaaaaaaaagtccgcttgtatttttagcacagggtatttttttttccgatttttgttgcacgcgaaagagttttgtatgctcacacgcaagtcttttggttttttttccggcctttttaagccgatctattcaccgcgcgcctcccgggcgcctttggttttttttgtcaatttttttcaccagttttttctaccgtgcgctttttgtttttctcatctggttttttaatccgatctgttcgccgcacgccttccgacttgaatctagcactccgtgtcaccgccatattgattgtacgttttctcctccaatttgattgaaaaatcgattccccattcctctctcatctttttctccatgattttcctttcgattcggctttaatttgaaaaagcgaaaaatagaagggtattaggattaggtttttgggtaaaccggaaaaaaaaacaaaaatggggtgtggttttaaatggacaaaaaaaagtgggaaatggaaaaaaaatttgggaaccgcccaacaaagttaaaaaaaagtgaacaccggccaaaaagagaaaaattccattttcatatcagtaaaaaaaaccgtgtggtcattataagacccacaattataaccattgttaatattataacaggggggcgttgtatatatttaaaaaatattgggggaaaaccaccacacaaaatttttcggacactatgttggggacaaataaaggtgggacaaaagacaacacaaatcctcctctttttgtctattatatatggcgcacacatatctttctctacct

SEQ ID NO: 36325 - DNA, 1472 bp, Oryza sativa
  unsure (1)..(1472): unsure at all n locations
tgggcccaaggaagggttggggaaggttggttttaaccaatggaggggaagggttgtagaatagttattctagggaaggggtgtaaaatagatccactatctatatatatatgtatatatgtatgtatatatggacatatatatgtatgtatatatatgtataaagaaagtagttcaagtgtaggagtagttacgttgtcgttacattgtaaatatacaactatgctatagtacatttgacactttttagcaattctgaagaaaaatggtaaaataaagactttggctctaatgctgacgtgttgtacggtcctaattgggtcagaaacgagaaattgcgtgtgcgagagagagagggggaggaccaaaggaaggctcatcgactgcgagagagagagagagagagtggggggaggaccaaaggaaggctcatcgactgcggatgcgccggatagagtaggcttcctcagctgtcagctccgagaatctctagtgccagcgggcggccatcgcagcaaagaatatggctgccggagcggccgccggccgccagccatattggagggtggagacgtggaggcgaccgatattacgggagcacaatctccgtaactgctatcccaggccgttggattggagaagatgggcaggatctggcccggcgcacttatccttaaccattgaggattcgaggttgtgttatttaccatggtctttttttttttttttaagatatgatcccgtttcttgtttggttagagatgagaatggataaaataaaaacaataacatacaagtacgtattaaccccacaaaaaaaagtatgtccttttcaacgaaacaaattatcaatagagttgttttcaagtatagctgtgagcctgtgaccagtgatcacccaaccacagcacttcaaagttcaaaccgaaatctacgcattcgtaagccaacaggaggttgtcttcattcctcgccttttggagctagcaggaaaactcctaggcatttctcgtatctatcatctcctggatatgctaatgatatacatctgtgaatatatataacacattaacaaaaaatattggatgtgtatcgccaatttctctgccatatagtcttagctaagtatttagtcggaatcctggagtggtgcttgcattaagaagtggtatgggcgtatggccagtccggcctaacgtggtggcacacggctcgcgcggtgcccccaactggcggcggcggatgccgtcattgccatggcagaggctagcactcgacggaggcggcggcccgctcggccaactccccccgcgaagtgcgactccaaattcctcggcctcttcctcccccttccgcggtggcgaccacaaggacggcaagggacgcgcaccgctcctccccctctctccctgcaccatcacaagctttgacgacgattttatccatgcnatatcggagtgcaatcaaggcca

SEQ ID NO: 36326 - DNA, 2259 bp, Oryza sativa
  unsure (1)..(2259): unsure at all n locations
ggatctctgaatttcggattgcgatctggtggatcgatgcggcagtagaggcgcggggtgttttattatataggaagtcgggggaacgcgtggagggaggcgtttccgttaagaattcggcgggttgggggggggggggggggacgggacggttacacgtgggcggtgaggggggaggctgacaggtggggcccacctgggatggctggactggtggtggtggccagcgcgcgcgcgcagtttggttcgacggtttttgcgcgtcgttttgtcgctggctcggctcgtttccgctgtttctggaagccgatacggatagagctgccagggagggaagacgcgacgaacggacacagggtgacggctcgtcggtcggctcccggggccgtgttctgcggcgggagccggagtttttgctgctgcaatagtagaaagcgacggggtcgcgttcgtctggctcgcttcatccgttcatcgtcccttgtgtcatcgcctcacacctcgatcggcgtcatccggtgaaatatcagccctgaggaagggagggaagcggcgaaagggaaggcaacaacaacaaaactaggtactccctccatccaaaaaaaaaaaaaagacacccttgtttccgtgtctgtccgtcttatttaaaaaaattataaaaaaaattaataaaataagtcatgcataaaatattaataatgttttatcatctaacaacaatgaaaatatgaattataaaaaaatttcatataagacggacagtcaaaattggacaccaaaatataaggtttgcctttttttttcggagggagtacagttcagtcgtaccgtttttgtactcctcgtcctgagcgtacggttgtacctgtgttgtgtgttgtgtactaccgcactttataggtgtccaagcccgttcgtttctatcgccccgtacgttttgactgcacatctaagagtggtaattccttcggtcctaaaataattgtttcgttatggtttaaaacctatttcacaatactatcttcgtttcaaaaaactatttctaacataacaactacttgttctaaaataaagttattttctcacctacttcttcttttaaccaattataaccatttccctctacctgctttatatttttaacaaatcacatacttctttcaatcacctcttatttcaatttctaccaattctttcacgtactaaatgagagagattttaattcttacttgctgaattttaatttgtgctagaactccctccgtttcaaaatatttgacaccgttgactttttagcatatgtttgaccgttcgtcttattaaaaaattgtgaaatatgtaaaactatatacgtacatgaaagtatatttaacaataaatcaaatgatatgaaaaaaataaataattacttaatttttttaataagacgaatgatcaaacacatgcttaaaaagttaactgtgtcaaacattttgaaaactgaggaagtaatatacagagacacgtatcaagagacggagtgagctcacgctagagtgggcagagctcgtagtggagttgagtaattcgatcaccccccagtgcatgggcgtggtggtggcgcgtcacttcgccgcgggtcgcgcgcttgatcagctgccgcgtcgccgtcgtcggtcgtcctcgggacgtggggagcgaccgacgtatccggtcttgccgtttttgtttcctttgctctgctgcggtttcaagatttttgtcctatccttacccgtttgctgctggtacggaaatgattttctcagatgagttccccttcagttttgtactactgcattctctttttcttttttttttcaatttttggagaaaatattgtgagccgggtgacttaacatgcctgctcatgaaaatagttttcgcttatggtttgtgagatgctcgtatgagaaaattccgatttatatnnnnnnnnnnnnnnnnnnnnnnnnnnnnnnnnnnnnnnnnnnnnnnnncctatagatgagtcgattacaaatnactggcccgtggttttcacacgtcgggattgggaaacccttgcgtacccaacttaattgcttgaagacattccccttttgccagtgtggtaaaaccgaaaaggccgnaccgtttgccttttcaaaaattggcagctttatcatcgcnagttagggttaaccctttaaaaagaaagccgttttcctttgttgggattcacaaaggtattttgcaccccccggcgacggttgggatcct

SEQ ID NO: 36327 - DNA, 1708 bp, Oryza sativa
  unsure (1)..(1708): unsure at all n locations
ttctacaaatttggtaaacttaaagatgtttgattaagaacataaatcaaacgacttataatacgaaacggacgaagtagctagctagcaggctatatattgatctactagctacctctgtttttttagtaatcgacagtaaataatattgaataaacacccaaaatttaaccactaatttttttccttcagaatttataaaaacatgtgattctgcaccactgcattaaaataaaattcaaaatgattctaacagtatgtgctttagtgtacaaaatagaataaattagtgttcataaaagtttggataggagaatcctctgttttcaaatagtcagtgatttataattaatgcaagtgttaagatttccattgtgaaaaatatcattttgttggttgtagaaacaatgcagtgaggcaggcaatataaaggcgggtgtgtatgcacgtgtatattcatatatatacacatatatatacatatatatatatatacacacacatatacatatatatacacacacacatatatatatatatatagaggatacccatatgggactccatggtgtccgggctccaaggtataaaacacacaaattctcttaaatttttaaaaatttttaaattgtgagtatatacctatgtatatgaatttgattcatacaaatacctaacaacaaaacaactcaaactcaactttatttcacaattcattattacatacctaacgaattatatgtttggatgttatatacctagaaccaaaatctaataaaaaaaaaagttcaaactcagttcaaacttgtttgaacttgttagtaaagaagttaatgttcacatctaaacatttaaaaaaatttcatactcattcaaattgggtatatacgtaatttgaatcttggagcccatactccatgtagcaccagttaatttacctatgtgtatatatatgtgtatatatatatatatatatgtatatatatatatatgtatgtatgtatatatatatataaataagttagatataaagttgcatgtattattgtaatacttatataagttatattatagttatagtatagttagatataaatttgaaagtttctcctatttagataataactgaagccgtgatgataatatgcatgcatttaccaatagtgatatgatgtgaaattatgaaattattagctataggtctatatctagctagccacttggtgcaccaccgtgtcaaactcaaattctcgatgatatacttatctcctgtcttcactagattttgggtgtccacttggtctccaaactgctccataaattatataccattattttctgttatatattagaaaaaaaccgagttcataatatacggttacagtttcgcgggacaaaattttatatatgatttttatatgtccaatctaattatttagaaacattgttgctactcaaagttttaaaagtgtgactaattgatgagatatccaaaccgaagtatttgtactggtaggtagtaatattggggcaggacatcgcacaagttggtacttnatgctntgcgggttttcacagngngctctcatnngttctctgngggggggggggangagaaatnnanagcacgnaaacaagaaggcgacggagttatnnagaaaannnggattgatgtttaaatataataatattactctaaagcggggcg

SEQ ID NO: 36328 - DNA, 3060 bp, Oryza sativa
gttcggggcgagacatcgccccctagggctctcccgctggttcgccccaaggccctcgcccagttgccacgtggcggggggagagagcgagaaggggacccaagctagacagccataaatacgcggcgccccaactgtccctcactgcatttaatgcggtaagggcagacgtgcggtgtgcctaactgacccccgtcaatcggatgtgaccagtctgtgaccggcctgttgccggtcacgtccgattgaacgggcggccgtgcccccacgtcgcctctgtatccggtgaagtggaggtaggtatgacccgtcacatcggagcgtcactcgaaggagggctaccacaagtcttcgctcatttatgagggaatgacagggctgtcccccgtgtcaggcggggggggggggggggggcggcgctgggtcccactcaaggactggttgctgcttagcttccgggcgaaggcacggatcgaggcccggtcaaagtaaagtggggtccccctcccatggaggggtaggtagaggcggcgcatgtggtatccccttaagctataaaaggaggaccttgcccaccgagacaaggggacgactctcagaaaacctgaactctaggagaaggaaggcgagagcgctctccggagtaaaggaacccttgtaaaactcatccataatcccaaacacaagagtagggtgttaggctccatagcggcccgaacctgtataattcgattgtgtgcaagctagccggcagtcttaggggcgaacacgtgatttctaagaggcgagcctctgcccccggccgaactcacgaaaggggggtctcacgactccccgctatcgagggccttcccttgacaatgatatatatgttatgcgcgtctggctttaaatatacgacgctgttaattttttgtatgacggttgatcattcgttttattcaataaaactacaagtattgtcttttacttgtttttatatcattaaagatactttaaacactctgtttatatattttgcactaaacttttaatgagtcgaataatcaaacgttatacctaaaggttaataacatcatacatttgaaaacaaagagagtgcatttttagagatgcagcgggcacagaatgttatttcaaaatacgaaaagaaattctcaactatataaagcatgatgatacgagatgtcgctgaaagtgaaagggaagaaaactggtggacgcgggagatatctaagattatatttatttgaatggcagagaccacgcgaatctcaatcgtgctgtgctctgcttgtagaatataaatccacatggacaactgatggccgagaaaagcagcaagagagtgaaagaaaaaggctttttagggcggatatggtgtctgaattaacgtaatgggagaactttaacggtcgttggagtttaattcgctttacaaaccttgtcttttagcaaagtgttgttcttcctgttgtcttaattaatctattcatttgaacttatttaaatagcacatacataattacatactccctccgtccaaaaatataagcatttttagaatagtgtcgagttaaacatttttaactttgactattaatagcaaaaaaaaagttcaatcaagtaaaattgatattagtacgcagattttcattaaacaaactatcataatatgtaactttttttattttaaacatcttactttatatatattgttggtcaaaacagtgtcttgaataccgcatcaaagtccaaaatgcttatattttgggatagagggagtatatagtcttttagttttggtggctatcttggggctgtacttttccgtttttttttttgcgagaattgatgcccaccaaagcatatatgccagtacactatatatgatatgcgttggtacagaagggacattatgaaatggttcacaaatgatatagggtatgtctcagacgatttcctgaattcctgtacagtttgagatgagggggattatcacaaatataggtctagtaagggcatttacagggcattgacgtggtaattggctatggctctcgaagccgccactccgtcttagttagcccgcgccatgcccttgccgcagggcccccttgtgccttgcaaagggcgcattgcctcattagggctgaggcccactcagcggtaagcctcccccctgctttaaaaatccatcattcgataccactagaagaaatatgaccttatgtgatgaatttctcgtgacgtcggagctattcgtcattagcacattccattttatgacgattagtatgagatgggttggctcagtgacgaaaaaaaggtgttcgtcgttaataccaactagaaatcgtcataaagtatttcgatgggatatcgtgacgaatattaatttgtcataaggggcacaaagcaaatgtcacagatttatataatgcatttatagaaaaatatatttatagttaaagcaatttaatcaagtgaattaatgaagaaactaaaattttcctataaaaatcatggacgggaatatttttgtaatattctacgtggtctaaattattctctgaaattttccgtgaattttagaagctcaataactaattttaataacacaaaattcatttaacctattaaaataaatagaaaacaaattaaaatcactctctttgtccttgggcctttttcggcccaagtattactctccctccctcagcccgcttctctttccctccttgggacggcttccttttccccagttcccctcctccctcttgggccgctggcctaatcctttttctcctccctcgccaaaaagtctattatttctccctcctctcaattcaaataaatttttgggtagtaaatgatttcaaatgaaaaaattatcaacaacaaagttgtataacttatcaagatctacaacttttgttttggtcattttgctatatgactttgttttaataatttgaatttgaatttcaaattatgacaacttcaaacaatattttcaagtactaaatgatttcaactgaaaacttcatcaacaacaaa

SEQ ID NO: 36329 - DNA, 616 bp, Oryza sativa
  unsure (1)..(616): unsure at all n locations
gacgtgnnnccgtagatcctctctcaaatggactcagcccaattaaaattcaatacaaaacccaattaacatccacacatctgatagcccaattcagcgacgtgtttactcagtacatgaccatatcctatgtagcaaaataagcaaccacaagtcactaatgaacataaaagtcactcgccaaaacagaagtcgcatggctaaatagtcatttacattcgctaaccaaaccaagtcacgtgtcgaaatgacaccaatcaaaagacagccatctccatcatgaatcagcaaatcgacatgaagaggatagagaaacctgcattgcatgataagtagaagaaataatagtaaatgaaacttgttacatattgagcagacacctaacaaacacacggaatgagtgaggaatagtaaaattcatgagttaggcatagcacaataagaagacgtagacataacaaattcagttgtacatgatttacctctatacatgatttaaaaacataattcagtacactgagtgattgagatatctaaagagtagncttgcatcaatttacccctttggggaatttaaaaacccccttttttaaccccccaaaaaaaaccccccccc

SEQ ID NO: 36330 - DNA, 705 bp, Oryza sativa
  unsure (1)..(705): unsure at all n locations
tgtgctnnngnatcgtcggccgncgtgtgatggatacagtatcagtgcttcttttcccgatcaaaaccaggagatcaagaacgaaacataacaataaagcggaggtaggcctaatgcggaccatggattaatttgtttaggtagatcatggatgtggctcatagaaaagaattcagaatctctggatctccagatattgtttctccagactggcaccaaaggtccaaaggcatggatgaccgggcatgcgaacagcgcgtgacaggagacgatcgaggatgcttcatgatagatcaacgttgtcacctaggaatcaacgacacagcacagcttgattatggtgggtcgccgccgtcgtcgcagaccatatgcagccaggtcgatggatcgacgcccaggaagtgccgcgatggacgatggcaccaggtccagaagcaagatcgacgcatcaaaaaccaaaatgtttgcaagtcgtttttgggaatgaatgctctgctgctatggagactttaacagggaaacaaaagggaaactcttcatctgcaataaaagcatataaaattggaaggattaaaccgtcgccgggtagatccgatggatcaacaccgtcacctggtaatcacggtagcaatggcctgttgattggtcgaccacctctcaaaccttgcgatggatttacttggaagaaaacggcgccagggccag

SEQ ID NO: 36331 - DNA, 519 bp, Oryza sativa
  unsure (1)..(519): unsure at all n locations
ttcttataggccccgttgtgtttatgtgggtttttgggcccgcacaatttaagaacaactttaccccattttatatcttagagtaaaatttgtaaacccctcttttccagagagaatagaggggcaatttctcggaaaggcaagggtgaaaacaaaaaggcctagaggaattttcgagggatacgccgggaccctttaaggcctgcggtgtttgccacctttgacttgagaggcgatatttgtaattttggcaggggtcccaagctatcttaaatgacaattaacggacctgttacgttgtagggccttttgttggccttttgataacaggtgaattcgggcgttacgtcttaatcctgtgagaacctgtataaccgcatatgagtaggttattcctgcttntccaaacggatatacctagttggttatttaagtaacgaaggaacggcattagcgcacaatggtcaaacctcctctcaccggagcgttgcgttactcatttagtccagtgggctctcg

SEQ ID NO: 36332 - DNA, 1468 bp, Oryza sativa
tactctatgttcaggtaacaagtttcgtgtttttacatatatatcgatgtacaactaacagtattatatatgattaacctattttacttgggtgttgcttgttagtctgctgctaacatacaaaagcaattaaatgtgtagtaactgaaaaggtggtgagtcatgggatagaggatatgtggcacacaaactatatagtagcatacaaaattaataaagtattaacatacaaagcttgttagctatctgctaacatataagagtaataaagtagcaagtacgtggagtataagttatatagctaggaccacaataaacattacatgatctatacatggcaatgcatgtgaaccatgcacttactgcaagcggcaatccagagtatatgcgtggacaaccttggtattaggtagctaattaccaaaataagatagctgcttgcgttacacaatttacaaaagacatgctagaatttaaagtaaaatacaaagaggtctagcaggaaaggagccgaaagtttgcttagtttgctagcaagggatcaagtacttatctaccattccattgacccatgcatatgttaattagtattggctggaagcaagctagtatatatagtattagcatgccttgacgatgaacgcctatattaaagtaaataaaagcaaaacaaattcctccatacatcatgcatgcatctagagctaactgtccatcgatcatctagctagcttagagatagatcagtatggcacgtcaattcagcataaagatacatctgtatggtatatgagaagacaaacatatggctgtatatatggttcaattaacaagcaaatcaagataaaacaaaactacattgctttattttggttgtctttagcagagagtagtgtggaatgcaaggtttggccttgtgagccccacagatattaaagctacccgtttcattgaaaaagatacacgcaaatcaaacccacaagaaactaataaacttttttctttcttcaaatctcttttgttttccttctcaacattatagatgtctagagaaatctgacccttttgggcctatataaaccatcctaccttgcctagcatgttcatcctcacatcatattgtgttcatcctcataccaccaaccaattagtgccagtagcacatttctgcagttgtagttcaagtaaggtgatgcacctcctagcttattattcttgcacttactactatatattggtttttgtattggtactgtaaatagtattgctttgagaaaaatgttattatgtttgcaatcaagctagctatctctttctgtgggactgtaagatcatctatgatattttcatctttttgcttattgttaaactagaaaactaagaaaagatagtaacaaagtgtatgtgcttaatatttaggtatatcattcagagcaacaaagggaagcaatgaagcaaactttggatg

SEQ ID NO: 36333 - DNA, 5811 bp, Oryza sativa
  unsure (1)..(5811): unsure at all n locations
aggactactgcatatttcagtcatgttagcatgggtcgttacgttgtcctttgttctgtttgaaatatccaatattattccatataggctcaaaacattattcgtatcgttcatcatatatatgttaatacatgattacaaaattatggaaatatgataatcctaaacatgcattgagtcaaatgaaaaaaaaaaacaaagccattggataactcctgtacttatcacaaccatcaatgtattagggcatcctcaatgtggtatgaaaatagtccacaggcaatataatattttattcagccagctagcaatatcatgtaatagtccatagtagaaagaaaatagcaaaaactacccattgcactatgggtaggcaagagcacaaaaaaaaaccatagttgggcagtgtcactattcataaataataaacaaaagtttcagtaacagttgcacaggtagccactggctttctggccatttcgcctaaaaaaactttcgcctacaaaaactgcaccaaaatacaccagctccattcatcaaatttgctagaacacaattagttccaatgaatccctcccacagaaacatctcaagtttcacaaattaagactccccaaaccaatactctaagagtagtgaccatatctcacctcatacaccacaatctcagtttatctttacatcaccaaattatccacaaaactttaacccttttggttctccaataaaccagccacctttggccactctcctccaggattttttttgaagagaacacagcaggggaggcccctgctgtttgaataattttattaaagaaaacaagaacaaaattacaacagattaatccaacttatgattacatcgtgatatctcgcagtaattctaaacaacaaaaggaagaggtcaccctttaagagttgcctccaagtgatgaaagaggggatcttttgctcgaagatgaacccattcctttgtttccatatatgccaagcagcataaaggaatttctccttgaacagctcccctgataatccaatttggcccttataaacattgcttccaaagggagagtagtatcccatgtaatgcctaaaagactccaacaattttgggcaaatgggcataaaaagaacagatgcattaggtcttcaacagccgccgattgacaaagaacacaagaaagatcacaatccggaggagcacaattcttataatttagcatgaacttggtgttcaatctattcatcatgagtngnncctgatgaacatttacttttgaaaccgctttgcacttccataaccatagaaagtggactggttcctccaggatttcaaggcgttcaataccaagggagctggttgtaacatactccatcaagctttcaaggttttcacctacaagagagttttggtcccttaccaacgatgcaatttggagatattgccaacaggccaccatctttgctgcaatttagctattcgtctggtgcttggtgctgcagccaacacctcttcccatggatctgagtctacttctccatgccttgcaagagaaaacgagaaacaacatgtaaccattgatgagtcaagcagtagcaatgacgaagaaccaaggcggcatacacacataaattggattgaagaagagaacatacgacttcttagctgttggttacaccgctcaactgatcctgtaaaaggcatcgacatgaaatcagaatattactaaaaagctgtggctgatgagttcaacaccaatgcgccaacaaatggacaaagaggtctgtcaagcaacaaaagacgcattggggtgatgtgaagagaaagatcacaaagttctatggagtacatggtagagttaaagctacctggagcagtgacatagccgtgaactcagcccatgtgatattcgaaaaagaaaacaaggacaaacctttcacattggagtatatgtggagggaggtcaaggaactgcctaaatggtgtagaatagtccaagagaagagtggaaataagaggagttgggggcgacagagagggctggtgcaatggcagcgtggggagggacgagaattgggcccaaaggaaatgagaattggggagaattgaggggctgctgatttttttaccactgtgggaccctccttaattactaacaatgtggtggtttcaacttctatagactagtatgccaaatacattgacgatgcccttatgtgtagttatcattctttatgaattacaacaaaagcacaaaatattatgtgcacttatcgttctctttgtccagataatatcatataaaaccattatctttttaatccagatttgtaaggtagaatcggagcaacagggacatgtttattgacttatagatattagtatagatattagctttttaatctctgaggtctccatttttactgactcgttttaataaaaaatgatgctccagtgctttctactggtaatataatagtactagtagaaatgttctaaatcgttcgttatatattaaaggtaaattagtaatttaattactaatgcagtgattaagggcaactttgtcatttatgttttttcttgggctagatcgatacatggttatccattgtactagcatcgctcatattccattagaaaagtcaaaaagtaggaaaaaaatgtgtagtcagtgctaaacgatgattatacctcttcgcacctttttttttcagagaataagctcctccacgtttctactataccgctaactagaataatactataaatatattttaacccttcgatcaaatgagatcaaatgttcaaattgctttctactaccagcaagagagtaccgtagtcgggctcttaattatattactcatgtatgctctaatctaatgtttctagcaacaggccggcactaacatcattcgattgatttcttttttgttttgaggttgctacgtgcgcatatgcccccgcacactcactgtgttgccaaccagcacgcgagctagcttactcgtgctcggcgtgtgcctccactttgatcagcaccatttgattgatttctctcattttctaataatttttaccaacctcatacgtttaaattttattccgaaatagtaatatttttattactctctcattgctttcggccttttaattgaaccagatcgttacttgagagcaaatgttccaatttattatggccggacagccggttcggtccgaccagttccgaataactgtgctatataagttggtgattattgccaaccgccttaattaaacttcatcttgcactcggctgattcctgtcagtctgtacaaaatggttactctcatccaaattcatcgatccacgcatactcataccggcagcgatcaatcatataacacagcaattgtataaatcaaaatgccttgcacttttgggagataattttcattgtaggccaccgagtgagctcatgcagtgctggctacgctcatctgaatgaggaagtaagtctatatttactcaaccatgagtctaattttcctcaaccgtaaaaccagatataacatacccttaaatattaaaaccagattaatttactgatccctaagcggttttgacggtagttttatctctcttctaggttgcccaaggaggaggaaggaggtcagcaggggtaagcagggagctcctatcgagcttgagcttgcagcggtagtggtagtctgtgaggccgttaagcttaagttcacgcgacgatgactgtagaaaagcttgagctcatttgacggagaaggagctcaacctatagaatccatgtgtcgtcgtggtgccacatatatagcaaagagtggagagagtattgacacgatagtagaaggcgaggaagccatcgatggccaagattgtcacctgaccgacaagggtaggttaatctagcagattgagatggcagcgacggcctccgagggctccgggaaaactaggacaatgaacatggtggcttcaattgctccgggaaggctaggatggtggaggtggaggtgaactatgatgatggcagctatgcaacatgcggcagaggtcaaccccgcggccagatccgaccaaaccccaccccgatcaaaaccagcaccggcaagaaggatctcaagctctgtggcagtctcaacgagctcaatccctacacgtccagctagcatgcccagcttgtcagtgttcaccacactagggaggaactcggcggccgtcatgccggagtgctagagctcaatagagttgttcccaataactccttcgttcctagtccaatttgatggatcgccgcctatgccaattgcgggtttgatcatcggcctctagcaacttcatggttgtcactctcctccagctcaagctctccacctccatctcaaagtggttgtgctgagtagctcgagagaagagatggagaaagagagagcgtggaggggtcgacgaggtatagtcaatgacatatgagtaccaccatttttaaaagttctgccctaacaaatttctagccacaaatatttatctcttattggcaccaatctaaaacaacgtatcagctgtaccttactaaaatttatgtttgtcattaccaatattaggttagcataagattaaaaccctactctactaatatgacagctagaacaatacttgttgggatcacctgggagtcactggctcactgctaaccacgtacaatctattgcattgtaaagaacaatcaaataatcaactacatatgttaggactatcttatatctttagctctattgggcttgttaggttactttgtcccatgcatgttatacttacaagatcccccacggatccaaacatagacccatccctggccgatatgattttaggtccccgcccaagtgcacatatatgcccccctccccccaggggcatatcctcatcccatatgggaaaatttccatctgtagcaaccacataaatattgaggggactatatatgaaaccaacaaataaatttataggagttaaaatgatcatgcattgacacttcacttccttaaaaacttagggatggatgattggtgagataggtgttccttataattataggggagaggctatgtgatatatgtgggaaaaggaaaaaatagtaaataaattcatgggcatggttttattcgcaaacgattgaaatactatatgctttagaaaaagagacgggtggagcgcgtgaaaacaaacatatcatgccaaagcgaaccctctggaaggacaagatcacaacgcatagaagagaaaatactatatgctttagaaaaagagacgggtggagcgcgtgaaaacaaacatatcatgccaaagcgaaccctctggaaggacaagatcacaacgcatagaagagctataaaagatgaccccacaattagcactaggagcatcgatgaattgagaaacttctctagctttgtcacccaagcgctcaatttttttacttacccctcatctcttttgtttatacttagctttctgtgtttcccatggatctccttcttcgttgatggatatactattgtggttgatactagtgttattattgcttatagatacaattgattaatgccatacataaaaaagacaaggtaattctattttctccttatcagtttttcaactcaaattcttgtttattgcaaccaaaagttattatgtattagtttactaaatcaaatgttttctcttttgataagatgcgggtgaagatcaggtcgaagacgcaggaattttacaggaatttcaaatgcgac

SEQ ID NO: 36334 - DNA, 686 bp, Oryza sativa
tttccatccttgccacaagaaaagttcccattgatggcacccacacccattgtgaatagatcaatgttgtttatcaataatatagcaaggggtctgggcttacaaggaaacaatatcaatgcagttgccaacaataatatcctagacaatattgttggttgtagtagccctgcggttcttgcaagtatgatgaatcctgctttacttgggccttcaggggcaccactaaatcctccaaactcccaatcctacaactgcacaatggatataattaactccaatgatgcttgtggttccaataatagtagcgtaattgttgcaaatcaagcaaatattgctccctctggccatttttatcccattgcccttcagtcctcatgctcgacgttcttacatagtaacaacaatgacacgattactgctatactggagggtgtagatattagcgacatcatgcatgttacaagtgatgttgatgctgctacaaaggtttttagtggccaagaagaacaacatgagaaagaaactaatgttgagtggcatcatcaaaatgagatatatgaaagtattgatataagaatcatcaatgctactactagagatggtaataaatgtagtattagctgggatgaattgggaatggccgatgattcgttgctagataattttttggagggctgcaggaa

SEQ ID NO: 36335 - DNA, 1891 bp, Oryza sativa
attggtgtaatccccgcttattcctttgtcaggagcactctcatccttcagcgacacgaaattgatacaactagagattcaatcgagagtcaatctgagggtgaggggaattttatttgatcctacctagtctatcatcagaggtacagttttttgtccgctcatggcttgccttggctttcccttcctgatgctttacattgacatgtcattctggacatagacacttacgaagtagtttgcaacaggaacaaatcatatctacagttcaacaccctgagctaccacaaaactaaaactcaacccttgactatgaaatgggcgcctttctatctcatcaacctccgtaaccacagtactaccagtgaaatcggctctttccttcgaaccacctcgtttttctgacgtatgttgcatgcatgtatatccacatgatcacacggtcacacctaacccactaaacatatatattcggccacattgtttctttaacataagcaatgggggagcgtattctatgcacacagaccctcgcgtgtacacatcgtgtacaccaactaaaaattatcacaaaaaattctaagaaaattcatacatgtactttcaatactattacatctacgtgcaaagtcgcatcttcaaattcattctacatagagaataacaaaaaagataaaattctgacaaaactgcaaccttaaaactgtcagattttttgtttttttgttacggctaaaatataatgaatttgacgttaagattttaaccctaggtgtaatacaattgaaagtatgtgtataattttttctagattttttttgacattttttagttggtgtgcacgtgtgtacacgtgagggcctgtgtgtataggatatgttgccaagcaaaggttacttaacatgaaactattctaaactctggagagaacattccccgttctttgcacaccatccaaatggttataacaaaattaaaaaaaaaatcaacaagatagattaatatgtgatacatcacttcacaaacatgcaagctcaaatttaacttctacaagttacgacaaaaaaacaaatttaactgtgaatatattttaactagccatagtttttcaattttattgtgtgacatacaaacgaggggatgtccccacaaaagtttagaattcactcccgtttcttaactcctactcccttagtcccaaaagagtagcattcaatatttatcgaaacaatcggaggtgtttttttccctcgagagttgttccctcatttttcattacatttaaaaagttatcaaaaattaattaaataatccattgacaatatgtattgcttcacaaaggacctaacaaattctttagggggttaagtgttccaatacaatagtttgagggtctaaaatgaaatatttccttgagatgattgatgcaaaatattgtacttacgtagcagcattagttttcgctatgatagtaattcgtccgtaggttattaatcctgagccatcagtatttgaatttgtcttcgtcaggacactgaaatgcgcatatatatatacgtactagaacgtctctatatatagctttggtttactatacattaggttgatgtgccagacgaacgaacagcgtttagtaaatttcctacttgactttgtctgtgttctatattgacagcatgtttaattactctttaaaagtcttgacagcaatgaatggtcaacaaggaaccgaatttcatacttcaattgttgatcgtaaggaattaaccagtgtgccagtgcgtagtttgattcgcaaaagtaaccacaataattaactaacactactagaaaaagcatttttacagacgtggtttttttcagacggacatgacccttgaagccaaataac

SEQ ID NO: 36336 - DNA, 1273 bp, Oryza sativa
  unsure (1)..(1273): unsure at all n locations
agcgtgnttttgaaactcgaatacactctgctgattctgtaatcctgctgaatgtaaggactagacttgtcccacaatttggtgcagagtgctgcgatgaagacaagcaggatcactggaatgatgaatactccgatatatctagtgttgatcagaagtaggactgcataatctgccatcactagggaagcagcggtgatgtaagtctccaagccaagaaacttgctcatggtagagtgcatcatccttatgtacacgccagtaacaaataaaagcatgcaagcttgagtattctatagtgnnccctannnnctgncgccagtgngntnnnnnnccnnccccacccccccttnntccccctctcttttcctctccttcttcttttctgtttccccccttccttctcctttttttttttcanatacaccgtcaatctttttttttgcaactctcagacgagagaaaatttttttttactggccgaaaatatgggaaatggcaacccacttaacctttgctccgtaacaccggatctggtttttcttgtgaccgaagctttcacatttttttacaaatttgcgacaccttccttggcttatctgtacgggaaactggacatttgtggaaaccaagggtttgaactcttaccacaccatttgtccttcttggggcgatatctttatggggacaccgttgcaacacaacaaaaaaatttgtgccactgaaattcctctttcaaaagaatttaacgacccctctttttcaatggggggccaatcttttgctcttttatttaaaattaaaaccatgggtttttacacttcctaaacccttgacaataaagcaccaaccaaaccgctgtattttaccttctaccgctcgtaaatggaacccccctaagcgctagtgttaactccgggtataaaaattcaataaaaatgtttttccttattgtaccccccaacaccctttcgaaattttccgcgttaaaatttaaccatattccataatccttcccgccacagaataaaaaaaaccacccccctgtacttgttttcctcttataaaactctcccaccttgccctaaaaaaaggcacaagcgccttttttggcgtctcatttctcccaaaccaaatttgttattctgccaacatattttcttatttgtggggcttttttgtggaacacgcgngtnancatctattatatattatatatatataaaaacaactctctccccacctcctcatgccatttattcacgttctcctc

SEQ ID NO: 36337 - DNA, 1475 bp, Oryza sativa
  unsure (1)..(1475): unsure at all n locations
actcacacaccacaanaccaaacatttatgttgaaccataagcgtctcatactctccacatcacacaacaancctcnntaaatacactcaaacctctcacataccacccncccccccagaaatgataatcntgaacancccnnnnntnggaaccccccaaaaacaaaacccgcccaaaaaaaaaaaacanctttttttttcccccaaaaaaacaacggaggggacaaaaaaaaaaagggaacctccaaaaaaaaaaaaaaaaaagaaaaaaaaaaaaaaaaaaaaaaaaaaaaaaaagaaagaaaaaaaaaaaaaaataaaagaaaaaaaaataaaaaaaagtaccaaaagaacaaaaaaaaagtgaaaaaaaaaaaagaaaaaaaaacccagaaaaaaaaaaaagaaaagcgaaacaaaaaaaaaaacgacaggaaaaaaaaaaaaaaaaaaaaaaaaaaaaaaaaaaaaaacaaaaaaaaaataaaataaaaaaaaacaaaaaaaaaataaaaaaaaaaaaaaaaaaaaaaaaaaaaaaaaaaaaaaaaaaaaaaaaaaaaaaaaaaaaaaaaagaaaaaaaaaaaaaaaaaaaaaaaagacacacaaaaaaaatagacacaaaaaaaaggaaacaaaaaaacaaaaaaaaataaacagaaacaaataaaaaaacaaatcaccagaaaaaacaaacaaaaaaaagaagcgcaagaaaaaaacaagacaaaaacaacacagacgaaaagcaagaacaaaaaaaacataactgcaacacacacaaaaaaaaaacaaacaagacaaaaaaggaacacgaagaaaaataaaaagaagaaaataaacgtcaaaacaaaaaaaaaccaaaacaacaaaagcgagagaagacaaaaaacagaaacaacaacgaaagcatgggaccaagaatacaagaaaatataaaaaaaacaatagatgacgaggaaacaaaaaccgtcgaggacgcagaaaaaaaaaaataacaataaagcaaacacatgatagacggaaacgagacaaaaaaataacaaaaagaacgcatacacaactgacgagaacaaaacagacaaacaacacaataccgtgacacaccctgccacgaacaagacactaaaaaaatacagacaataaccgagtagagaggagagcaacacaacacaatcatcaacaaagacatagaacgatacgccgccgagaatacaacgcaaaaagacacacgaatacacaaataaagaacaacaagctgacacgaacaacgaaaccatccacaacatatacacaagaccacatacgatagacgaccaacataagcgacacagagaaaaaaaaaaaataaacaaaaaaataccacaaggagcgcagcacacgtcccgactcgcacaatgatagaactagaatcgataccctaagtaaaaaacacgcacgctgtcgcaacgagaacaggaaacaacaaaaaaaa

SEQ ID NO: 36338 - DNA, 531 bp, Oryza sativa
  unsure (1)..(531): unsure at all n locations
aaaagccgtggacttttcccaatacctacggccggggggatacccactccgggggtaggaagattcccctcccagctgccctggggagcacaaacccccccgtttaaaccggacccggcgcggctttattccgggaaaaactggcccgggagtcccaccccggggaaaacacgagcgttttctccatggggaacgccccaggggtaaccagtcttggcggaaggcggggttttgtcgagcgtggccctaaaaggacctaaaacccgggggccaaccctcgggttaccctctaaaaccaaaatttgggaattcgggccctgcccgaggcgcgaacacttttataaaaaaggtcgggcgggcccttggcctccggaaaaaaaacacccgcggggtgagggggcggnttttctctgcaccccgcnagaatataccccccacaaaaaaagcgccctcaaaaaaaacctctgggacttttttatcgggcgggagccgccttggggtaagaaaaaatacctttaggggtcttgtgcc

SEQ ID NO: 36339 - DNA, 706 bp, Oryza sativa
  unsure (1)..(706): unsure at all n locations
ggagtattncgtcngntatggnctcacccgnnnnnnnnnnnnnnnnnnnnnnnnnnnnnnnnnttataaatcgtatgaaatcatgaatttagattgttgattcaagcttaattgtaaaatctttggttcatggttatactttaatgcatgcttgttatattatagatggatttatcttctttttattgcaacacatgacttttaatgggaggtagtgacttcttttttgagagattagaggggtgagagatgagctgcttactttgtcaatgaaaagcgctcaggttttgttcaatatttccccgaagaaatacaaaaatcatgtctttgtaagcatcatgtgttgttcctcttttctcactgctcacggaggtgcctaaactgcctaacaaggtggcaaactggtccctagtgcctaaacaccaagccaccaaggcagtggtggtttggtgggagtgtggtggtacttagctcctacctcctaggcactgtttgtttttcttatattcaaataatgttctagaactagatgtgacaatgttacaagagtaacaatagttttacttgcaggcacatttatatatatgaaaaggatatgctcattcttgctctttgtccacctgtcttagtttcgaaccattgaagaaacaatgagcttgtgttcgtatttcagggcccaaaaaagggctaaacagaacgatgctgg

SEQ ID NO: 36340 - DNA, 537 bp, Oryza sativa
aggcagctctgttcacacttcacaccaagctaataatggtctaacctctccttttgggctcctcccttttaagtctcttgcgataaggcagcacctgggttttcaatgtattcgcacttcagccatcagccgccaacctttttgctcttgttcttctctctctgcaatgagatgccaacttgtagaaagttacagccactgcaagtctccgattgaccatgaatgcgagattgacaggcataaaattcagaattttatagatgctaacactgggtttactataccacttgatattgaatattgcagtgtcattaaaactggttcctaagataggctatcggcgagatgaaacctttgataggagctaaaccttaaaaaagaacttggcagatagttttcaagatatagatatttcattaagtaaataaaagcatatagtcaagacaaatcttccatgttatttttctcttatttaaggatgatctttcatgttggcgtagcagaataatgcagcatgttatcatactaatgtgaaaa

SEQ ID NO: 36341 - DNA, 730 bp, Oryza sativa
  unsure (1)..(730): unsure at all n locations
ccataagtgccgaaaatacacctccagggttgataatacttatcatttggaccaagagcacagtctccaaaaattaaccattatttttcattataatatgtataaaagtgttaccaaatatatgattttattaaagtactttttaaagaaaattccctacatacccctgaaaagtttcgcgatctcttctatacccttgagttttgcctcatcccctacatgcccttgagttttcattttgatctcctctatccctattccgttagttgaccgtgagttgactgttaaatttttctaaaatgaccatatcgcccatttcccattcttacagtacatgttatatactctacttcataattcacaatgtgaaaaattgtaactcatgataaaatcaaataggacataattatttattgaaaagaaaatttaaactattgaacaaatttattttttttgacaaaatccatataagagctttagctagaaattgtgaaccaaaattatttatttgttgggttcaaattttgatgaaaacaatgtacggatatcataaaagttaatttaaaatttatttttttttaaaaaatgttcccgggggtggcgaggccgaggagttgcaagagcctctctgcggaggccctgtgcaacctgaggagctggctggagannnnnnnnnnnnnnnnnnnnnnnnnnnnnnnnnnnnnnaggcgagtgacaatcagngcacgcg

SEQ ID NO: 36342 - DNA, 738 bp, Oryza sativa
  unsure (1)..(738): unsure at all n locations
atttgcgctcacattcgtgacagatccctaggttttccaaattcctcnggtttntnnttnnnnnnantccaagggggccttaggtaattccggtaggaaagtgtggggaaccccctaatattatttccaccaaggcccataatagaggtggctactaccttcaattttatccatatcactcactcataaataaattaagagacaacatatatgatgtgtcacttctaatacataaatatcgataactttaatattttcacactatttttggagtttgtgtggaggtaacatgtgtaaaagaggtatattgtaggtgtatgttaatgtgagtgtggtatgaatgggttgtacgtactccctccatcccaacgtctcgactctgaactaaaaactcaactcctcccaaaatccctcgccgccgccgccgccgccgcggacgacgacgacatgggccccaccacggccaccgacaccggcgcgaggatgaagcccacgaccgtcgcgtcggcggtgcaccgcgtccagatggcgctctacgacggcgccgcggcgtcgagggagcagttgctccgcgcggcggcctcgatgctctcggggccggcctacgccgacgtcgtcacggagcgctccatcgccgacgcctgcgggtacccggcgtgccccnnnnnnnnnnnnnnnnnnnnnnnnnnnnnnnnnnnngtnngtgcaacgctntctagtggtgtcatcaaccccact

SEQ ID NO: 36343 - DNA, 530 bp, Oryza sativa
ccccaaatggttgcttgcacacgcataaagttaattcttcttttgcctttttgtgttagtacactaatgctagtaagatcattgctgtcaatttcatggtatgcttgtgagaccagtaactttaaatctctcatgtcatgtcctcacatgggcatttcggaaccaggatatcactggattaattcacacaaaaggagagcccgctatgtcaaataatttgtgaatacaacatgacatgttcttcactatctaaaagtaatggctttaaaaataaacttctatgaaaaaccccccaaaatcaactctaaatttaaggttgaaaattcaaattggttgataagcataagcgaaaagatgaggttgtaatttgtttgagatccatttttttaacactattaaatggcaagttcagcttattgtgctggattgcaacctgaaatccgactgcatgttcggcccaaagacagtcttgtgctttctatggcctatggacatgaattaggctgtgcccaacatgaggagcagcagca

SEQ ID NO: 36344 - DNA, 733 bp, Oryza sativa
  unsure (1)..(733): unsure at all n locations
cgctggnnattaggactacaacagatgcacccancaattcagaaccccagagtccgcacatcctcaaatacaaagcacttccctagttagatgtaggttagacttcccgttcgagaaactctaccttctacctgccctcaatttatgcacgattaatgaatgccacctgggtggaagcgagaggtggaaatggaaggtcttagttcggaggtgggatctctacctgatagttgcattgccattcatgatgatcccctggcattcgtccattcagccattcaccattcacccattcaactggaattttggttgaatgccggaattgtgtccacaaattgtggatggatagttggttggctggctggatggctggctggatggctggctggatggatggtgaatggctggcggcggttcggttgctttgaagcatttgttgctatctaaattccatttaaggtcgtaccttatcgcccagcatcatcttattctctatttgtattccctccatctttcagatacggatgtagccttggatgtgcccgtgcccaatgaagaggaagagcgcaacatgaaacgtaagtacaaaagtaccggacacccacccagatcccaatagaatccgccaaatcctgcgggaaattgtaatcccattcaccagctcctacatttaattaacaagagaactattgtatttatctaacacctggattatctccacctttcatttgat

SEQ ID NO: 36345 - DNA, 689 bp, Oryza sativa
  unsure (1)..(689): unsure at all n locations
aagattgatttgctnatcgcatttacacnagtccatcatatccaagaggttaatcctcgattcctccaataatttgtcatagtgtaaataaaggctcacacatgaacaagtgtatgtttgtgtaagtgtagccagggtctggtttagttctcaactttttctttaaactttcaactttttcatcacatcaaaattttcctacacacaaacttctaacttttccatcacatcattctaatttcaattaaactctcaattttggcatgaactaaacacaccccaggttatattttgcgagtgtacgtgccggcctgcaagccattttttggcccaacccgtaggccctctttgtttaggcttataagccaacttataagtcgaaaagtctaagcctaaacaaacaagcagcttttccatttgggcttttttttgaaagcccccattaaaaagggcccccccaaaccccttttttacactttagccaaagctaggtggagaagctttttgtttatgtgaggtagatgtatgactcaactactaaactaggacattaaatccacccggcttataaatcatataagcccataagctgacttaaagtctaggccatagcctaagcctaaacaagagggcccgtatctgcccacaaaacttgcatatatgactgttcgtggcccaagccattccat

SEQ ID NO: 36346 - DNA, 776 bp, Oryza sativa
  unsure (1)..(776): unsure at all n locations
cgcgtttgaanatcgattcgcttctactgcaagtagctcatcacagtagaattaaaaaatatttgtgggacccattagtcattaaaaaaaaagtgggcccagtcacacgtttgttttttatcagaagccgactatctggcctgtggctgtatctttacaggcgctaaactggcgcttaagccaatactgcccctaggacttatggtacaaagcttctctgactgaacggggtaaaacattgaggcaaagtgatggcacacacagggcgtataacgacacaccaggcgatgcacgatcgatgcgagggggtacaagcagtgatattattggggtctagccttgcagaaaacagcatatataagccactgagatgtccaaaggcattttataatgaccatcctagagttacacaccgttattaatgagggccgcgaaccctcacgaacctgtcttaattcaaggcctacgatgatttagatcgaactggccacccggccctgggtctgaggtcgtcgcaaggcaacccaggccaacaatttacgattttagttggtcagcaaattttaacaatttaacactgacttgggttcattcgcttgcgtcaggcatatatcggaggcgcggctattttaatagactatcctatgctcagaggtgttcatttttgcccacaagacacatgcttctcacgtgtaaccacgtgacaattaccgggacggcatacagacggaaaacgtgatattacttcccaaccggtcctaactattaacaaaaag

SEQ ID NO: 36347 - DNA, 782 bp, Oryza sativa
agaggtagctcgctctaacagacggtacagtagttcatcactctatatatatgctttattgacttgttattcctcaaatagctttaattgctcattgtgaaaagagaataaaaaatatgaaaaaatgaataccgaatccttggaaaaagtcttgacgacagggacgtacccggaataaaagagaaaaatatgagcaaaaaggctcaagaaaaagaaaaagttaaaaaaattctcttggttgttttgtgctaaaggttatttgagaaagagtgataaatgcaataggtatatatgtttagtgtttatttttcaacctatgtgcttattaagatgttgcattataaatcgtatgaaatcatgaatttagattgttgattcaagcttaattgtaaaatctttggttcatggttatactttaatgcatgcttgttatattatagatggatttatcttctttttattgcaacacatgacttgatatgctatatgtatgctaagctcttgaacattaatgaacataattcctattcttgatgaaatcattggtaaaagggggagaagtaatgtgaaaattttttgatttttggagaagcaaggcgaatttttggagagttgttgagaagagcatgttttttgttcaattgaggatttctttctttttaaaaaggggggaaaagtttctttttgattttttgagcacgatgtgtacattttgtacgagtgtgctttttacacttttgttttatttttgcaaacaccaaaacattttttatgggttttgc

SEQ ID NO: 36348 - DNA, 731 bp, Oryza sativa
  unsure (1)..(731): unsure at all n locations
aaaaaatggactaatagatgtgtcagatggcacagnagctcatcataatctggctagtccagatcctctgtttttaatggatgtcaatttgcttctagcaaaaaggaaacatgaaatgaaaagaaaagaagcacaaaattatgctactccttcatgttaaacatactagtgatttcaatggcacaatgttaattcttgaattattatcacagtaactctagatggcagcaattatatttgggcccatacacaagaagattccaggggcgccagtatcatcgccagcatctaaagcgcatgcctagggccatttggaccatgagaaacgtgttgggctcaaatgtgacttccattcatgaaatttagaccggtccattaatcatctaaacccaattgtgggcccaaactgccatgcttgtgacacatacaccatatgaactagtcggtgcgatcacaatggattcactagtatgaatttaagtacatgcttcactgattaagtaggcgacattatgtggttttataactttagactttgggaattctcatatcatttggacactatggaatggttggcttatgttggaattggacacacacctccccctctattcaaaacccccaaaatggttttaggctgggctcgaggtgcgtggttgggttttgttagtcgtaccccgggtactataaggataaagctcgggcctctgttgcaaagcactaccgtactt

SEQ ID NO: 36349 - DNA, 632 bp, Oryza sativa
  unsure (1)..(632): unsure at all n locations
cacgcgcgctagtnattcctnnnnnnnnnnnnnnnnnnnnnnnnnnnnnnnnnnnnnnnnnnnntagaatgtcaaagaaagaacacatataactataagcatgactgaagaaaaacatgatgcatgctccaggctaagtatagttcatgtcattgtagtatcaaaaggaattaaacatctatactgcagactgtagtaagaagtttctagggtacacaataggagacctacaaagcatggctgacaagacaatgtgagtaccaacaagcacaaaataatgtgatcctgtggtttacatgttgttacattatcgactaccaagtaaaaacacagaattaaaaggagaattctcaattgtcgttgatgcgaaatataagtagaaaatttggctgcgatttcatagctgggatagtatgaagcagaatgtccaagtgacaatctggtatgaacaaggatattctgtaactggacgcaacacataataaactagagagatttggagcaccaatttttgtgattggataagtacggaatagactctggaacaacttttccagagttggataatgtacaatgttctactagtctcatagcagtaacaccagttcactgaataatgagtctttcacaaa

SEQ ID NO: 36350 - DNA, 726 bp, Oryza sativa
  unsure (1)..(726): unsure at all n locations
cacgtgcactgatagaacctcttcctnnnnnnnnnnnnnnnnnnnnnnnnnnnnnnnnnnnnnnnnnnnnnnnnnnnnnttgtctctatgtcttgggagaatcttttcgttgattgaacaaaagttctctaagggatgaggcgacgccctgggtggatagagatcatgccggatacttatgcttaagtggatgcacgtagataatggagattccatatggcataccaaggagttattgtgtgcctatggtatgcggtttcaaatttggaaagagaaccaaattaggtacgattgggtatgttaagtttctttctcgtactacagggtttactaaggtgtcgaagactattaatatgagtgtgtaaaagaggatttaggctcactaccttatgtattaatagatggggagcggaaagatctccggattcgcttatgagagcaggtgagttgagacaaaaggaaggatcttgagtttcatctgaatctctataaggagtgctgttggcggacttaggtgacacagagaggaacggtaactgtgacatctactgttggagttattaaatatgtgtttgatcatttatctgatgcctaaccggaggcatacctgcggacatatcagctggaatctgggtcgtaagacctgatgctgtcatgaccgtcagaccgggtccaagtacggcttcatgagccgattttccatgttattaccaacaatttatatag

SEQ ID NO: 36351 - DNA, 722 bp, Oryza sativa
  unsure (1)..(722): unsure at all n locations
acgcaggnctgaaatgcctattctcnnnnnnnnnnnnnnnnnnnnnnnnnnnnnnnnnnnnnnnnnnnnnnnnnnnnnctcctcattcaccagtacaattaattttgtcattacggccagcatatgtcgagattacgaagttacacacaacgcaatcgcccagaccgacttatgttaggagaagggagaaaaagcaaaagaaacttagagaaactacggcggctaaaaacagactccaagcgggggaaggcaccgagccatgctacactcccaacaaatccccagaaacagcgacgccagctaaatgccacatatggctctatgaatggatggactccagaaccactgagactaaagagagagtggatcaaggaagcacccgtgtcaaatatattgacgtgcaatccttttgcgcattcgtgaaaaaaatattatgaagttatcaaggaagcacccgtgttaaatttataatttaaatccaagtagattgattccaccacaaggaatctaaccagttgagatacgctcacttcattaaaaaaaaactgtacaatttacaagacaagtgtaaatattaagaacaaagggagtatgatttatttatgtacaacaataattatcgaattacttgtatacatgtgcgccgactggtttcgatataatcctaccatctccaacataaatatttaatgtttatgataatgtttggtcaagcttttaat

SEQ ID NO: 36352 - DNA, 707 bp, Oryza sativa
  unsure (1)..(707): unsure at all n locations
taagcctgggccaggnntaccttgncaannnnnnnnnnnnnnnnnnnnnnnnnnnnnnnnnnnnnnnnnnnnnnnnnnnnnnnncatttatataatgtttactaattatggattaattaagctttaaaaaatttatttcgcgaattagctttcatttatataattagttttgtaagtagtctatatttagtactttaaattaaattagtttctaaatacatggactaatccaaacaccacgtaagactatggagagcaaaacaggctcttcctggtttgtgaaccaagcagttcaagaatcaatgaaattagctaagcaggaaaatactatttccttgctaattgtagaagaatcaatgaaatgagctaagcagaaaatacgttccgttgaatttttactttcaaaatatggatatttctgaggatgggagtctttgggtaagatgagaagtttagatgaaaggtaacttgcattaaatagtgctagaaccgcttatattttaataaatatattttttaagtactaggcgtagttatatttattttggaatagatggaatatcagtgttagatgcatacacatatttccagctcaccaaaacaaaaacctaggtagtgttaaagccgttaagctagttgttgggcgttggggctgatactgctatcatttatagagtggataatctaggccacccgtcagacgaaat

SEQ ID NO: 36353 - DNA, 713 bp, Oryza sativa
  unsure (1)..(713): unsure at all n locations
cgccggcgtggccgcgctagtgaanccnctaatgatanccgctcacgnanacnnnnnnnnnnnnnnnnnnnnnnnnnnnnnnnaattctattattccttttagcgaatgatttttaattcgggatgaatttatcaggacgtgacacctacacaatcttacatgctaagtctagttacaaatctaataatcttatattaaaactataataatcttatattaaaactaagtctaagtgtcgtatattaaatctaatagtcttaattgcattacaaatattacaatcatatatataattacggcacttgcctgcgcgaattccttcgagggctagctaccactccggcttgagggacgacgacgacaacgtattttctgcaacatacaaaaagatgtattgggataaacgcgaagtaacatatattatatttgacgttcacgtttcgttcacgatccgtcacgttcgcgttctcgttaaggtcacgtttcattcacctacgctcggtcgtcacgttcactcacctacatatattgcatttcacgctcacgttaggtcatgttcacgttcacgctcggtgacgttcgatcacgctcgctcggtcacgataactagtattttaacattaaattctcactaacgttccggggctccgtcatggtcttgcacatgcccgtttgcgaggtctcggacactatccgtaggtgaatgacaaat

SEQ ID NO: 36354 - DNA, 1220 bp, Oryza sativa
  unsure (1)..(1220): unsure at all n locations
atgctgcattgtattcgatagacnatctcnnnnnagannngnggaatnnggtaccccatcaacatacatgtatctgtgtggtactatactgatagtaccactgaatttgtttttcccgtgccacgatctattcctacagaagaacaaataacacaaggtagattatttactaccccgatgcaactgatcataaagcaactaactagtcctatgaagaaagcaaagataaacgatctacttcttatacggaaactgaaaatccgtttgatccgaagcactgctgcaaatatgcaatctaagccattaacaccaaccattttctggacagcaactgaaatcatgaagtgaagtattgaagagatgttatggcagatcaaacaattgcaagtacactgcacacatggacgaaacatcacagactgaagtaaccggacaatcaacaactgtcatatctgaagttcagaactggctcaaagaaaaaagttgctatgaaacaactagtatgaagaaagagaagagaaacaatctgcatgtttcccagcagcaatttgagaagcccattaaaaattcagctaacttatggaaaagtgaatagataataaagttatgaaatgtgtgggagccattgaaaattcagctaactccatcttggactgctagcaagcaactgaaagcagggtgcagaagcaaattcagcttcactgtaaaatccatttgatgcaaaacatgcttctatcaggaaaaataagcactgaaaattacacattccattactattgactgcaatatcattgctgcatagatgtaattcatcagaccacactgcatttctgctacaaaaggagaatttactaggtagctccagcatagtagcaactgtaccaaccgacaattatcacaccaatcttgacggaaacatcaaactgttgactgaaactacactatagcacatttcagacaggtgaaactaacatgagcactctcaggggagaagccaagccagcggtgagtagttcaacgggccttgctccggcaagaacttgtccatgctgctacccgccgncgccgccgtccacttgccgttgtctctgcaggggtattctggggaatcgggagccaagaacgataacccctcacggtagagtctcccatcatccaagaagtagacgccctcgttgaactcagcgtccgggtagttgttcttgctgtacgatctggag

SEQ ID NO: 36355 - DNA, 1362 bp, Oryza sativa
  unsure (1)..(1362): unsure at all n locations
tggtgtcnnnaggtaagactcgtnggtcgnaaccannnnnnnnnnnnnnnnnnnnnnnnnnnggagtccggaagtccatgttcgacgaacagcaccaccttgtgcgatagcgagagttcactgtatgcgggaaatttgatgagaggagaggggcttcagtgagcaccgcccaaactactgaggatctttcaggatgctgctgagatatgaagtaaaattgatttttttttgcaaactggtcgtctaccgtggtatgttgagtagtagttccatttgttcattgatcaatgtacagtgaggattggacagatgctgattcgtacaccagcatcacaaaatgggtgagggtgttgtagtttaggagagccttttggggcttgtagattcagtagattaggatcatggggcattaacccaaaaaaaatactgcatatattctgtgcccgttctgttgaaaccatgcttggaattcgttgactttgatagtactcatacccttgcaatggtgcaatattcatcatctttctctaaatgaccatcaagatccatagctcatcttatttcctgaagtctttgatgcaactatccaactcaggccgttcttcatttcttggggctgcaattagaggttaaaaaaagactaatggtttttattaaatactaatggatagtttgattcgggatgatgattggcagtagagtatgggggaatttgaattggaagtgattgatatgataagtagtactacaaagtgataaatagtactctcttcttccctaaatataagagattttgattggatgtgacacatcttagtataagaaagttgtccacattcattgtactaggatatgtcacataaccaaaatatcttgtatttagagacggacaaaatatcttgtatttagagacggagggagtgtagtgtaaacattcttctttagatgcactatattatactcagtgcagtaaaaaaattgtatacttgatgtagaattgtggatacaagcatatataaggataaatatacccgagctggcaactgacgagttggcccaggagccacagtagtagtagtacaatacattgcatatgtgactattcctacgtgggcccacttgcaagagaccagtctggctttggcacgcacgggtgattagcttagtgcttaatcaccatgtactttgtgctaatcaaaagggattaaaactagcttcgattaagcacgcgcgtgaggcggggagcaccacgtccacgcggacaccgcgtagagcggggtgcccttccatccagccggaccgtgccgcgttgtttccgccaccgtgtagccaagccgcccggacacgctcgggccaccaatg

SEQ ID NO: 36356 - DNA, 716 bp, Oryza sativa
  unsure (1)..(716): unsure at all n locations
cacagacaagtttgaatgttcacaaatcaagaaaatgcagtgtggtgtttcaaaaccttgtgtaaaaaagaagcaaaatggtactccttcggccaaaaaaaaaattcaaccaaaagaaatttctccctcctaagcaaataaatctgaataaaaatagtccaaattattggtaataagagggacccccgaactcttcttagggtggatttttttttagacggagggagaaaatagtagtagggattaaaagggtttccatgttttgggaatgtggatctggaataaatttgtacaaatatatggttagtgaattcaagtaataaatgggggggggggggaaattttgcctcgcaacagtgaaaggctggaagcttagaacaagaaatggaggagaaagatagacagggaagaatttcctgctttaattaacccccttttcttcttcttcttctgagaaatatttacactttcatccctctggttttctgctaaaaaaaagacccaaagccatactcaccaagagggattttcttttcagtgtacagtgacacccaatttgaggtttcatttcagccccagagagaaagaggcagccaagaaaaaatattctgctctcaggcccaaacaatgttggaaatcaagggcgaaggggtacgaacttcctcaantctnnnnntcntnnnttgtgagggtttctagggtaaaccaaggaagtg

SEQ ID NO: 36357 - DNA, 716 bp, Oryza sativa
  unsure (1)..(716): unsure at all n locations
gcgtccaggtganctgctgtcacanccacnnnnnnnnnnnnnnnnnnnnnnnnnnnnnnnagttggaggttctaagataagctgtaactggacctcagtcactcactacactattctgtgctcacttctagccattgtggagtaatattgtactagatcatcagtgttctttcagaaaatgtgcagccgtgcatgctgatctgaacaatcctgaaggctgaagccaccaaatgtgtaaaccccccacctttatctgtcactactcactagtgcatttagtacttaattgcgtgattagggcgggggaacactgcacttaatggcatgattagtggtagtaattaagtagatcaccatcatcatcatcatcatggtgtccatattggagagagcctatggggagccaggcttttcaacggccctggaaacaaggcggcatgtccccccaggagtccaatcctgtctccaacggcaacagctaacgtcgctctccagtctccacacaccaattaatccccccttaccctacaaacctttccatgggccatggatgatgatatactcatatgcacccccaaccaaattaaccaacgtctcctcgacgtatatacctctccgccgatggaataaccaacccccaaccatgacatgttgtgtcacgccctcttgttcccctcacgttttttcggaacgcgcanaataattacacgtcattc

SEQ ID NO: 36358 - DNA, 981 bp, Oryza sativa
  unsure (1)..(981): unsure at all n locations
tgcagccacactttcttgctggcggtcgtgcgccactggctcgcgggaccgctcaaccgacttacggtaccgcggcgccggttcgcgggatcgacgcagtcccacactgccgttccgcgtgaccgcctcggtcccgctgcgccgttctgcgcgaccgagcgggcgtcggctcacagcttgattccacaccctcgttctgcgtgaccggtcccgtacccatcattccgcggcaccgctcggcctatcggtcccgcgccgccacgttgcgctttcgttccgctcccgcatttccagcgtgtgggagagatatatttctgtaaatccttctcgcccacgtatataaacgcaaaatgcgaaaaaacaagatattttttcaaatttttttcccgaaaggacgaggttagcttacgaagttagtagtcaacccaaacgctaaccaaccaacacgcggaattttttttttattttttttattaaaagttttacaaaaataatttttcattttgaaaattgacagaagtggtcgcctaccgccctctaggagggcgatttttaaaaatcgccatcccagagggcggcgaaagtgatgtggcagacggccgttcgctctcgggcgacggccgtcaacgaaatttgcaggcggcccccttgccgccctccgctagggcgattttgtactgtgcggggggccgcctgcaaatgggcggcggggggcctggaattttgcaggcggcccccttgccgccctgggggagggcgattttatactgtgctttatatttttgtataaatatcaatagttatcaaatctttttatattgaaaactatacaagattaaaatctccaagactggtaaaatacaattttattattttttagggcctatttggaatgttaccgtacaaatattttnnnnnnnnnnnnnnnnnnnnnnnnnnnnnnnctgaggcgcagtgcaattcgaatntcaatgggccagt

SEQ ID NO: 36359 - DNA, 686 bp, Oryza sativa
  unsure (1)..(686): unsure at all n locations
cggtggnattgtataacttcatgcnnnnnnnnnnnnnnnnnnnnnnnnnnnnnnnnnnnnnnnnnnnnnnnnnnnnnntacatgtaaaagcaccatgtaatgggctccgcttcgttaatacatcttgccgggctcaaactgataccagtataggctctgagctagcccattaaatcaggtgagcgccaaacgaccattgggccaaccgctctatggtgcgtatccgccacaccacatgctggttaaaatccttgttagaacttacaataaaacaacaatttactttgttgaggtctttcatctcaagatgctgttagcattcatacactggacagtagtgcccgatccatatctgcaccgtacggggaacatatcgcataaaaaccctgacagcgaacaacagaatttcgcagagtgactaagtccggacaatctaatgaacaacagccccatcctttcttcatgttcaggaacgcatacaaaccccatcaactactcctgcgaataaatgcacattgactctaccgggtaacatgcacgcatgtaacgctaggtcaatccctgaacacaaatcatgatgagacagtcgcggcagtgattccactacagctcgcggtgtgggcttttgcatgttgtcctcgagctcctacggccacttttatgcggtgagggtgcgtacgaggttt

SEQ ID NO: 36360 - DNA, 1671 bp, Oryza sativa
  unsure (1)..(1671): unsure at all n locations
cgaggnatttgtannacctgatattgatcatcggcctcgccccnacnnnnnnnnnnnnnnnnnnnnnnnnnnnnnnntttttttaaatacaaactaatcccacacatgaacttttaaacagcttttctttacaaactaaccatgacactttgctttaaaatatttaaacagtttgccacgccagcaaaccgggcgtggcaagtaccgggcgtggcaaaactgccacattggcgcccggttgacgatttcaacagcaacgatcgccatggggcagctcttgccatgccatgaccattggtgccgccactctgtttggccacgccactgctattggcatagtcaaaaggtttagttttgaaaatatttttccgggtggtctcttaataaaattatatttttaaaaggtctaacttataaaaaaaatttcgtcatgatgtgaccggaactctaatgatctcgcgtgatatggtgattagcagcagaaggagctgggctcttacagcgatgtcaccctcccgttgctgcacatgacgccgtcccacccgccgccgcaggggtcgccggagttccagctcgacgggtagttcctccattgctgcatcagaccccgcagcgcgtcaactgccccaagaatatttctccaaggattagccgagagccaagcagtttttgcttttcgccggtagtgagtgctgagagatcaactcaccgtccactccattggtctcgcagaaccccgtcggcgttgtcgccgccagcagcaacggcggtgccggcccgcgccggcccgttcttgccattgcgcgctagagcgcgtgaggttggggaagacgaagaactcagggaagaagcggactagagagagagagagagcccacggcttgcgagagcccacgcgacgctgtatatactgggccggcccaccaaccagccgcgggggacgcgcgtgttgggaattttttttatttttaattttttttattaaaagttttacaaaaatagttttccattttgaaaattgacggaagtagtcgcctaccgccctctgggagggcgatttttaaaaatcaccatcccagagggcggcgaaaatgacgtggcagacggccgttcgctttcgggcgacggccgtcaacgaaatttgcaggcggcccccttgccgccctccgctagggcgattttgtactgtgcggggggccgcctgcaaatgggcggcgagggggcatggaattttgcaggcggcccccttgccgccctgggggagggcgatttttgcctcccccctataaagcccagtcccccctctctgaaatttcattatattcactaaaaatccaaaaaaaacgaaagagagagaggggagggcagcagaaggggagcggcgaagccctgctggttcgctcacttcatcacaggtttgctcccatacatcttttgcatttgtactaatatgttatgtttgagtatatatgttgcgttttagttttagttccatatattttagcatatctgtagcacacagcacatatgtgtagatccagagcatagaatataatagtatgaattgagacatagacagtagnnnnnnnnnnnnnnnnnnnnnnnnnnnnnnnnnnnnnnnnnnnnnnnnnnnnnnggtataggtatcaaaaggntacaaannncacccac

SEQ ID NO: 36361 - DNA, 1174 bp, Oryza sativa
agaaaaagaaggaaaactaagtaattaagaataataagacgatacatacacggtggtagaagatgatgcatccgcaattcgtagaaaacaagaacagcagcgataaacaaatgattgtacaacacaacatagttcaaagagatcaataataatagagcaggaaagcagaatagaaaaagaagactagcagactgatgggcagtgagcctggatgcaaaacagacaagtatacggcagtggtccactgatcaatacgaccaataagcccacggagaacagggaagtgatcataaacatgaagcaagcagagtaagaaaagaagacccactaagaaaaacaactcgcactacggagaagggggcccgacgccgcaggctccccaggccccgaggaaacccgggcgccggctccacgccggcgccggcaagcgccgagcgcccggacgcgcccgtccgacgcgcgggacaggccgacgcgagagaccggccgcccgatgggaccaaactggcacctgtcacacactgtgacctgtcacggtgtgtgaccggtcacagaccggtcagatcgcgggttaggtggcaacaggcggcctgacacacgcctcgccccgtcccgtcggaatgatgagagcctccaggcactcgtccctagccggagccggcgtgctaactcctggagttggcacgtcagtcccggccagattcatgccaggcttcatcgcaaccattacaaggaagtcattgtatgaagaagggcagatgtgcggcatgctaaactgacgcgtggtggacaagaatgaccggtctgtgactggtctgacgccggtcacgtcatcggcagacaaccgtgctcccacgctgcatctacttccggcgaagtggaggcgagtgacggcgctgggcctcactcaaggacaagctgtgatttagcttccaagcgaaggcgcgagccaagtttttggtcaagatagggtgggtccccacccaaaagaagagtaggtagaagtggtgcatgtggtatccccgtgagatataaaacgaggaccttgccccaccgaaaaggatgatggggaacgaaaaagggaggggggactctgagacgaccttgagaatacctgagctcgtataggaaaaaaagaggaaagagggttctagaacctgaactcttttgctct

SEQ ID NO: 36362 - DNA, 677 bp, Oryza sativa
  unsure (1)..(677): unsure at all n locations
atttgatgactatcgtatnnnnnnnnnnnnnnnnnnnnnnnnnnnnnnnnnnnnnnnnnnnnnnnnnnnnnnnnnaatctcacgtgtacattacattctaagtcaagatttaaccgcagtccacaaactggagcgcgtgttcctcgtatcctgaggggcatgacatcttannnnnnnnnnnnnnnnnnnnnnnnnnnnnnnnnnnnnnnnnnnnatccgattacacctggtacaatcataaataccctctggtatccatatataatccgatctaagagaattatactgtctccagacggcgacatagctatgaggcccataccgatcgaccttacctacatataatcagtctgtatggctaatatacacaccctatcacggcgatttaagcccctattacctatttacaacccccagacggatcacttaacacatcagctcaaaaataaacgatccgttagctgtatcctattccttcggttctcgcttatccatctatccgcggctagctttaaaccatcggctgcctatagcgngatcaaataatgttgtacggtaccacacccctaagagactttattacctgcactggaactaaagagatccccaggcttatagaggttctcaccctctgatgttacgtccacgggacttattacgagcccttgatccatttg

SEQ ID NO: 36363 - DNA, 691 bp, Oryza sativa
  unsure (1)..(691): unsure at all n locations
cggtggatgatggatctatnnnnnnnnnnnnnnnnnnnnnnnnnnnnnnnnnnnnnnnnnnnnnnnnnnnnnnnnncaagagcaagatgcaaaccgttcagtccaaaagctggtctccttctaaactctaacaagataaagatttttttttcttcggtactcgttagcacgcttctcaaactgttaaaaagtagtgtgcttcgtacgaaaattttctatatataagttgctataaaaaacaaataaatccatttttcaaacttttaataattacgattcaattaattatgtgctaatgacttgtctcgtttttcgtgcgcgattaatccttgtagggtgatgctaatgactaagccgagaagatgatgctgaccatgtccgtcgtcatggatggtggttgagcgaaactttcggcgaggggagaggaggaggagccagcctcatgatgatcagcctgcttgcagatatcatccttagctcatatgcagctgagctggtgcgagtgagtgcttggccggcgaggcggcgacgtcggtccgtagtattctggaaaggaacaaggcaccaaacgccctttttttttttttgcagaaggtgatcctgatcaacggcgagttcccgggcccgcggatcaactgctggtncaacaacacatcgggtgaacgtgttcaccagcttgacgagccgaagt

SEQ ID NO: 36364 - DNA, 2185 bp, Oryza sativa
  unsure (1)..(2185): unsure at all n locations
ttgtgagctcgggatctgtccacagcccaacatgactgtactcctactctataataaagagacctctgttgctgtgatattctatcctcctgtgataccagcactgtttcctgggactggtatcgattaacaggttaatttggagcgtcacgggctaattccagtcgggactagctcggggcgtgacatagagtatactcatgtctcttgttatatttttaatacaatgtaattattttaggtgtgtcgaccgagtttttctctcttttattaaaacaatgtattgtctttttcgtgctaaaaaattcctacaattttttaaatttgaaagtgtggacaaagagggcagctgggcctcacagttaaccacatttaagacgcacgcacagaaaagatcttcttcaacattgcatcatccaccctgtcgattgaatgctgaaaacaacaattccagcttgggcataattacaggatttcaaacttactttattaagtacattgttttgtaatggcaactaacccgatatgtacattggccgttgaaaaccacacatccacaaatctaataaaacgcaattaaacatcatcctgtcgtacattcagcgtgattataaaataatgcaaagaggctgatatttttaacctgatgatgatcagatcacattacgagcactgcatgaaccatcaaaaagatcatcttgaattagtcagggtatcagagaaagccaggttacggatggctatataggacaaattaacacggcgataattacatagtgcgacgcatgcttttgcacatgattctctaaagaagaagaagaaaaagaaatgctcagcgatgccatcggctaagctaataatatagttaatctaactaatttttggctaacactatagtctaattattaatcattggtgatctggtgtgactcgaccagagcatttttcggttgcatccgacgtagatccttcggctggtagctgatcgtaactagtaggtgtagtacatgttcgatcgatatctgtacttgttttttttcagaggaaagaaagtgagatccagctaactagtattatagtacttttaaaagtattttttatatatatgctatcagtttgttagcttttgcttgttgctaaattaaattattgtagcctgtaatggggaaaattattagcatttatttacaggttgtttatttgtgcagatcaattggtgttcttgtcctgcagacagatcaaatgattttttttatgagagaataattgattagtttaatttgctacggcagatcttcctcttaagaaaaattgacctcattatcatttctttaatataagtcccataatacaatctttgaagaatcaatattactaactatataaccaatcattagatattctcttatcattagtgtatatgcagaaaaatgtacagattacctgctagctgaatagatggcaacgttatcagccgtatcaggcaaaaataattccatcatgggggtttgatgaattggtcaggaactttgaagggaatttagtatttttcctaaaccccaaatgaaagtgattaaatgatgttctaagtcaatttatcacgtccatatccaggactaaataaactgatcttgcaccgatgttccagagcattctccttacctgggctctgaaactctgaaggtagttgggatatttgccatgacttctgaccttctgtcctgttgatgttgccccggcccttccccgttagcttcttcgttttcgatgaagatgtaaacaagttggctgacttagcagttgacacaatcattaaccattaacctcttgttcttggctgctctctgaatggtatcaaaattttttagacggtttataactttatatgatgtcaatcacatggttcttgaaaaccagcggttaccggccggtaaccgtccggagttgacgatcagttcgagcaagtgaccaaaaggatatggttgtttttaaaattgaattaagaactattttgtccaaataaaaaaaactgaatttaaatttctatcatgtaaaatccggtaaacggccgttacaagatttgacagagtccgataatcatggacaaacaggtttcaannnnnnnnnnnnnnnnnnnnnnnnnnnnnnnnnnnnngccacgagcactatcaatnnnnanccatac

SEQ ID NO: 36365 - DNA, 958 bp, Oryza sativa
  unsure (1)..(958): unsure at all n locations
tggggtcnnnttttatatatnnnnnnnnnnnnnnnnnnnnnnnnnnnnnnnnnnnnnnnnnnnnnnnnnnnnnnnnnnnnnnaacttcaaaaagcagaaaattaaaggcaaagctacgtaaattacattagttgaggcttagacttaaaagaatatggcagctggtaattcgtattttatcgggtgaagctaaatgaccaatggtctagtcgtccaatggtacgaatccgcgacaacaaattctggtttaatttcttctaggaatttaaaatatttttatttttctctttttttatgttttttctttcatgtttatgttttttttctcctactagagtgtagcgcccgttccgtcgtggcgcctagcgggaaaattatctcctaaaaaccctaattgcgaaatttgtttcttcgcttgttgtctagtgtccgtgccatctcaagatctcaatccccgatctatcgtcgagttcaattccgaatccaaatccttccaaatcattcctccgcaaaagtccattttgcctcccccggggtcgatgggccgaatcccgctctgaccagactcttgccgggctctggaggctgaacattgtagctatcctgctatgtgttactccttcacacacatatccaccagaacacaagagtagggtattacacttctcatcgggccgaacctgtctacattcgcccggtctcgtgcacttgctctctcgcgaacattctacagatcaatcgtgggctaataacctcacttagcgtaccctgacgaaccggcaaaggggggcctgtgcggtcttcccgtgaggagctacacgcttccgccggtatattaccattcttcaagggtcttatgagcattttttcttttgaacccacgcgcgtgcgtgatttgagacactccactttatcttctcggcttagttggaggatggcgccttattgtgcccttgaa

SEQ ID NO: 36366 - DNA, 745 bp, Oryza sativa
  unsure (1)..(745): unsure at all n locations
agtgcctggaaatcgactgcacgtnnnnnnnnnnnnnnnnnnnnnnnnnnnnnnnnnttgtttgttttgtttgtgtctcgacgagatgtataaatttggttggtacaatattacaaatattaatatatatatatatatatatatatatatatatatatatatatatatatatatatatatatatatattatgaaacgtacattgtacgtgcatgtttatactagtataatatataaaacagagggagtactacatattttccctatcatgggtaaacagtacagtgaactcggcccatttaggcccacccacctgtatttggatcgagacccaaaccagcccacgaaaatttgggccgcaaaatacgggggggccggcctatacacttttgtgatagggaacatgcagctttcacttcaactgggttagctgcgacggccagggcacgtcaaaattaggcagtgtggggagcggatcgcacgcgccacggggagccggacgaaaacgagaagctcacagccaccggcgcgcgccaccagcatatactctctctctctctctctctctcgtcgacgcgccgatgcgccgagatggccccgatcatgaatggggcggcggcggctggtgggggcacgggcaggcgcgcccccgctcataaagaacgcccacccccgcgtccaaaagtcgcgtggaaagggccggaacccgccgccggcgcgggggttttgctactccccgaggaggg

SEQ ID NO: 36367 - DNA, 913 bp, Oryza sativa
  unsure (1)..(913): unsure at all n locations
ctcgttgnngtgannnccagtttanaccgnacaanncnnnnnnnnnnnnnnnnnnnnnnnnnnnnnnnnnnnnnnnnntgggagttgaccttgagcttcgctagattttattttccgctgcagttttcttcatggtgagggctaagtgcctcttaagtaaatatttatcgttttaattaatttgatgaatctgtatattaaattgtcagtttgtgtacctcggctgattcctggacgaggattttatgcacaaataagttcggaaattactagtgaattttcgggcgtgacagcgacgtagcctgcacgaatccacgccgcggcgtagcttacgcccgtcgtcgcctcccgaagtcgccgacgaaatctccgccgaaatcgccggacgagacgatgaggaaaaaggcaaaaagcaaaatgaatctctcacacactctctctctctagtctgattcagacaatctctctctccggtgcggatttcaaaatttgaatagtgtatgtgggtcccaccattaacacactctcacaaaaaaatctctctctgtcggcaacacaaagtgggtcccacaaaaatgtaaaaaaaaaaagaagcccatttagcccacgtatggaagcccgaacttacaataatcaaaagcccacatacaaaagaaaacaaaagtctagatagcacgaatctcaaacaaaatccaagggaccaaaaaacgaatgatacagcctaacaaaaacatgcgatagccatatagcctttccgataaaaaattggttaacattttttctttcccctaaatttgtgcaacttctgttgtatgttggttgatatgcagagatgagactatatcagcattattattataagttgttaactagttgtagtgatggatatgggcataaagaagcaagttatatg

SEQ ID NO: 36368 - DNA, 1396 bp, Oryza sativa
  unsure (1)..(1396): unsure at all n locations
cgttattcccctccctttcaaaaatattaagcattttttttttctaggattcaaaattataccataatataaatatttttgggacattgattttagtatatgaaaatccatgtattttcaaccaatcagaagcttaggaagagaaccaaagccattcaaaatttaaattttgagtaatgagacgaataaaaagaatatttctcatcaaccttaatctttgttaaacaaatcataaagcttatattttagaacggagagagtaggtggaccgatgcacatacaaacccgccattaagttgattggatgaacatgaacagcacgagaggaacatttcatttctggtcacatttgagcagctactcgctttcagatcaaatcttccattaatttcctgttccttgtggtttctcagtgggggcatctagtctcagtcgctgacgagccaatgcatcgaatgggcgagcatgattagattattggggggacagtggtgcccattgcgaagtgactaatgttcatgatattcgatcgagcaaccctggagtaccttctactcctactatactatccactgatccacagctattagctagctgctcagatgattggaagagtccaagaaaaactgtaatgcctttaacatcggtcaatcagagatggttggagtggattgggactgacaaagagacattatccgtcagcaatctacattgccaattttcttttcaggcctgaagatgagacatgcattagtcacagagaagattttcaggatttcactagtccttgacagtttttgacagttactagatgcaaaccacttactccctccgtcacataaaaaacagttgccggcaacaaatatagatagagctatcaatttttggctacgaatataatttgttcttttttaggaaggagagtataagcatgaatatgaataactaacagtaagatgactagaacctagatgtccatgctgcatttaagtccaggtgtttgcgtctgggctctaagctacttttcttggtgcagatgcatgctttgcaacttcttcctccttgagctttaggaaagaaaaagaaaagcttaattgtatactataagcaagaacacgttcggttcagatccattttgattcctgagatctcgcagagcgagatttgtcatccggtttatcgatccaaagtgggcgttttcccactaatcttttcatcatcttcttctttctgaacctgttgacatcactcacatatatttttttaaaattttaatgctatataagcgtcacgtggcatgaagaccagatcaacannnnnnnnnnnnnnnnnnnnnnnnnnnnnnnnnnnnnnnnnnnnnnnnnnnnnnnagcaaggggttctaaatnnnagcacg

SEQ ID NO: 36369 - DNA, 1262 bp, Oryza sativa
  unsure (1)..(1262): unsure at all n locations
accacctttactgggactggcggcgactctgttaaccaatcgagcagttattatagttcaatgacgncgtctaaggtgacggacnacgtccaagtgtcacccatataactcaagcctggcggaagggcttgagagtcatgtctagaagacggtggctgctaacaataatgtcgacctgaagaagtaccaggcgtagctagaagtcaatatggtagggtccctgacaaacgctgtaggcggtgtccatcatcggggagtatcataagagcgcgcaggcgcaggcctgtctcttaccacttacatactggaacgcggaggcggggttcttcatgatcggtcagcggagcacagtgcctcccgcggctgttgccgcccaaataatgataggggccatctcggcgcatcggcgcgtgttttagacagagatagagagagacagtataatctggtggcgctcgtcggtgcctgtaattttctcgttttcgtccggctccccgtggggcgtgcgatccgatccccactaggccttattttaacgtgccctggccgtcgcagctaaaccagttgaagtgaaagctgcatgttcactatcacaaaagtgtataggccggcccacccgtattttgcggcccaaattttcgtgggctggtttgggtctcgatccaaatacaggtgggtgggcctaaatgggccgagttcactgtactgtttacccatgatagggaaaatatgtagtactccctctgttttatatattatactagtataaacatgcacgtacaatgtacgtttcataatatatatatatatatattaatatttgtaatattgtaccaaccaaatttatacatctcgtcgagacacaaacaaaacaaacaataggaaacattaatgataatgtggagaggtggtgccatcgtaccaactcactctcagttccatcatacgtgcatgtgcggccatgccaactgcctacattcctccacatataacttgcttctttatgcccatgtcaatttgaaacagaataagaataattttaaacttcaacttgattgttatacagtttgactggaacctatatataatttgatcacaattactttaattgcaaatataacagatcatattggattaggagcagaagatgcaacagtagaaaagcaaagtatggataattcannnnnnnnnnnnnnnnnnnnnnnnnnnnnnnnnnnnnnnnnnnnnnnnnnnnnnnnnnnnnngttnaacaatnaaaacat

SEQ ID NO: 36370 - DNA, 724 bp, Oryza sativa
agccgctgaagtttcatagagtggtagatatcttatataatctaaaccaacgtcgatatctaacctaatcggctaccctctgttaacagatgttagccgattgtgggttagatggtgatattgctagagattatgtaagatatatgataactcgatgaattacataaacaagattagagtatcataaagatgtaagcactaatcccgagaacgcaagccgtcataacaagttttacctcttgttgaagatcgaaaccgatgcagctcaacccgaaagtaagaactcgtcgaaataaaacaaaagcaaaagggtggcgatgcgccgaaattgtattgaacgtgtgtgttaattgattacatggggttcggggtctatttatacccgaaaattacaaactatgtccatatcggacacgactcttatctctaacaaaatctaagataccataagtctttgcgacagacttttacccaaacatatctttaaggaaattacataaaatattttaattaatagatacaattgccttctcaggactctatccatgtgcggcaattatcttgaagcacctcaattcaacccgatgtcatacaccaagtcgtattgtcggaatcggctgcatcggcttacctagtccgactcagacccagccgatcctaatcgtagccgatctggactccagccgaattttggtttggttctaaaatggaactccgccttcgg

SEQ ID NO: 36371 - DNA, 1182 bp, Oryza sativa
  unsure (1)..(1182): unsure at all n locations
catgatgncaattggatnacactganattcggcctcccannnnacnnnnnnnnnnnnnnnnnnnnnnnnnnnnnnntgttagttgatttttagataatactgcaattagtcgataataagaacctgtcaaagatttattgaaaaagacctgtgaaagaaaaagaaagagaaaaacaagcaagctccaattaatcacctgttgttccactcaagtttgtgcaattcattcagtccattataacccttgtagcaccgggagctaacttcacgagttatatcatatacctataagaatggagtagaagctagtcagtgcctcagtggcataatacaaaatataatgcagaatgaattcatcatgtaggctcaggaacaattgatccctcctctttttttccctatgttttcttgttaccatttaccatgcatgtacttctcaagctacctacctagccttttgacaagtaaaaaaaaaatgaaaaaggtaatctggtatatctcttcacatactaatccgtattggtgatggaggaattcacaaattataaaggtaatctggtccttaagcattattgacggcacgattccgttggctacctcctcgactgtgtggtactaaatgctgacataagtagtcttcaaaattgaaaaggagtagtgattcataattcactcatattcagtaaaaaaaagtaataattcattcatatttttaacaccatgtatcacccaagtagcaactccttccattcccgaatattttaaaaaatgttagattctcttatgatggaaaattgtgtgattatatttttcacataaggtaatttgataatataatatattttgaattgttttataaattaattaacggaaaaagattagtcaaagtttgattgtgaatagtgtttggtgacaagtttttgggaacggagggagtatcaaggctagattgcattcaacaaacgtctacgagtccaactaagctgtcactattagttgctttgctctctgcagaagttaggttcagtacttgtaatggctggtctgcatacattgcaagagtttttacagtcgaataatactattcttcctacattaaaaaaagaagaagaagaaaaggtgggacgttccaagcagaaagactgagctatggaaagtcaagtgcagattgatggtgatact

SEQ ID NO: 36372 - DNA, 695 bp, Oryza sativa
  unsure (1)..(695): unsure at all n locations
tttgantttgatatacnnnnnnnnnnnnnnnnnnnnnnnnnnnnnnnnnnnnnnnnnnnnnnnnnnnnnnnnnnnnnnnattctgatcgcaagggtgcatcaacccggctttttccacaaaacgcaaatgtaaacacattggaacaaagtaatttgcatgtgtgtactagttgcgacccctgtccttcgataacccagccaaccgaccttgacacttcaaaattccatatggtttggtgatcaacttaaactgaggtgcaactctgggtagagaagagatatccatggctggatgattacccctaggaggttctagcggactgtcatttgccaaaagcgatgcgtcattttctgtgctctcttgatggaaagccgcagacgtactactagaacccctgagaatatatctaggtcctagcatctgatgacagtgatgagtattcatagaacgtggatactgcagattaaaagcagttccatcttcctcagggcgaactgatctagcccttggagagcttagctagatgatgacaagtcatctatgaagaaagatgcacgcgcgtgctctgtaatagcggactatgatactatcatccaatatggtcggtatgcatagaaaattgttcagacaccaaatgagtacttggccccacttaacagcatgaagctactaaaattccgaatatacatggcgg

SEQ ID NO: 36373 - DNA, 703 bp, Oryza sativa
  unsure (1)..(703): unsure at all n locations
tttgantttcgatatcnnnnnnnnnnnnnnnnnnnnnnnnnnnnnnnnnnnnnnnnnnnnnnnnnnnnnnnnnnnnnnnaaaccttttatgggtcaatgaaaaccactgcaattgttatcacgccttattatgctgagcgtggttccaggaataacacctatataggtgtcgatctctatttgagagctcagtaagaaacaccagtgctcttacgacacattggccatattggaacgggcacacctcaaataaggccgtgccatcacccgtggtgatctggttataacctatgcctacacaagcaaaaaggtggacagacaatggttttggcgcaagctggcctctaccaattttcgtgtaccaagagatgccatgtggcgttttgcctaaacgaactttacaatgcgggcagaatattgtggaccataatactcgactctagtggtcagtttcgataatcgagctcctatacttgaaaaggggggaacagagggccattgcatcaagtgagataatgatatgttcaagagtggtagatatgaccgacacaatttgattcatgagagcagaccaaggccgaatatctttgttttgaggtaagtaaccccaaaatagtggtcattgaggcttttcatcacattgttggaccaatgaagtggagccattactaacacatggctaacccactgcgtgcagaaaagg

SEQ ID NO: 36374 - DNA, 1220 bp, Oryza sativa
aggtggcttcaggcagtaataaaccggtgggtgaatgccttacaacggagtcagggatgttttgattcttcctttggcggaagacaatgttgggggacatatcccgggttgttattaacacattgctgcacaagcggtatgacttccaagaaccaatcggtgcttgtggcgtcccggatggctcaagatcaacggaatcacagcgttcgacagccaatcggtaatgccggatctagtcaattccatcattccaaattgcagtgaaaacgaaaagagtaaatttcataaaactacagatattataaccaaactatcacaaaactacatatttaaggaattatatcacaaaattacacatttagcaccaaatttagcacaaaactacatattaaagatgaagtgttacaaaactacacgtttagttattaaattatcataaaactaaaggtttagaaccaatttaatcacaaagtaataatgtttatagctccaccataacaatggtgctagggatttaaactccaaaagttatagttttgtgataagttcaatattaaatatgtatttttgtcacacctaacttaaaatctgcagttttgtgataaatttgatgctaaatgtgtagttttatgatacaactccttaaatctgtagttttgtgataatttggtcaaaatacctgtagttttgtaaaatttactcaaacgaaaaggaatcgccaatactatggttgtgtttgcaaacccatgttcccaacccctctccctcgtttttcgcgcgcacgtttttaaactattaaacggtgtgttttttgcaaaaaatttctatatgaaagttgcttaaaaaaatcaaattaatccattttttttaaaaaaattagctaatatttaattaatcatgtgttaaaaagccgctccgttttgcgtgcaggagggatgagttcccatcctgcacttgcaaacacaccctataaccattcatattttcaacacataaaacaggtccatcaaaaccacacgaagttttctaataatacctcacaaataccccatatactttatccaatctttacccatttagtactgtcggtgacatgggaccgggggtatcgtgactagaagcttgggcagccgcggtcacccacgtggcctgaccccctcgggggggtcgggcccgagggtgacatggccacccctccctctgtctccccgaggggttgg

SEQ ID NO: 36375 - DNA, 1812 bp, Oryza sativa
  unsure (1)..(1812): unsure at all n locations
cggcttgttgatagattcctnnnnnnnnnnnnnnnnnnnnnnnnnnnnnnnnnnnnnnnnnnnnnnnnnnnnnnnnnnnacacgggagatggacaggaatgcccctgggataattaggttgggttggaagggttatgtggctgatggctgtcacgtgtgtatgggacatgggacgccatcaactaataatgacctttcacctttgtgcaaaggaagattagtcctaagtgagatttttaataagattagtactttgaagctttggacaaaggactctagctagatggaagcttaactgacaagcatattagatccaggcttttgccaattttgaaacgattttttaaaaaaattcaggtttattcgcggttatgttagaatgtgcctctagcaaaagaaaaatattgatttttttaacttagcaaaaaagggtttcaaagtcagtaaaaccctgtttaaattctactattttcttttcaaaactttagtccctatttttgcattacaaaatgaaaaatcatagtccttaaaatgctccttaaggtaaaaaaaatattgatgtttaggaccagatttgattctcaaaatattataagtttaactaaatcttattctgaacattaaatatttatttatgatagaaatcaatgaaaaggataagtagtcaaagtcaatggacttgtttgttcgagcctatttgttgcggttcatattttcgttagtcgaaggcatgatataaaagtttacatttctacttttattggctctaaactaaaatcgaataccgggaaacctctaatgatgttatttcatctatcagagtttaaatcttgatgcacacgaatattacgcatattcaagtgagttttcaacaggattgcagttagatcagggatgtaacgttggtttccatttattagagcatgtgttaaggggacatattcgtgggagtgtgagtgtggcgttggtgtgtgtgcacgcgtttcgtgtaattaaaaaattaaatcaaatatagaaatgaacggaaaaaaaaatccaaaaatgaagtttgaaaatcttaaattgactacggcgccggatctgctacaccccaaaatcctgtggtgcacatgaacccaagagagtctcgaaccggcgaaaagtcaaaaattctctcgcggaatcggatagaaaccgaaggggcggcacggcgtcaacgcgtggcgcgagggggatattcgggtggcgacgatgaggtagacaacgcgcgtggggcgccgacgncggcgtcagcacgcggcgtggtcggctggagattacgatggctaaacatggtttttattaggggagattattattattattatcagtggaagccaaggaaatgatcccatcaatcgactcgtacacccaatcacagtccgagatttatatcgttagctgaccaagaacgggtagtcaagttgcgttgatttttttctgttatttaggtgcagctctttttattattattattttagattttcatttcaagcttgccaaccttgtaaaaagttaattcttcgtttatatattttctgtataaaattatctggaaatttttttgaataatatctttttagttttgtaaaagttacttcatacggtcatataataacccatcaattattcataaatttcaactatatcaaacttgtagtacaacgatatgatacgagtttatatcgatcagaaatgcaactgtcatagctagcagaggggcagagacaaaaatagnnnnnnnnnnnnnnnnnnnnnnnnnnnnnnnnnnncaaacacaagnttcattgacac

SEQ ID NO: 36376 - DNA, 730 bp, Oryza sativa
  unsure (1)..(730): unsure at all n locations
gccgcttttgattgatacaatcnnnnnnnnnnnnnnnnnnnnnnnnnnnnnnnnnnnnnnnnnnnnnnnnnnnnnnnnnnnnnnnnttcgcttggctaatcactagccaactgcaccagcgcgacagatgcaaaactagttcacgccaaaattggaagtttggttgaaattggaacgatgcgatggaaaagttaaaagtttatgtgtgtaggaaagtttcgatgtgatagaaaagttggaagtttaaagaaaaagtttggaactaaacaaggcctaaacagggtacaggggtggggacttgggtgtgttgtggtggttaccttccgggttccggcgcatctcgacggcggcggcggaagactgcatcacccgcggtgagcactcatcgccgacggatctcactgaattcgcgctccccaactctacactctggtggaccgatttcatggttctaaccctggctagagattgggccacgtggcgccctgaaaatcaagtttgcctccctgcgaatttgccacgtgtctccttggctctcctcccgcattgtttgatcgagtatcgacggctaaaggctacagctcgctgtggtggtctggtggacctcgttagaaaactggaattttttttccatgaaagtgctccatcccttatccacccatctttcttccggacgcacgcaccgncgtccnncccgncgccaaccggattcttcaccaccttgcgcgcg

SEQ ID NO: 36377 - DNA, 661 bp, Oryza sativa
  unsure (1)..(661): unsure at all n locations
ccgcgttttgtatcttcctgnnnnnnnnnnnnnnnnnnnnnnnnnnnnnnnnnnnnnnncaaatggtaattttttgggaatagaaaggtcatgttgctccgtgcaaataatttcatacacatgtggttgctattattgtaaaacttttagttttttttaaagatatttttcaaatttttagtgcactgtccaaatagtttcatacctgcacatgatgtaattaattatccttggttattaatgagaaatatattgattatcagatcaaacgagagttcaatcgagccaattgataggaggctcttcactgagggcatctaaaaggtggcagaagtagagcacgctccggttgctcagttgtattttgtatgtccagaatgtgaaaataggcgaagtagctgtaggagacaatgtacttgtaagttgtaactctacagatgtgagagcattctgctgacgaaggacgagcagctgatgactcatcctttgctcatacagatcaaatatccaggaaaggattcccttttctgttctccatgtttaaacctagggttatgagattgctgaatgtaatgttcaaaagcaggggactccccaaagttcaggggtaaatcttgcctggcgattaaccggacaagagattcccgagcaaccatgggag

SEQ ID NO: 36378 - DNA, 619 bp, Oryza sativa
  unsure (1)..(619): unsure at all n locations
atgagtatgtgtcaaccgttgaggacgtcaatcagatatcagtcaaatgactttgatagcagtgatgctttacacctttggtcaggaagccgctacactaatctgcaatagaaaaaagaaagaaagaaaaagaaaacatagcaaggcatttggaacttaaatttagttagcattatgtgaataaaatttagcagttatataagctatttacatgattgttcgttaagatccaaaacttttttgcttgttttagctgcagatatgcactttagcaagtatattgtagttagtttcagtcgaatattgatgttgttcctgagctatcaatgccatgccataatattggaattgaataaaacaaaaccagagaaactaattgattaaaaaaaaaagagtagagcacatttattctgagaacgctccttcactttgaccacaactcttacttcttctaaattgagtaggggaacaaagaaattggaaatccagcagcttaggaatttcatcatggcagcacatacacagagtcacagatcatnnnnnnnnnnnnnnnnnnnnnnnnnnnnnnnnnnnnnnnnnnnnnnnnnnnnnnnnnngagagtctacatnnnnnaaccca

SEQ ID NO: 36379 - DNA, 730 bp, Oryza sativa
  unsure (1)..(730): unsure at all n locations
cgcgcntttgtagacccngatatatcnnnnnnnnnnnnnnnnnnnnnnnnnnnnnnnnnnnnnnnnnnnnnnnnnnnnnnnnnnnnnnttcacatcaaaattaaaagtttagttgaaattgaaacgatgtaacggaaaagttaaaagtttgtgtgtagaaaagttttgatgtgattgaaaagttagaagtttgaagaaaaaatttataactaaggttgtgtttagttcctgaaattaggtagaagtttaaagttgagagtttatgtgtgtagaaaattttgaatataatgtgatgtgatggaaagttagaagttgagagaagtttggtgtgtaactaaacagggcctaaactcggccacagttacgggagtggagcgaggcgagtcgtgtcgaccgttggtatagcgctcgtgattcttggtgggacgacgacgatgagcgagcgagagagcgggcgggcgcacgggtccccatgggcaaatgcagtgccggcgccgcatgtggagaggagcctctggtggcgctgtccttcctgcgtgcggcagcagcagctgcttcctgcaaacggcagcctctgcggctctgacccacgcccgataaaagcgaggggaaagttgacgtgtgacgtttcactaccttggctcacttgcctacacgccccccttcttttccgcccattcaaccctccccctctacgagtagtatgccgtcaatataaagtttattgcca

SEQ ID NO: 36380 - DNA, 529 bp, Oryza sativa
acatgtgatgactgagccacttgcactataagacaaatagatttaggtttaattggatccattccgtcgacttcatattcggcaacgccctctctctctacgaggtacacacattgcttctttctcttggttgcatacacatttcctccatgaacattatagcagggaattgcatgcaacccgggtgattaggttgaaggtttgttgctaaccaagatagataatttaattagcgcctgaaatcgagtcaaacaggaaatctatgctcaatcctgtgtgtcagtgtccagtgctacagcccaaatgcacaacagatacaccgtgtcagtaaacactggcccgcagctttctgacagggcactggcctactgtggcacctactacaatgcaccacactggagtcacacagaagaaagaattctactatcgaccactgttaaaactcacagggttacagtagaggcaaaccactattatcggccacattagccccccgatcttgtgactggccctactacagctacacgaa

SEQ ID NO: 36381 - DNA, 520 bp, Oryza sativa
  unsure (1)..(520): unsure at all n locations
cgggcnnnnnnnnnattagatacactnnnnnnnnnnnnnnnnnnnnnnnnnnnnnnnnnnnnnnnnnnnnnnnnnnnnnnnnnnnnnnncgttatcatctgtgtgattctgtttgaaactctgaactcatgatcatgtcagttattttcagaattgaagattagttgctacttactatactccatgttgtgtgctgcaggaatgggtgtatttccttaacagaggatcggagatagaagtagcttacagcgtcaggagtgaaactgaatcgtctcgtccaatctgcatgatcattgcgcgaggtaagaaaggttcagatatatgaacaagtgtgtttaagtgtgattttttcatatcagtaacagagtttcactgacaccattaaaattcttgcgtgttggtgcttcactgcttcataggcaaagaaagcttcttgcaatgggctgagaatccatcagcaaatgagaccacattatcttggcacttggtgcacggtaagcatgatctcattgactaagaa

SEQ ID NO: 36382 - DNA, 999 bp, Oryza sativa
ttttactcatgattgaatttgcgagtaaaatttttattgtttggtgacatgaataaatcttagacgttcatatttaaattcaaaggcagttttctagatttcgaatatatatatatatatatatatatatatatatatgtgtgtgtgtgtgtgtatggtttgcactatatattttcccattgacattcgttgtagccgttggtaaaaaaaaaaaaaacagtattatagaccagtcaagggacccagtggagtcaggtctaagttgtcgatcggtccggcgcgacggcggctgacgcgagaagattttttgaaggaaggagaaaaaaaaacgaagagagggtgttgtacgcggacgactcaatcggttagctcgcttcgtcgtccaccgtctccctcggtcaccgtcgccgcgcacgactcccatccatggcgatcgagctctgcccatttaagcccggggcgcctctcttcgaggacttgcaaacgcttgctgcaaggattggatcctctggcttctgttgatttggggagcttttcatcgtctcgaccgaacggccagccgccgagatcgaggaaggaggagatcgaagggcagagtgatttggcagcggtggacatggatgtgaggtttgggcccgaggagcagatcgtgtggccggcttctgttcttgctgggatcctcatgtgcgcagcggtaagttgttccatcgatctcttccattgcttagctagatacgagagtgcattcccagtaagtcctactttgatttgtagaggaaacataagatacttagaggatttcaatattgtacaaaagaaattgaagaaattcctatgaaggcctttgaaatcaatcttttttaaaaaaaaaaatcctacgaaatggacaatattatagagatttagaaaaattaaaaagagctccaacttttttgaaaatttcctttgactatatttcttttatctcctactgcctaatcaaacaacctgttttgcaat

SEQ ID NO: 36383 - DNA, 1030 bp, Oryza sativa
tttatcagttttaccgaatttttacaattgggccaaatagcatttcgtgatttttcaaccttcatttttatcagcataatcaccatattaaactaatgccaatttcaaatctcaatgtcaaccacttgtttcatccaactcaatattacataaaagttcaatatctcatacagcacaaccaaaagagccaattcatatgaactcacaaatttcttaacatgttacagtaaaaaagtaataaaattacatccaagattcccaataattctagtattaactcattgtaaaaagattagttcagtaaacaaaatagtttagctcacacaatcatgcacaaattcaggaacacattcaagatatgttttaaactcaagactatctcagttcaatgtttctctcatcatcagacaacaaaatgaagatttcagataatagatcattgttgatttgttcaatgtctcaaaatagaatataatgaaactagttacagtgaacttgtattacaaatatatagagtgaacactacaatttcaattgaaaatacatgtaactacaaagaaacaatgtaaaattcatatgaaatcatgatctaatgcagtttcaatctcaatttcaagatgatttcagatttttcgagcaaaaaacagggtatcaaatacttcaaaagtagtacatatgtaaaaaccaaaacaaatcatatctaattgaaatagaaagaaatagaaaagaaaaagtgccatcagatattataagaaaaagtgccatcagatagtttgttccataagtaaattttaactggaattacagtagcattatactcaaattgaaatacttatttactgtaatactacttatggaacatactcatacaggtttgaaaaacatttaaagactatcttgaatatttctttacaggtgtcatacaaaaggacaaagaatgcaaaagttctaaggaaatagaaggaaaaaatataggtaaacaagagttacagtaaattttaactggaattatagtagcattacactgtaa

SEQ ID NO: 36384 - DNA, 529 bp, Oryza sativa
  unsure (1)..(529): unsure at all n locations
gagaggagggactcggctttatagtggaggcgaggtcggttcgcgcgggaggtcggttcaaaccgaccttggggcggtcaaggcggcagctggcggtcgtgctcggagctagcggccaagcggcggcagaggcggtcacgggcgtgacgccggctaaggaaaaaggtgaaaagaggagagaaacgagctttgctcccttgctattttgggaggaaggaggatatgagaacgagagagaggagcacgagctctgtctcctggttttggaaggatgcggcatgggggcatcggaaccaggcgatgacagtggcgacgtcggcaaaaggcgagcggggctgggtggctgcgcggcgcaagcgcggcaaggcggacggcggcagcgaccggccggtcggncacgcgcgcgcgcgcgcgggaaagagcgaaagcggtggcgggtttgaacgacaaagtggcggcgcggagcgcgggcgatagagagcgagagaaaaccaaagagagagatctggggagagagagaggcgctttt

SEQ ID NO: 36385 - DNA, 737 bp, Oryza sativa
  unsure (1)..(737): unsure at all n locations
cgcgtgattgaanattgtatctcnnnnnnnnnnnnnnnnnnnnnnnnnnnnnnnnnnnnnnnnnnnnnnnnnnnnnnncatatcatatggaattacaacggggaattgagatacctgttgccatgttcactcctatgattataggatcaactatgaggggcttgtgagtgcttccacataccagtcacgatgcagtaaaatgaatggttaacgcgtcactgcactgtggttcatgatgtatcttgccggcgaaatcctccccaatgtccatatctttaccaccaaaatgctggtacaattgttaggcattagctatgatttcaagagctacacccttcggacttggactggacgccaacaatgtctagtcacgcatgagccatagcttaagagagcaagcacttccgacatgagtaagtgttcacagggacaggactagatgcggtctacacgacccatggcattaaccgcacctgaagaattgtttaagcgagagaactggtcgtcgaatatacagttaaagttgaggttgtgtagtcccacaatccctgttctgagaacgctaaactgtgaccataagacggtataaattctatgcgaatggcccttgaagatcatctaagatcatctctatccgtaggaaactatatatggcactacaaaacattgatgccaaaaggcagagccgatgggcttcagtttatgaaaatggggggcaaatgcatattgaggataac

SEQ ID NO: 36386 - DNA, 531 bp, Oryza sativa
tcaccggtgatgttctggctatcagccatgcctacacaggcaaaaatgcagacaaacacagctagcgccgcaagctgaccagtgccaatctccatgaaccaagagatcccaaatggcttcttgactaaatgaactttagagtccggcaagaatattgtgttctctatgactttactctagcagtcattctcgataatcaagttcccatagttgaaaatgggggaacagagttcgcatgcatcaggtgagataatcatttgcttcagattcctagaaatgaccaccacaagttgcttcaagaaagagatcaatggccgaatctccttctcagcaatcaagaaaccccaaattgttggcaagtagccagttcataatcttgctccacaaaaaagtgcagtttttaccagcgcttgcctaccaactacttgatgaaatgctcaaatgacaaaatggcaagcacagctagccttcagggctgcaaacgcaaatagaaaggggaaaagatgccatcaaagtcataaacgtgctaat

SEQ ID NO: 36387 - DNA, 1814 bp, Oryza sativa
  unsure (1)..(1814): unsure at all n locations
ggttaacaccaacaccaaaggggaacagtgggaatcagggggaaaccctaatcttcaattcaattcattttcttttcaagggggagggactataaaaatatttaaatagagcaggggtgagtacttttgtactcagcaagtcacggaaattagggtgtttaatgcaggttggaagagaggcaaaggtgttttgaaattttttggtttgaaatcatttggaatccataaagtgattattttctttttaagttggggtcaaaaagagacttgcgtctcaaatcgacttaagagatgcttttaaacagctcaattggaaatgtaccgacctcccgggtcagatcattacttctcagctccacaacagcatgtagcatgctaaataggagatggaaatgaacaaaaaaggaaaaaaaacaaaaaggaaagccattggaataatcttgcgcaatcgacggtgcgacacctccacaacagcagcagacaccgagtcggctcgccgaagagcagccttgtcgcctcgctaaatcgccgccgcgtcgccggagacgatgagaacgagacgacgaaatcgtcaacctctccttctataactctctctctctctccgtcggcaaaaggagcacaactagcggagcaaaacaacaacgaatcgagcagcaagctaacaaatgaagctggagaagaatcaaaacatactcaccggagaaaaggaggaggaggagctcgaggacaagatggagaagcccacaccgcaaactctagtggaatcactgccgcgactgtcacatcctgatttttgtttcaggatttataaattatttaataaattattattagaatttatattaaatgttcattaatttacaagtgaagttaaatgtgggaaataaaatttcctaaatataaagcatggatggatttaatttttattaaattctccatgattaagtcaactctctgaaattttctcggatttttcagagctcaattcctaaatgatacaaagaacagttcagtaattatttgatcaataatgatctaattataattgttaagagcttttcttgtttaaaaatccttaaattataaattgttgtttaaaaggaataattagaaatgatcttaaaagagaagatctaatttgctaaatctcaatataaaattgggttagataaaattttgttaaatactttacttgattctatagttcctagatttttctgggatttatttgagccaaggaagtatttttaatcaatggaatatcatttcatgaataatttaaatagaaaaatgtttttaaatcctccttttggctttgggccgaaagccggcccaaaacctctctctttctctctccctccctggcccaagtcggcccgcaaccaagccaccgctctcctctctctctctctcccgctgacaggtgggccccacctgtcgggcccgtcttcctcctcgcgccgctgccggccgaaaccctagccgccgccgctttccaatccggtcgatcctttccgtttccggtgaaatcgtttgaggggaaataatctcctcgatctcctcttccttttctcttatagaaacttcggtcaattacgtttggaaatcgacggatttgagctcgattcggatcgacttttctccggggtcccgnattcctcgagttannggnggtgngtcccaggagntgtcatcacactgggggggggggagggaatagaaacacagaggtagttcatatttaaatatttacaaanancagattgggatacgnagaccattatcacaagtttagtatcagagtacagtcg

SEQ ID NO: 36388 - DNA, 850 bp, Oryza sativa
  unsure (1)..(850): unsure at all n locations
gtgggtcnnnnaggtatagtctcagcnnnnnnnnnnnnnnnnnnnnnnnnnnnnnnnnnnnnnnnnnnnnnnnnnnnnnnnnaatttccctacaaataaaaagagagataaaaatataaggactaaataaaaaaaattgtgaaaaaaataatgattctaaaaaaaatttacctgagcaaagtcaatcactagtttctttgttcctgtaccgagaacagaattgtctggatggaagaaaagacggttgacatattgaatcctaatgttttgaatgtctttttgatagaaatggtttgtcagctgaactcttggaccccatagttccatgtattttagagtaaaaactccgcaatcaaaactaggaaaaagaaaaaggacataagtaaccacagttacttatcataaaaaataaaacaaacaaaaaaaattaaaaaaagctaatgcagttatggtcatactatttactctgtaaatttactaatgaaatctattgcagttctagtccatgttgtactaagaaacaggctcttatcccatctagtaattctgaatgaaacaattgacaaacaggaactaaattttttgaatgataatcataacaaacaaactaaaattgtgcattaacaacaaaacaaacaggttatgcaacaattagaaaaacagaacagtcaagaatttctgaatgaccaacaaaacatacaagattcctgtcaacaagagaacaattgggcatctgtacaactctaacaaaaaaaaaccaattaaaaatattattggacttaaagttacaggtaagaaaaacaacttacagattattttggcgaggtactggtggatatacaattttgaa

SEQ ID NO: 36389 - DNA, 1408 bp, Oryza sativa
gttaggctgcaaaagctgtttgggttgatttgagatgactggtttattaatagtcattcttttagcatgttatatgcttattttggttatggtaagggtcacagcctaggctattggactcattaattaccatgattttctatcctgtttggtgggtcattttatgagattcttactcggattcctatcaaacatgtttatttttggacctttgagtgtttatcactcggcccttcttgtattttttgtccttgatatattcaagttgagaagcagtcggctgggtatcttactaagtaccattcgtgcttcgctataaaaccactcggttcttgactatatgtttagtttttcaactaatcacatactcgggggctacacctaattaggtgcatctactcgatgcaccatgttttattttcgcccttcacagtttttaatttttagcactcggcaagctggagcaagttgaattgaagcactcggactactgtttttttgtttcgagaaggctattttgtcaactgcgaaggtctcgggggctactgtggagattatggataccccatatctacatgacggttgtaatttagtcggatatacggtactaaatatagatggaatatctctatgaagattcgggttaggttctaaacttgtatgtcaaggaaatacccgggatcttagtcggttacgattgtattttatctataatcccatattctattaggatatggactgtattttgtaaagcggactcctttccctatataagagggtccgtgtgcctcttggggggcgattccttttccattttatacaatcaataacacactcggcggaatcatccccggataggagtagggtattacttcttgaataagaaggcctgaacctgtataaaatttcttatctccaaacccatccactttcctagcttgatagccacccccttttattattgtcgaaatcttgcttcgacaaaagtaattaaggccatcgcagaaatatattagtctagcccatgctacattaattgatcacgttggttttacccaacagcacggtatagataaatcataaatggtctatataattatatagattatatgtatgcttgttatctcgttatatttgttcagctaaaagatttctagaaccgccaatcgtaatattatagcatcactggcagaattgaaatattcacccccaaaattttgtttttggcttcttaatctgaaaataggaagtgaaaaaaataatctcttcaagaaaaaactttaatttaatttgaaaaactaaaagtgagctattctgttaaactaccaaaaaaggctcgcttcccctcgtatcagacaatttcagggtagggaactccaaaatcatgcaaaagaataaagtatctggt

SEQ ID NO: 36390 - DNA, 641 bp, Oryza sativa
ttctgtggtttaagtgatgtatatgcaatgtgctatgtgaagtgaatttgtattcaggaaaaacaatgcagaaaaaaaatgtgatgtttcagatgggaaaaaaaaaggggttttgggcccccaaaaaaatttggggtttggggccaaaaatttggggttgggcccttgggtggagaattaaaggcaatggttatatttcaattctgaattttggatgaagtttttaactttcttatgtttgcaatgaacaaataatgtgcatatccatcagtctctgttgaatctgttcagttacacatgcatggctcagaataatacacgtgcacatcaaacagtagaacttcttcaaagttcagacaaaatgacagtagagcattgcaaaatttaaacagaatgagaaattgaagctataatcagtaattgcattctgagaatatgtagccagaacaggaagatgtagttaatgcctggattcagtttggcattacaaaataaaagatgccagccatttcttcgataattataaaaggagacatggtagccataatcagattgacactatcatttgtcattacaaaagaaagtactgatagctttttagcctaggttttaagcaggtttatcagcaattctacttttgg

SEQ ID NO: 36391 - DNA, 630 bp, Oryza sativa
cggccgaaattttcaaataactgccccctaattatatgctaatcacatggtggtgcattaattaagcggcagcatgctaattacacaatggtacacgagtgtgttgcggcgcgccctcgctgaagatttttcggaatgcatttgcaccctcacgaccagcgagttcttgcatactagcctcacccgtgatatagtgcatgtgcagaataggatagaataaaagggagatgcatttcacgattctattactgcctctctttttttaattcaagctgcacatgactaaaaaccaatgcagccattaacggaaggtagaaaacatctgcagtatgttccaatgaagcccacagcagataataaacaatgattcaaagcaatgaattccacaagatcgaaaatattttcatgtccctgaccgcctgctggagaattctaaaatggtgtggtggggttttgaaacccaattttcttttccaaaagggggaaattaaaaaaaaaaatttggggaaaaccccaaaagggttttccccccccctttttttctttactccttttatggagctggtggttgtgatgatgtgttctgacatgcctctttactcctttttatggagctggtggttgtgatga

SEQ ID NO: 36392 - DNA, 593 bp, Oryza sativa
tttgtcttcctaattagcaaagattactgctatgatggctgtcaccaaaaccctaaataatcaacaaaattcgaccacagcttccacactcgaaatcatcaaataaatagaccacagctagcataactaccacccatctgcaatcaaccaaaaaaaagctcaaattttgggtccattgtacataccgtacaccggcggcggctctcctgttagccggaacaacatgcctcctcgccggcttcaacacctccgggaggccagtgtctctgcaccctccccgcaacctctcaatccctatctcaccagtgatcacagcccgcaatttctccggcgatcgcctctgcttcgctgtccaggggagaagagagtagagaagagagggctaaggtttggagaattcgagggaactgaggggcttagatttaaaaagtgcacggtgcggggcggtgcggtgtggcatcacacgtgtcgcaacacgttgctgtccacgtatgcacgaaacgggtcaaagcgttctctagaccggattgatacaataaaacaagattagtgaccttgaccccgtgtttgtaagttcatggacctggatgaaa

SEQ ID NO: 36393 - DNA, 533 bp, Oryza sativa
ctcttccgacaagccggccggcgggctggggcaaaggcccgccggggcgaggcgggagaggaggatgaggcggacgacgaggcggcggctgcgatgcgggagaaggcgagggcggcagcggctgcgacgacgagacggcggctgcgatgcaggagaagactacggctatggcgacggcggctgcgatgcgggataaggcgagggcgataaaaactttctagattataacattttctaaacaacaaatattaataacacctaaatttagcaaatcattcaatgaggggaaaaaaaatcagaaaatcaaccatcagccaaaattagcatgtggcttgcctcccccacctccattccccaccaccaccttcctctctccatgcagcaccccccacctcctcgcctcccacacatcgctcccgcgcattcccaccgcccgcctccctccctccatctgccgccgaggagttccccgatcgcgcgcgcgcgtagcgtagcgtagcctaggcggcggcggccggggccggaggggggga

SEQ ID NO: 36394 - DNA, 682 bp, Oryza sativa
attcctgcagccccaggcgccaaaactttcacactcctcgttgtgtggcgaggttgaggaatctgatgtgtctgatttatcttttgtactccaaatatccgatgacattgaatctttgtccctatctgagccaacattgtcagctagttcttcctcgagaattttcagtgccgcagtagcatccaccggcctccaggttgaaccagtgagcttttctgcccaggcatcatcaatctcctccggcaccacatcattcaaccggggaggtagtacacccacatgttcctccattgcatgatgtacatgtgattcagcatcagcaaaatgctcctcacaccggccacataccaaaaactcccattttccactcctagtggcaaaccttatcgcctcgttaagcacatcagataccaaactggcagcatctttctccttatgcatcgcagtagcgtagtgtgacttgagctcagaaatactggtgcttaagaatgcaagcctccgatccatgggcactgtggcccagaactcacgcacctgattcatgcgaccggacactggcgaagctgctgccttcctggacccacccttcctccggtcagccggcgatgcccagacactgatgactgacacgacgaggagggggcctcatcccccggtgactgtgattgggaggtggatgatg

SEQ ID NO: 36395 - DNA, 611 bp, Oryza sativa
gtagtaaataaagataaagattagatatccaagggataattgttatttgatgaaattactatcatggcttggttggagagttaaaacttactaaaaggtatgggataaatttggttactattttatcataatatccgataacatgaacataatattttgttagcgcttaccatctatcaggcggatctacagtgttaccactggtgtcagaagacagcgatgacattcgacaaaagctatgtttaaattgcttgtctatatattataacactatattctaaatataattagcatgctatgataacgatagacacgttaggactctagatccaccactacatctatgtgaccttctgtataatttgcgttgatgattgctttgtgcataaaaaccatcaatgataattatagagaaggtcacgatggttttgttgtgaaattcttgaagaaatcatatatggtttgttgataacgtgaaatcaggctgggtctgctgaattttattgagttcccatatccagattggcccttttcaacttcctcaattttccccatcaattggtttggtttggtttaatgaagcgggtaatctccactcggcccagggggga

SEQ ID NO: 36396 - DNA, 601 bp, Oryza sativa
ggcgaattcgagctcggtacccaaccaatcatgtgcatcttgattgagagaacccttttcttccatattgggcacccactctatacctgacctagacctagcacatgcccagagctggtttttcagattttcacctttgaagtgaacttgaaagttggagtagaggtgtctaacacaaaacctgtgttctgagtctagaaaaatttgctgcacagctggaatcaaaccctgcaatcaagcacaaaccaagaacaacaattaacacaaaacagtttggtgacatttagaagaaataaatcaagagcttagagaactaccttctgcttgtctatcattattgtccaaggataagtattatcaatgcctagatcttccttcagggtctgtagaaaccacctccaagagcttagagattcagtctcaacaacagctaatggtataggatatacgcaatcatttggatcaattccaacagctgtcaaaatctaaccaccaaattttgtctttatgtggcacccatccaaacaaataaaaggtctgcagcactttaagaacccttttttgcatgcgtcaagtgacatatacaaagggattcttcaaa

SEQ ID NO: 36397 - DNA, 605 bp, Oryza sativa
aaaacctgtccacagcctgtccaacatagagttgatgcgttcttttgagcttcaatgattgattctcttaatttgcagacgaaggcactaaaaattgaaattaaacacaagcaaagaaaagatggattacctgcactccgagcttatctattcccactcatttctactaaagatctttctactatgttctctctattggcatccaaaaatatttctatgtattttgccactcttacattagtatccttttgccatctccattcgggtgatgattggttgacttccattgttgggccccatcgtttcgcttttttttctagtaagccaaaacggcttattagaaaataaaaatgaatttataggtaaaacttttatatatatgttcttgtgacttaaaagtcaatgctgaaagaaactacgttgaaaatatcttaaaataaatttcaaaattaagtttgaaaattcaaattttaggttttttctttggcttattaggccatccgatgagagccgttgcctccaaaggccatttgttcttgtacatgtgcaaaattaacacaacacatatggaaaaggttagatatcatcattgaaatgttcttaaa

SEQ ID NO: 36398 - DNA, 560 bp, Oryza sativa
actatagggcgaattcgagctcggtaccctgtagcaatgctactgatgggagtagacattgctggtacatggtttggacagcaaacgtgccctagaaagttagagtgttcgcctaccgcatcgcacgagacaatctccctacttaggccaataagtttcaaaggcaattagtgacataagaaaagtgcacgatttgtggatttgaaattgagaattttcacacaatggttagatgtacaaaaagcgaaagctctgcgacatgctctgtgcaggatttgggctctcctaggggaaagctcttttaatttttttggcgtgattgctggaaaggttgtctatccttttatccttcttagctctgtaccaactaactcttgtcatatccttgtgctgttttggggagcttatagtatttacgtaatgatattgtccatggcaaaggtaggagatgtggcaagatctgcaatgttcttacagagttaccatgactcttttgcacaagccgtggtacaagaacctggtaaaaaggtaaggcagttttgagtgcagtataaattaat

SEQ ID NO: 36399 - DNA, 743 bp, Oryza sativa
agagaaaaaaaaaggaaaaaacccaaacataaagagaaccaaaaaaagcgggagaaaacgagaaacaaaaaaacggaaaaaccctcccgcgcggcgcgccgtccgccgccccctctccgcacgtgacacgtgtccaatcgcgcgcgatagggcgcgtgtgactggccgcaatcagcgtttttgcacgcacaagtgatcttagagggtgtttggatacagagactagactttaatccctaccacatcggatgtttgacactaattacaaaactaattgcacagatggagactaatttatgatacgaatatattaaatctaattaatctataattaacacatatttactttatcactatattagtatcaaattagcccttatagtactagaaagggaaaattacaaaaaccaccccaaatatcactctaggtttgagatgcctccctgtaagaagaagatttgttgtaaattcccacctcctaatttaccttggcttgatttaggcaccttctctctacacatgcgtgattcccggagcatctcgtggcgaaattatccaagttcggctcgtcgtgattagggatggcaacgggtgcatacccatcgggttcccttgccccatacctacacccgcgacgtctaaatattcccacttaaatacccacacccatcacgggtagaaaatcttccccatacccatacccgtgcgggtaacgggtatccaacgggtaggggatcctctag

SEQ ID NO: 36400 - DNA, 656 bp, Oryza sativa
cacatgagcatgcatggaattttttttccaatttttttaataagaaaaaggccacatgacctgcttttatagaaagctagcccagcatggcaaccggacaactggctttaccctaatacacagttgcacccacttcatttaccattactggttgtgccctgattatttgccactggcggtgattttgggtatgtttggatccttcgcccagctagcctagctcagaaataggcatgaaaatggatcgaatgcggtcggaaactagctctattatcatatttgttttcataatttttttcgaaatcggaaatccatatatgaaaacgaaatcgaatattatctcactcatacgaagcgaaacaaataacaaataaggtgacgagtattaatcggaatataaaaacccctcactactacacaaacgatttttgtgtacgagacgctatgatttttgcaaacggaccataatttgccgcgtcggtattttcgcatatgactccttaagacgccaaaatgagctcatttttacatgtggatcacttcacatggaaaaattattttttctatacggacgtcttaaggagccgtatatgaaaataaaatttaaaaatttaaaactagtttatctcactcatatgaactccaaattagatgat

SEQ ID NO: 36401 - DNA, 1606 bp, Oryza sativa
tggtacgctctctctccttttgggatcctcatagtatagtgtgttgcactgtgggtatccgaaaagtgatgaaataaacatgagtaaaacagatactgattctaagattaaattttaaatttcaaattctattacgggtacgttataagtcgattataagccgctcgatactgcagattcgaactaaacgaactctaagtattgtaagttaaaagattattggctaattcattcattatttttacaagaagcaagacactcattcaaatagtactagactggctccaaatctcaaataatcgtttggaggatgtggagttgaagcaaacgtttcgtgatccgataaaaagcacagaaatttaaaaaaaattgtagatgtggtgctgcctttcgctcgtagaaattcctaacttctcttcaaacaaagcgatgaattagcgtataattaattaaaaagaaaataaacactagactaatataaggccccctttaaataaaaggaattatgaaggaatttcataggattgaaatcctataggaaattttcctatgtagcaagattgaagttttctaaatcctacaaaatttctatggaatggcttattgcatacaggttttggaggaaacttaacaagagatccaacctcttcgtaaaaatcctttgagtttatctctctcatccgattcatgtatttttcctgtagtccaatcaaacgatcattcttatgtttgtcctgtgttttgcaatcctctgttttacccttacattcatgtcataattctatgtttttcctattccaccgtttttttattcctacgattcaaaggggccctaagtttgaaaacaattttcctatatatatattttttaaaaaaacatagtttcagggaatgcacgcgtaaaataagtatagagaaattagaaagacgaacaaataaacacaccctaaacccaattgcatagttgtactctctcacgagttttttttatggaaattgctatgcatacgaccaatgcgtacgacccacatccgactcaactaggacatagacacatttactatttttttatcccatatagaaggaagctaagtgcaaggattggtggatgaggtgtgattggatgctcgttgtacgcactggtcgaatgtatagtaggactctttttttaatgcccatttgttacggctcctactcgagcatagctgagaagtgactggaacaatgttcattgtgcttatttgaatctgattacaaagattttatatcggtttttgttattaaacaatgtgtttcatttaaacatttctatatataaatttattttataatattaaataattttattttccaagtttacaataactaaaactcaataatcccacccttttctcgttttgcgtgcacgggtttaatcctcatcttcagccaaatctaacgagagtgtacactaatttcttttaatgaaacgacaaaccattggcactgcaattagtgctttactccttagggcaagtactacgagcatccaagcacaagccctaagatgccacataggactaaatagtgaggtggaggagagaagaaggatgagagagaaatagtc

SEQ ID NO: 36402 - DNA, 663 bp, Oryza sativa
gtaggaaaaagaaagaactaggaagaagcatggatatgatattggtgaaaattgtccatccacatgaaaacaaaattcctaaggggtaattatgattgtcctttgtttaaacatgcaagatataggtattttggtagcgacctaacgaatagtataattttagtacgagatttcttatacttttacattagcgtccaaaagttaatgttgaaaaaattaattctaaagttatgttctaaatttcaaatttgactacactcaaataagcaagatcctgtgataaggaaaaggtaaatttaagaaaaccatgttgtactcctattgtgaccctattaagaccgtttgtgatacagcgtgtgtcctctcattcaaatttcccttcacatcagcgtcagtcatgcctgtgaccctcttaagaccgtttgtgatacagcatgtgtcctctcattcaaacttcccttcacatcagcgtcagtcatacctccctgaagagggtctcagtcaaaacacacgatcaactccaccttttgttccttttgtacacctatacgtatgtatatattttgcatgcaaatgtataaactttatatgtgtatataaagtttatatataaacatatgtataccaagtacgcacacataaagtgtatttatgtatgaactt

SEQ ID NO: 36403 - DNA, 547 bp, Oryza sativa
agatgcaatatttcatcaaaccactcttcctacgttgatgaggctattgcaactatggcacatggggagcttaagaagaaagtattgcctagtgtcacaccatcttcaccaaatcccacatatgtagttgcacaaagtaaaaagatcagggagtgcttcaattgtggtgagatgggacaccttatgcgtgattgtcgtgctccacacaagcctagttatgggagaggaagatatggtgataagggcggggcaagaggtggaagaggtcatgcgggtagaggtaacagaggtagaggctatgagtatagaggtgatcacaaagctaatgtagtcactcttgaagagggttcttctagacctacaaatgttgatgttgccaaccttgttcattccacttcacataactcaaaccaagcatttatgtccatcaatagatctctttcaaattggatactagactcgggtgtatccagacatgtcacgggtatgtgtggagaatttgcatcatataaaccatacccatttacatgaaaagaaagaattcaaa

SEQ ID NO: 36404 - DNA, 530 bp, Oryza sativa
taggacctctggttcaacatgccgcaacatatcttgcagatcaaaatcaatatctgcatcgtctatactagagtcaccgcattccgggatggttccctgggacatgtcttcgattataatattttacgcatcaccaaagcagaaatcatcagcctcttcgatacgaccaccgacttccccgtgaaaagtctatatctcgtagagagaatcccttatatgccactagaattcgaccagctcccttatatgccactcaaaattagcttctcccttatatgccactagatcaagattttccacccttttatgccactcctaccactatagtgttagttgactgttagtcaaaggttagtttttttcgtaaatgactaatatgccctctcaactaaaaaatgtgtaaacttcaaaaaaatcataactaatttattttaaatcctctgtgagtgaacaaaattttgtcaggaccagtgaaaaatgctctttatattaaaaatattggtggaaaactgcatggttcatacttacat

SEQ ID NO: 36405 - DNA, 1130 bp, Oryza sativa
gcgcctgacccacgtcgacgagccgcaccggggtgaagagaaagaccgggtgataagagagataagggagagagagcgcgcgctacacactgacaagtgggtcccaccacgttgagtcagcttgtcagccgggtcaacaatgccacatcggatgaaaccgccagcagaaccaccgagggaggtgatttgctctggttttcagagatgaagaaggcgttatatccggttttccgattgagggatgttattcacgcaaacgcaagagatgagggaggcaaaatggacttattcctaccaggaaaaagtacataaggtccctcatcgggtcaccaaatcaattataaaatcgtccctaaaccagaacatcatatatatagtatcccccaacttacaaaacagctaattttaggtcgttaggcagtattgactctggttgactcgggttttatccgacatggcaactgagtcagtgttggatctacatgggcttcacatgttagccttaggcggttttgctgctgcaaccgaatccaattattcaatggcaattgcatcaggggcagctttctcggtgaggccgtgcgtcgcgtctgcgtcagccgctggtgcctcgagggccgggcaattgggaacagcggctacggaggaggtgggaagtggtgggtgccactgctggggtggtcggaacatcggtgttggcgatggatgagcggcgggaggcgatggtggagtggtacatgcagtcgtggaagctccgccgcggcaaagaagaacgacagccccgctgctccgccatcaacgaccgcgcctcctccatcggatgcgctacctcattttttcttcctcctcctccattgatttttcttcctcctctctatatcctgtcagaggaagacaggcggcggcagcggtggcggcgagggtagtcagagaaggggcgccggctgggtacctactccgcccaagccatggtggaggaaagtcgaataggccgcccttgtggtgtggcacgtggaccgacgccgagaggatgggcgacgatggtgcagcgcgccagctttttcacaccacacggggtcgcatgctactgctgctgcaagctacaagagtcagcagacgcaacgaagaaa

SEQ ID NO: 36406 - DNA, 577 bp, Oryza sativa
cagcaaactagccccccacctgttttcttgcaacggcaacagccaaagctcgccaaatcctagggccacactcctatgcttcttcaaccagtgcgccttgttgcatgcgctagcttccacatgtcctgctccctctggtcacagtgagcccgtgagtccctgtattgccttcctgaccgccgtctcatgcagtgcgtttgagtccctctcaagaagctggtacagcgtgagtccgtcgtcccggcccttcaccgttggctaccgagcatgagccatcggccttccatcgcatccacgacgacggtgcgccacactcgtgttaggcagtgtgtgtgttgtggcccaaaaggcccatgtctcgatctgcctgcatatgtatgaagtaagcaattgacagagggtgtgaagcttcaagagaatcaatcacaaatgtctgcatggcatcagagctgggtcgccagcgaccgcgtcgacactaaaccttagctgccgtcggttatggccagataagcggggcgcacagacggtgtacttaggggtggccagaaaaagaccgggtaccgagctcgaattcggc

SEQ ID NO: 36407 - DNA, 1823 bp, Oryza sativa
accctaagggatcaaactaattttcagtggcatataaaggattctctctatcaagaagggagtataacgaattctgatcagcagatcagaggtctatcaatactactactccatcccagaaaaaacgaattcctagctatgaatctaaacacatatgtgtctaggttcgtaggtaggattggtctttttttttttaagacggaggggatacttttttttgtttttttctcgaaggtcatgctcagacaagaaagggcacgtttggatcctaggtaagggccaccctagccttgcctggcagggctatccgtttggaacttgctccctccgtccttaaaaaaaaaagacaaaccctgattttcgtgcccaacgtttgaccgtccgtcttatttgaaaaaattatgaaaaaaattaaaaagacaagtcacgcataaaatattaatcatattttatcatctaataacaatgaaaatacgaattataaaaaaatttcatataagacggacagtcaaagttggacacggaaacccagggtttgccttttttttttttgagacggagagagtagtaaaacagcctggcttttaggggcgagttagctctgcagggcgagaaaaaccttgctggctagggagagccgatttggctcgctttcgatggaaaatttcactcgcgcgaaaatattgtctgcgggcgacgcggacttctccggaatcgctgatattctctccccaatcaggagacgaactcattggcagcagctcggtctggaggcgatctcatcaacgtagactcctatatttgatttctcctttaggtgtgtttagttcacgccaaagttgaaagtttagttgaaattagaacgatgtgatggaaaagttaaaagtttatgtgtgtagaaaaattttgatgcgatgcaaaagttagaagtttaaagaaaaaatttagaactaaactcggcctttatcgtcagcttctaaccccttctttctcagatacatggtgtgctgtcttgttcaatcgctctgtcaggaagtaggtagagttagaaaagaggatccccgatatcgtttgctttgtgctagatgcagcctttgcgttgccaagatcatttattatgatggtacttgattaaggaattctcttgatttctcatttgtgaatcctaaaatatggttgcacatagctttgaggtacttatagactactagcaaaagaatggctatggaaaaaaaaaccattgcaagattattaacatgaccagtgccttataatttttagacaaaaaaaggaagcaaaataatcatgggcaaagcaagaatttgtgaaggatccaaactgctagccacggcaagactagtaagctggcaataagatggcttagccatgctgagtagggttgaaagtgatttagataattttcgcccgaccggacctttttttttggattcggatagtttcgatcggatatatccggaaattttcgaattcggaatttttttaaatatgaaaacgaatatgatataggttatatccgtcagaatcagatatctgtcggatattatccggtattttccatcggatatccgacttacacataagtctgccatagcccataacccatcccaactaaagaggacgcaaatcaaacttcttggcaaaactgaatttcgaattgaattttatgatactaaatgaactcatatgaaaattgtcaaaaacaaagttgcagaactcattaagatctactaattttattttggtcatttctctatccgagtttcattgaactatataaaatttgaattttaaaatataataaa

SEQ ID NO: 36408 - DNA, 1130 bp, Oryza sativa
ataaaaaataattcccacctaaaagagtaatttatctagggactacaactcctacctttttcatgtcatccaaattgccatacaaaattgtgaaataattaaacaactatgttgcatcattatatattatttggttagcatgcatagctaaattggatctataacatgtaagtgaaaaagaacaaatttaacaatgaataacataccaattatgagaaaatagattgtacctttagtcggatgtaacaatatccaattacctatgtcttttggaaatgtgctcaactgacgaaacaaattaaatcggctgatttttaacgtaagcgctataaaatatattatacattgccattaatttaaggactcagagagttttttaacacaagttttagtacattttggatggaaacagatgaatgttgatatatatggcttccatacctttcatatataaatataaatttgtctattttatacatgtagacagttaaaaatatgaatatatatatatatatatatatatatatatatatatatatatatatatatattaaatttgtttgatgctccatggtgcccatgctccaattatatccaccattcagctgctttaggatttgtgcactcaaaacacaacgtttgaatctgttagcgggtttaacccgataaaagatattcaatagctggtttgtgccatctttccatttatttatccctgcatgatttgcatgtatccatttccatataattatatttatatatatatatatatatatatatatatatatatatatatatatgaacattaataggctacaaacacgttcattcttcgtacacatgcagaagcaacattaaaatccatgtagacattacgatatactaaaatataaataaattttatgattagttacttaaaaatacaagcaacgctatactggatcgcgtgacaactccgataaaattgcagccatatataggacacatacaacgacatttttggactttagaaaataaagattttccttacataagcaacgcctgcccacttgagagatggtcagatggggaaatttgagtctagattcaagacacaaaacaagatgagcctcgcggacacgcccacgccg

SEQ ID NO: 36409 - DNA, 594 bp, Oryza sativa
tgttgaatgaacgggcagaagaaaaagagatgctctcttgtctctctgatattattcaagcataattaacaagtgaggtcatcgttttcctttgcacaatctcgtctatccaacatatctcttgtgttaagtctgtccctaaataaaagccaagcaaaaacttttattttcattacacattttgttttccagatccagacaaaaggccttggcacatgcacatttgagtatgtgagcttataaaacctcttagctatgtatttatcagagttccagatgaaagaccattcatcaccattaccgttctgcaaagagagagaggaccattcctcctctagaacattgaattctccataagcttggggtgctcaatggcagtaagaaacaatcctcaagaggagtagaacccatttgcttaacagagataagtttatctaaagcaaccatatataaagatggaaaagcattgcttcttatcttatcattccaaatgtcatcccagaaaagagctgaagatccagtcctgatatggcagtttgagattcccctaaagacatcagatagagccactatatccctccaccaaaaagatcc

SEQ ID NO: 36410 - DNA, 634 bp, Oryza sativa
tccccgtcggggaatagcacaaatgaaatgttgccgagagagttttttttttttcatgcgatctcccgagaaaaaaaaagaaaaaaaaaacgtctttgctttcgtcgtccgttcgtgtccgttccggcgtgcgaaaaaaaatctggggatggcaccgcggaaacgtcgccccgggctgggcgtttttgtcgtggaaaacgtacgctctcgctcgcggcgacgcgacggctcggctgcaaatatccacagtagcatgcattcattctgcaaatgggagtagcgtgtgtgtgtgtgtgtgttttttgtgacgctgcgtcgttctggctgggatgaacaaatatccgagattcttttgcaatggtggcagtgactgactgactgactgactatgttagttgaagacgttgctgctagggagagagcattggaaaccatggaaaaggggcgtctgtttgttgtgttttcgcggaattggtggttttcacattgttttaaaggtgtcatggagtgggaacatacttgtatgagttattgatgtgtagggggtgtttggcataactcgagatctaaagagtttttaactatgaatacaaatcaatagatctggatctacaattatatgaatactttttga

SEQ ID NO: 36411 - DNA, 1239 bp, Oryza sativa
caggtacgggctcaggtagctcatgttcaggctctcacctgcacgtaacgtttggtgcatacacattgcaaaccaagtataattaattatacacaagcttaaaaaaaaaacataacgcgtgttccaatatatgctcaaaactacttcaaacatgcatatacttagtatacagcagggttttcaatttccaaataaggtttttgccggtggtgaccaaaatttccaaaatcatcaaaaatttgggttttttttgaccgaaattatttaaaaatttgattaattttgaatgaatttgaataaaatttgaccaaattcacaagaaaggcaaaaaaccgaaaatttcggatgagatatgtgctggtggggggcaaaatttccgaaatttcaatccctggtatagagtggttttccggtttgtgagaggttccgatccaagagccaccaccgtattttctagtgaaaaatttagtacctattaatactcggatactaggaatataaacatattataaatagcagatttttaaaagaatattttagaaagaagataatatgcgtgcacatcttttatataatgagaaaaccgtgtacaatagaatatcgaccaaaaatgtagtgaaatttatcttgcttgttgggtcccttgcaaccaacatgggagtaggaacagttgcatgcatcacctcaagcagaaaacagggcaccagatcagctggctgggaactccacagtacacaaactcaacagacaattttgatggcagcaatcaagcaatacagcaacttgaattgatctagcctagttaacaatgcaacaccggcaggcgtagttgcagccttgcaggaaatagactgccgtcataagcggtgaccatgtaatgtatgcacggttagcatcagttaccctgttaaaaaaaaagaatggattctaatatcttgaggggatattttctcgtgtacttttttttccaaatttgatataaatagtttaaaaaattctaaaaaaaagttgacaatgtagagtagaatgatatctactggtacaccaaaatcaagttcaaatttgctctacacatcgagaacaaaaagacaaatttagatgtgaacaggacactactattcatatgctaaatttatcttttttatatctcaacatgtgagttaagtgtgaacctaagattttgtgaagttgtatagatatgttgtactccctccgtcccataatataagggattttgag

SEQ ID NO: 36412 - DNA, 632 bp, Oryza sativa
atacgttttggtgtggatggtaatactttgtaattagaggggtatttttaaatgtagctaatgatggtttaccttgtttcttggcctgttatttaaggtttagggtacgtgttcatgttgggttcacttatttcgtgccggttagatgtagtaccgcatttgattttttaagtaattttcattttattttaataacgtataagttgttaaaacgtaacgtcaaaaccataaattagatccactttaatttacgaatacaaatacaagctaataacttatcaacttcttacaatctcatcttttcgcttttatttatactaattagtatgtttactaggtgaaaccccgcgcgttactgcgggacttcaatatgataataataagtaaaaataatatgtaatatagctaaacaatataaacttacataagcactaaaatcaatttatgtgatatggcttatttagagaagagagaaataatattaaccaagtgaggatgaacttgtataggtatataagatattataaaaaataatgaaaatatatattgaaatattatgtgaattatgtgggatgatgatttaacatgctttcattttaaaagctctaaaatgtaataaattttaaattaga

SEQ ID NO: 36413 - DNA, 617 bp, Oryza sativa
ctatagggcgaattcgagctcggtacccatgtagcggcaatttaaaattccaatcaaatttgttataaatatcaaataatatttctgaaggaagggttatttgtttttactatgctttacactggtcatctaaacattggtgtttgatgaatatgtgcccatgtaggctcacacgtggcggtaaagcgtccgggttatccgaccagcggagcagctgggcccactgtcagcctcacgagggtgttttcctctctgctaatcgtctgggctggaacaaggctgatggcctgattgattgctgctgttcgagcagcttttgactggacacaggcaaacgttgctgaagagttcaaagatgtgttgtgttttctttttaatttcctgaatagtgaatagtactgtagcatattgatattgatttctacaacccacgcaccagtgctgatttcatgtaacaacaatctgtaatttgtacgtcttttgatttgatgaataataaatttgatgcgtgtttgtttccttcaccttaatatcgacggttgagaaccggttttcttgatcgtccattcaggtcgaaaagtcgaattgatcttgtatttttgtattgcaatatgata

SEQ ID NO: 36414 - DNA, 671 bp, Oryza sativa
aatgtgttgctccttgcaaagttgtcttaataatataataaattatttatttttgtagttggagatatcgagaacactaattagcctagtatacttagcgttttatttaactattatagaaaaacgaaaaaataaattattttgaaagttttaaaatatgagtagaatttgaagctgaaagtttgaaattttgaattgaaaattttaaaatttggctagaggtttttaaagttttgaattaatacttttaattttgagttcaaagttttcaagttagagttgaaagtttcaaatttgaaagttagtcgcacagatcaatttgtgtatgagtaactaacgttggactaagtcaacgcttaatagaagctaaaatttaaattttcaaccttaaatttgaagttaattttagggttttttcatcgaagtttattattcaacctttacttttagattgctaagagcaagtatataaaagttgtatttatgaattatttttcgtttacaaatatgttgttaattagcttattccacaaatagcaaaacaatggggccatacgggcaatactaccaacggactaatcgaattataccgggcggccccaaattttgagaatgggtattcgaaatggaagggggtaaaaaaaaatttacaacacgcgagcataatattt

SEQ ID NO: 36415 - DNA, 540 bp, Oryza sativa
tataattatatgtacctatcacgaataatgagagaacttgcccttttaaagcttagatcacttgaaaaaaagtaatgttgagaactctggattactttgtgccttactggacttgctggacttgtgggaatctactgtactgccacaactatatggaatacgagaaattttttttaaaaaaaaagttcctacattcccgtaaatgaaggaaatgaattcccttgagcaaaggtaggattcacgttcatctaaatacaaacattctagtgttagttcatgaaatttcaatcgtctccaactggcacattggcacatttctatcatgcttactgataataaagtccattgccaccaaaaagatgcatgcctgaactgtcataggctcatagctcctaattagcgataacacaacatggaagaaatctgagcatataatatttacagatggcagcaacagctgctgagatcatgtaagatgtgagaaagatatgaacagattgattcttaacttcttcctggctaacactttagccagatact

SEQ ID NO: 36416 - DNA, 530 bp, Oryza sativa
agaaatataagagtttagatagtaatataatttataaataactaaaattcggacaaaaaagtaagaaacattaaattaagaggccaagtagaacatatttagagattaattaaatttggagtaaaaaataaaataaatttcgaatttaataaataaaaaagttcatgtaggaatacaatttagaaacaactgaaaatcgtaacaaaaaataagaaatattgaaagaatagttcatgttgaacacatacaagattaataaaaatttaaaataaaaaatagaagaaaataataaattagcaaaaaaatataatagttcagctaagaataaaatttttaaataactaaaatttgaataaaaataagaattattgaaataagagaaaatttaaaacacaaacaagattaattaaaagctataataaaaaataaaataaattccgaaactagaagaataatatgagaattaagtagaaatacagtttagaaataactgaaatttaaaataaaaaataaatattgaatgaataatg

SEQ ID NO: 36417 - DNA, 519 bp, Oryza sativa
  unsure (1)..(519): unsure at all n locations
aatttgaaaatccatagttttaacgtttccagataggggtatgaagggatttttcagcatatataatctaaagaattttacgatccttgcattggaagtatcatcactccatctgttgggtcctaagtaattaagtanctgtatttatctgaccaatccaggcaaagaaaaggggaagcaggtggtggtggtgcagtagttccagggacacagaatgcaatccagattgtggcacaagctgctctctgctttgacaatagacaagtaagttccattctcttctcttcactttgaatttcatcatagaacatttctatggatccagagattcttactgaccaaaaactatgcagaatgaaagtgactgagtgcgtggcatgcatactgtgagatcaatgcaaaaggcactcttcagtgaaattatattagttcaaccaattgggatgtataatggccttgaaacattaatttaattagggtgtcactgtgtcactagtgcaaaataagcattgaccttca

SEQ ID NO: 36418 - DNA, 592 bp, Oryza sativa
cacttgatgctagctcaagatcgatcagataaacatcgagatctgatacgcattgaatcatcaatctagcacatcagcatgtaatgcaaaagtacgtgcttcaaactagggtagcccactcatggagaaggttgatgattgtgtatcgggttcgggccgctaggaacatcatgcatgattctgactcgagacgagctaagtggatgatggggaggagggtggtcattgtgtatcgggttcgggccgctaggaacatcatgcatgatcccaacacggttgccgcgagaaccggccgccgccaccaggacgttgccgtcgtcaccatctgccgtgccggagaaggaaggcggtggacgcgctgccgccacggccgccaccgccacggcgaacaccagagccatgaagagaaggcagcgccggcgctgggcgtgggtggtcgccatgagctacgaattcttgaagcttttgttatgatagtggctatatgcttgtgagaatggatgatttgctacggtggaatgccggcccgttatttataggcgggcgtggctgtgggaaggcgtactgattatttgcctacacatggtaagat

SEQ ID NO: 36419 - DNA, 780 bp, Oryza sativa
tcatagtatcattgttaattaatcgttttactttgtgtgaatcaccttgaagtatcatttcttttaaatacatgtatatcaaataagcatcgagtttgtggtggtggtagctagatctagagtcgtggttcacttatccaccctaggggtgaaatcagatggatacggtcagatcatggcatttccgcatcataacccatatttttctttaaattcgaaactaggtatgagtaatgttagataacatatcactcacccagctattatcctatattatttcctctaaattggattcgggaacagatatctatttgtatctctaattcattgatattaaatatagtgatgcaattaaaatgttaaaaaagatacatcaagtaaaatagtgattaatcaatcttttatcatgttttaggtgaatttataatagattttcatatatattttataatatgggacatacaagtggatacaactcttctcctattttaacccttttttttacagattcaggttcgaactcggatagtaccgagtatcctatttactatttcatattcttcccgcaagcctcgggtaaggtgggtggtcggaaatacccatccaattttcacccctaatccacccccaactcgatacatcaaggaaaagaaatatacatattatatgtgaactcgtaaaatagtgattaatcaatcttttatcatgtttgtaggtgaatttatattagattttcatatatattttataatatgggacatacgagtggatacaactctt

SEQ ID NO: 36420 - DNA, 593 bp, Oryza sativa
caaaactataggtttatagttcaaatccctaacactactattttgttggagttacaaaagttttatgttgaaattagtattaaatttatagttttgtgatactatattttaaatttgtacttgcacgataacttgatgctaaacttgtatttttatgatacaccctatcaaatatatagttttaatttaattggatcaaaatagttttatataatttactcaaattataagtttacgatattataaagtatacttaagttttaaggataaatatatgcattatatttgtgtttccaaactacttctaactattttaaaatgcatcaatagtcaaaatttaaaatatttattaaaatttcaaacgacatatctatatacttatgggcagagaccggagagacaattatagacttgcgagtccaacattaccatcaatttttgtaggaggacttagatctatcttgtagtactatgattttcttcttttaaggaaagggggaaaaatgatgtcttaattattcttctcagacacattattattccacctactttggcctaaaaaataccctttgccaaacagaaagcacatcgat

SEQ ID NO: 36421 - DNA, 548 bp, Oryza sativa
tgtgggtgttatgtgatagagccacagatatttacaacatacatgctgctaatcagtggacatctaagttcttgaaaggttggttcctctaccaactggtaatgaagagcttagagttccgcaatacggcagtagtacgagcacttgctttttctctaggggtggagcaactagttaatgggatattgactaatgggactatatttttcttttagcatattcagtggtagaatctatgtttcagtgtcagcaagaaggcatttcaaccatcaataagtttggtgttcgtgattatattttctgatcctatgcataaaaaattgcatatatcagcaagttactgctgcttttctagatctacaacataagattgatgtgatcttgaatgggttgagatgtctttcgattatatatatcagcacattgttgttaccatgtatatggcaaactgtcttgatccattttaaactatcttggctttgtggtttccttttcagggatctagctagtcttgcttccttgttatgtagagttgcttcgtcccttgg

SEQ ID NO: 36422 - DNA, 715 bp, Oryza sativa
tatatatatatatatatatatatatataggacgcccagatagggctccatggtgcccgggcaccactgcatctgccgttggatcacattctcatctagttgatcggtacatgtatatttgattaacgggttcacccgttaagtacatttgatttggaaattgacagcgtgtgcagcatgcaaaatatttagtaacgtctttaatactaggtttggtaattgacagcgtgtgcatgcatgcaaaatatttaggagtatcaatttagcgtatttaatacctttccatcaacagttcacggccgttatttggtttctaaatatttgtcaccataatcatggatttgcggtttatttggcaacaaatataatgcggtttattagggtatatgaaaatctaagtatacttctacgatgtagtatatatggaaatgttatcctgctgttattttgaaaataattatagaaggaaaccgaggtaccctaagtacaccatggacgatgtaattggaatataagtatatatggaggctaagtatatggtatgcttatgtacacctagctaaattagtgcgttttgcactttccagattcagaaaatgtttactcatttatgtaatgtaatggctatgtatacacgggttattttttctatatacttagctaacttgttaagtatacaaagttttaaattacgttaatttaattatattatgaat

SEQ ID NO: 36423 - DNA, 850 bp, Oryza sativa
attatttcctctaaattggattcgggaacagatatctatttgtatctctaattcattgatattaaatatagtgatgcaattaaaatgttaaaaaagatacatcaagtaaaatagtgattaatcaatcttttatcatgttttaggtgaatttataatagattttcatatatattttataatatgggacatacaagtggatacaactcttctcctattttaacccttttttttacagattcaggttcgaactcggatagtaccgagtatcctatttactatttcatattcttcccgcaagcctcgggtaaggtgggtggtcggaaatacccatccaattttcacccctaatccacccccaactcgatacatcaaggaaaagaaatatacatattatatgtgaactcgtaaaatagtgattaatcaatcttttatcatgtttgtaggtgaatttatattagattttcatatatattttataatatgggacatacgagtggatacaactcttctcctattttaacccaattttttttacaaattcgggttcaaacttggatagtaccgagtatcctattttctatctcatattcttcccgcaagcctcaagtaaggtgggtggtcggaaatacctatccaattttcacccctaatccaccccgcaactccaccaaccacctacatttatgcacacacagtgctctttcaacggtaaggactcctttaggttgaagggattttcattaaaggaaatctagatgaatccaatcaatgacaaaatatctatataagtcatttggtgtgtaggattacttcaaaggaaaaacctataaaaagaaagttccttcacatt

SEQ ID NO: 36424 - DNA, 732 bp, Oryza sativa
ctgcagcccggcatccttggtcgggtaggaatttcatggttatttccagggattttggccctctttgtttaggcttaggcttattggcctagacttttaagtcagtttattgacttatatgatttataagccagtggatttaatgtcctaagtttagtggtggagtcatacatctatctcatataagccaaaaaaagcttctccaacctagcttttggcttaatagtgttagagtggcttatggcttcaaaaaagccaaatgaaaaagctgcttgtttgttttggcttaaactttttgacttataagttggcttataagcctaaacaaagagagcctttacatcaaggagctcatttttcatacaaatcaaggaaaaaaactcatgtgtaccaaaggaagcttatgtttgagttcaaattggtccaactacactgatggggttgaaagaggtcaaaggccctcaatggtttagctggctgcggctgttgctgttctgtagctgaagtaaccagcaatagagctctattgtggttgtgcagctgcaggtaggtaagttgagtactacccccaaacgaggaagcaacatagtagaagttagacggagatgataagtgaggacatctgcttagtagtgcccaactagtggtggatactaccaagcttggaggaaataaatctcgagttccttatgtttttaaacatagggaagagaaaggagaaataagacatct

SEQ ID NO: 36425 - DNA, 502 bp, Oryza sativa
cagctcatgtgaggtttaatatctccaaaggattctccattattctcgtcaacttgaaatctcacagcaagcaatattttttgctcatgaagtaaaaaacaaattattggtgtaccatcgatgtcagttgccaagaaaacctgtaggaaattggagtcatttccaaaacatatcaaagaaaatgatggtggtaaaataattgcaaagtatgaacaagtaaagggaaacaatcccatacaaaaaagggaaacaacagagacagatataaattatgtttaaacggagtttgattatcttattacgcaaatttcataggggtacactagcgtcaggctcatggaaggcctctaagtcatcatgaacactccctacaaaaaaaaaaagtaaagcttcactaatgcccatttggtaaagtccttcaactggcacggagcacatttgacaattgcagaagagagggggaaaggatcaccattgtcctattgtacctagaattcatcta

SEQ ID NO: 36426 - DNA, 511 bp, Oryza sativa
cgggatatagattaggaagaaaaggacaaacaagatggcacttcccatatggaaaaaagcccttcgtgtctcaatttataaaaggggaattcaaagtagcggcaagaaggtccacatttattcgttctatcgaaaactgaaaccacgacggtccagctttaatttgcgtagcagataaaactgaaacatccatcgattgtactactactacaagtttggtgggcagagagagcacctctaatcaattaatttacatttgggcattatatacatatatttgtttacggctgggcgcactattactatcattagtcaatcagatagatgctcgatgtggacaaatttgcgagaacgctgcgagtgagatggctatcgttcagctgagagagctcaaacaaaccttgagcagggacatccccaccttgtgatgagctggatagaaaactattcggatcagcgaccaaggtatcaataggagacggacacaaagtgagcttttgagaatcaaact

SEQ ID NO: 36427 - DNA, 657 bp, Oryza sativa
tggtcggaaatacccatccaattttcacccctaatccaccccccaactcgatacatcaagaaaaagaaatatccatataatatgtgaactcgtaaaatagtgattaatcaatcttttatcatgtttgtaggtgaattgatattagattttcatatatattttataatatgggacatacgagtggatacaactcttctcctattttaacccaattttttttacaaattcgggttcaaacttggatagtaccgagtatcctattttctatctcatattcttcccgcaagcctcaagtaaggtgggtggtcggaaatacctatccaattttcacccctaatccaccccgcaactccaccaaccacttacatttatgcacacacagtgctctttcaacggtaaggactcctttaggttgaagggattttcattaaaggaaatctagatgaatccaatcaatgacaaaatatctatataagtcatttggtgtgtaggattacttcaaaggaaaaacgtataaaaggaaagttccttcacattttgaggaattttagcatgatgtctaacctcatttttcaaattcctttgggacttccaatgcatcctctctctttctctttctctttctattttctctctaacatgtcaacatataattct

SEQ ID NO: 36428 - DNA, 537 bp, Oryza sativa
cgtttatgagttctaaagtcaaatatgaattatatgatccatcgtataaaagtctcgtagtcacatatgtcaagcattttcttaattttgctatagaagtaactcaaaatagttaatggtgtggttttataaaactataaaaacataatacctagggttatgtgttacgtgtcaaaacatatgtgggtttgtgcaattaagactatgatacattggttttatgaaatttactctcaattttattatgtttggagcattattttttttaaaaaaaagtagtgaagagttataccaataaccttgactaaaaatcatcaattaaaaagttattagattatactttaaaattctaagtgtatgctcaacaaacatgtatgggtgggttttctgaaactttagaaacataatacatggttatgtaccaccaatcataatatttgaggttttatgtaactttgactatacacacatgaaatttactcatttctttattgggatggttcaaaacaacaagattgttccgtttttcttttataa

SEQ ID NO: 36429 - DNA, 627 bp, Oryza sativa
aaggaggacgagcaggcgaggacacgagctgacgcctgacggtcacagacgccacagcccacaggcacagagcaacaaagcgggcagtgcagtgcagtggagtgcgtgcgtgaccgtgccgaggcggacgcgaggtgggcgttataaaattgggttgagagtgttcaaacaaaagcggcccacgtccgtatcagtggtaatcggaccaagagagagagaaaaaaaagtgtgcctagtggagtcgtggagaatgcgagaatgtttgcggctggggagattcttttacatggaccaccacatgtcggtcgagctgaggagccgcggtaaaaaatgactttagaaccgggtcgtttacgcgttttgatgcttcttcactcgtgtggagtgtactttaccatgtttagacaggctcattagcgacatattctatcctgggctcctggttttcatttgggtagatgctttgcttgagaaaacagtcgcttaaatgcttgagaaaaccctttctggttcaggagcttgggcccattctcccagtagtagtaggaggagggggtccatggagtccacggccatgcgctcttgcagcaagcgaaagcgagggtagcgcgccggttaccgaggcgg

SEQ ID NO: 36430 - DNA, 531 bp, Oryza sativa
ttaatattcaggcagaggcatatggatcactgggagatgattgcaagctagtcccaattgctataaaaaccatgcatgacatgggtaatggccattctgtgcaggtgtttggtacacaagaaccaactacccctcactagtttcctagacttggtcctgtgttggagtgtgcacaaatcacacctaaactggacatcgattaattggttaagttcttaagtttccagcctagttttgttgactatgctggaccttgatgtactttggatgtctcagttgcttccagtgagctttgagctcgcatgagaatgattcgtatcaaattaagtgcttgtttttctaccatggtagacgagttctgtctggttctggtaattgtgacgtatggcttaggttatatgcagaattgaattattgaatatcgctaaacggactatactggaaattttattgatttgattcttccaaattaccaagccacgacatagtatatatagctagtgaaaatgaccagaaaattgaatacaccct

SEQ ID NO: 36431 - DNA, 610 bp, Oryza sativa
tgagtcatgcaaagctacaaaaatgcatcgatctattcccaactaatggtacacgcacttgcacttggaaagtgagttgggaatgcattatttttactgtaggaatgactgtagaaggggataacgattcttttgtaagacacgcggcacgatcagatttgttatggtaacgagacagatctggtttgttttttttttttaatcttgaatcttgacgagctactaaaagattagcttggcttgcctggctcggcgagccaatgtgagctatattgctagtgttttttttaaagggaaaattacaaaaaccaccccaaatatcactctgagtttaagatgcctccccataagaagatttgttgcaaatccccacctcctaattcatcttgatttgatttaagcacattctctccacatatgcgtgattcccgattcatcggcggcaatttcggattttaggatgacgaaacgacacgggtcggcctcgatcttcgtctttccggtctcgcaagtcgtagtcgcgggcagacaaagcgacgcgcaaatgtgcacgcgcctttgccgctgatcggtgattgcattatcgcacgcgattgaacttttgttggct

SEQ ID NO: 36432 - DNA, 778 bp, Oryza sativa
cagccatgaagaaaagtatcactcatcgatgcattattgacagttggaaattttctttgtaaaaagcaattttgatacttttgtcaattgttagatactcgctcagttgtcttgattttcttttttctaactagcaaaaaaaatgcatgtgtattacaatacaattttcacgtttgatcaaatccttgctaaattaaacgacaaactaaaacaagacaaaaaaaacaatggtaaaacaaagtcggaaatcgtatatagcattgaacacgattgttgcatttgtttcatacatcatcacatgaataatcccttatatacatcttttcatagccttataaattgatcgggtggttattccataaattggcacacttgtattttgctatacctcatcgatcaaagattgaaattttgattattcaattagtgatatttttaactataaattatatgcatttacaaagtaacaaacttgccacatatacacctaaacaatggtaatttcttatatttattagaagagaaatctggaagagaaaaaaaggaaaaaaagagaaaatgaggagaaaagagaggagattggaaggagtgggagaagatcaagatgatggagagaaaagaaaacgaggaaaaacgaaaagaaggaagaaaaaaaaacacctaggggggcacgagggatggggcagagggatgaattaaatttgaaaatatgtattttttattttttttgcgtttatatacatgcatggaaaacatttgcacaaatatacctcatccg

SEQ ID NO: 36433 - DNA, 616 bp, Oryza sativa
tcatcgatgcattattgacagtgggaaattttctttgtaaaaagcaattttgatacttttgtcaatcgttagatactcgctcagttgtcttgattttcttttttctaactagcaaaaaaaatgcatgtgtattacaatacaattttcacgtttgatcaaatccttgctaaattaaacgaccaactaaaacaagacaaaaaaaacaatggggaaacaaagtcggaaatcgtatatagcattgaacacgattgtcgcatttggttcatacatcatcacatgaataatcccttatatacatcttttcataagcttataaattgatcgggtgggtattccataaaatggcacacttgtattttgctatacctcatcgatcaaaagattgaaatttgattattcaattagtgatatttttaactataaattatatgcacttacaaagtaacaaacttggcacatatacacctaaacaaagggaatttcttatatttattaaaagaaaaatctggaagagaaaaaagggaaaaaagagaaaatgaggagaaaagaaaggagactggaaggagggggagaagatcaggatgattgagagaaaagaaaccggggaaaacggaaa

SEQ ID NO: 36434 - DNA, 662 bp, Oryza sativa
aaaacgatttttataaatttattctagtataaaattacacattttggagtttaaaatgttttataaatcctgtctagaatgccaaatgcttgcatatctatcagacaatatattatcttgagttggggcctcatcgactacccaaaagtttattataaacaccgtaaaggcttattggcgattaaaaaaatatttttttataaaatttttatatgtattcttactatttaatagccaatactaaaaaaagtggtgaaaacatattaaaattaacttcaaattaagttaagtcaccaactacccaaaaatttattataaacaccgtaacatcttattggcgattaaaaaataatttgttttaatttttttatatgtattcttactatttaaaagctaatactgaaaaaaaagtggtgaaaacatattaaaattacttcaaattaagttaagtttcaaacttaaattttactttgacttattatttttttatcctttaagaccaccaacggggctcttgattttttttattacccatatatacgtgcagggacgtttgagattagggagcgtaagcagtgcggcgacaagtactaccactacagccaccaccagcagacgaccgagcaacaatacggtgggtactatggcagcgaggaaggcga

SEQ ID NO: 36435 - DNA, 585 bp, Oryza sativa
cacgcacatgataaattaacagtacgactaactaggggcaaatctctttatttatttattactcacgcaaaacatattgtatggtacctgattaataattataataagcatctgtgatacatgcatatctatctaagagattttacggtcctcgagaaggtacggagggataccaaattttatatttccgatactatataaggtacgaagatttgtaaaaaatactcaagaactataaaatttctctatataattaaatttcctaattaataaccacttggaattgagcatgatggaatcatctcaattaattaaccgtcttcttggtcggtgtgcggccttgtaaaggactgggcatgttgtgcaacgggttcgatccggtgggaaccagacgctccgtcacggccaccgtgggctcgtcggcggcggccggaggagtcggcgcgccgttgtgcacggggctcggcccgctgctggggacatcgtgcctcatcacagccgccatcttcttctccacggcggcgggacgacgaacatctcgcgccgccgcggccgtcgtcgtcgccacgaacaccagcagcacca

SEQ ID NO: 36436 - DNA, 814 bp, Oryza sativa
tccccgttgtgcggaggtgtatttgtgcaaatgttttccattcatgtatataaacacaaaatattaaaaaaattgaaaaaagaggtatattttcaaatttaattccagagggatggtgtgggacagttggattggactaggagggagtgtgtaatagttattttactcacgacgaattggatacgggtgacatacaaccaacacaaacatggatgacgtaccaaaattccagcgaaaacatcttcgattttttaatagtaaagattaatcatttttaagtattactaagtttatataagaatatagtaacatttataatatcaaattagtttcattaaagactaacatttgatactatgtttgttgggtgttgtacatatggctaagattttttttaataaatttagtcaaacttcttttaactttcaaggctatttggtagaatatgaaacaaagggagtatttcatggttgtttggtaggccgtagattcataagtcctcatccaaagtagcacgagtcgaaccaaaaacaccatcagatctgaaatggagtggagtagagatgggagcggatcagaattgtatgtgaggggtagagcgaccttagcccgtactacatattattaatgaaagtgttaaatgtgaaattagagagaggtattagagcagtctaaggcagttcatggcctccccgaggcttttagaagtaaagcatctatgaaaaccaataaggatgtctatggttccataactttctctcttctatttagcattatagtgttaattctttcttcaatgagcattttttcttag

SEQ ID NO: 36437 - DNA, 510 bp, Oryza sativa
  unsure (1)..(510): unsure at all n locations
ctgtcacattgtctaaaaggcgtaatacaattcagattattgtctattacggtttgaatagtctttaatncctttataacgttttttnnttgtttctccatcaacatcccccaccccccncnnaaagggtagaccatcncattncngcangccngcnngnngactctagaggatccccactcctttctgatacctggtataggctggtacctggtaccttgtacctagtacctgagtaccagttggtacctggtatccgataccctggtatcgagctggtacctaggtatcagaccatagtacctgggtactaggcgtgatacctcaagagagagtaaacgagacgccgccattggccatctagtacctgggcatcctgacttcgcttgaggcaaagagacgccgccgccggccaccgcggctgctgctcacgcacggggcaagaccacggcggcgcagcacgtggcaacacggcacctggaccacaccttcgagaagctcacgtcggtg

SEQ ID NO: 36438 - DNA, 511 bp, Oryza sativa
ttacgagccgcaactctgtggttccatccagcaatttatactgcctttagtttgtagttagcaaatctcaattgcgtccaaatattttgtgttcttaattctgaaagaaagctgtatattaagatttattttgtttctcaaaattgaccaatttccctgctttgggatcctaattcattggtaattctgcagagtagagcaagtgcaggaccaggtttttttgtggtcaatggcactatacccgtatgaggcatcttgcttttttttctcttttttgactagcagcagagctatctatattgtagaaataggaatggcattgttctgcagttgttagttttggtcttgactgcaatttgagatgtggtcgtagcaaagttgctaaggtttattttgcctatgctatctcgcagcagctatgagcctatgcagatttattccatgtggtccatgtttgttgatctctattctagtttaaaggtgatttgagctctgttgcagtttactaata

SEQ ID NO: 36439 - DNA, 683 bp, Oryza sativa
cgttttaattaaccggctttatggcttggccgaaaatattgtcaaatccacgccatgtgttagacggctattttatagtaccccttcactttgtctaggtcaagtttcaacccatctaagatcgtaagtccgatgtgtaaatgctatggacagattaggtgtatgtggtcacacagcttttctcactttgagtgagaacattctccatttcacagtagagaatatgttacagtgctgcccatagacttaggctttccaaagtctttcatacgatttccacctcttttctagtatcgtccgctacttaaagaatgttgtccctagacgccactttttttccagcgtcaaagcccgtatgtaaagtcctttgagggtgtcccatgaagccatgcatccgacaattaatgaagagcactacagggtgcaacacttctgtgataattttacaatcctcccaccgaaccctatcactcccctattcctctctatcctctgccctctttcacgtcctctcccctatcacctctcctccctctatctcatccctactcgacgggagcatggctggcaatagcaccagcgacgatgggagaggcagtggaggcttcgtcgcggctcacgtctagtggatccggtgacggtaccctcatgcaggtacgggagaagcgcgccgggggggaggg

SEQ ID NO: 36440 - DNA, 513 bp, Oryza sativa
  unsure (1)..(513): unsure at all n locations
acggcctttgatgatctcatcctttatgccngcccgtcgactctagaggatccccagttaaaaaagtttatgttttagttgtggctataagacaacgagcaaccaatgtcaattaatttcatgtaatatactaaatgcataataacttcattactaaaataactccaggttcctgactaaaatagctcatagattcatgagagattccactaccagtccataataaggttgctataaaaattgtccctgcaaaaataattaataaaactgtcgtgcataaaataaatgtaagggcaaaattgccttttcacttgcctactgttgacgaaaaatccgcgctcggccgatggtgccgaaactgtgttatcgacgaacacaacgacctagaagatctgcttagcttccgcgcatgtctaaaatattgatgagatacaggcgtgctagtcagtttgatcctgctactgacatatgtaaatagtagatcaataagttgatcggctgacaagccaatgg

SEQ ID NO: 36441 - DNA, 724 bp, Oryza sativa
  unsure (1)..(724): unsure at all n locations
ttctaatatattagaagatttgtttattaggtaaaataagttaattctctaatatatcatagcacgtagttagtaatagacagctcanttcggcttgttttagacccgagtggcattcgtccaaaaaaattaaaaaagtcctcgagtttaggcgtttagaaagttttgagtcacccctaaatgattgaacttgtttacctgtaaacttttaagttgcacttggaaattttgccatgactttaaaaagaaaagaagaaggacctatgaaaaatggttcaatttcaccgtgaaataaaaagggtccatgagaaaggtctagaaagcaccctcgatcaacttggcccaacctagcaacttccgatccaaagctgatcatatcagagaccgtcggcctggctaggcccaaaaacagcaccgatttgaagatggtattcgcagcccatgtccggcccgttcttcttcttctccttgtttttttaaagtaaatttcagaaaagagactatctaataaacgtttgcaagttttttgggtgaaaaactttcaaatgtaaagtagtgtaaaacatgaggttttctggaatttgccctcttttttttttctgttgcggaataaataagggagctcttcattgtctgtcttatccatatgggcatggcttcacaattgggtaccgagctcgaattcgcccatagtagtcgtgtctacaatnggaaacaaggccgc

SEQ ID NO: 36442 - DNA, 648 bp, Oryza sativa
  unsure (1)..(648): unsure at all n locations
agacagatctggtttgttttttttttttaatcttgaatcttgacgagctactaaaagattaacttggcttgcctggctcggcgagccaatgtgagctatattgctagtgttttttttaaagggaaaattacaaaaaccaccccaaatatcactctgagtttaagatgcctccccataagaagatttgttgcaaatccccacctcctaattcatcttgatttgatttaggcacattctctccacatatgcgtgattcccgattcatcggcggcaattcgggatttcaggatgacgaagcgacacggctcggcctcgatctccgcctcttcggtctcgcaagtcgcagtcgcgggcagacgaagcgacgcgcaatcgcgcacgcgcctttgccgctgatcggggattgcatcatcgcacgcgattgaacttctggtgggctgccgctgggcttggaaaaaaaaaggggggtggtaagtgatggggccccctctggccttggccctangcggtcgcacaaccgggctatgccctgcgccgggcctgttcccgaagaatttgtagcgaaatcaactgagtgccactaggcgggagcaagagataatgttggttgttctggataaatgaccatttaattgtgttatcatggaa

SEQ ID NO: 36443 - DNA, 636 bp, Oryza sativa
aaaacaaaaacgaatacaggaagactactgcccgtcaaaagctggaattggttagatactttccaaaatctggattttttttctcggaaacagaaatgcatttagatttttttttctcaaaaacgaaaacgaatatagtaaggctaatattcgttggaaaccagaatcggttgcaagctttccaaaaacgaatttgtattttttttctcacaaacataaacaaattatttttatgtagctgattagcttgatcattctctactttagatgctcagatttgtacacagtactgaggtggttagttgaatggatttttttttctaccaatgctttagatatgcttttctcttggctaataactattttttattagaccatgccgtactgactaatatatagttcttgcttattgcaattttcatgaaaagtaaagtgtaaaactagttatatattattaaatgataaaaataggaatttaatttattgtttaaaaaaaatagtgaggcacatctcttcgctaaagaagaagcgacaacccttttttcatatcccgataaatattagtacaatattcgctcgatttatatcatcagatcatatatggttgtaactacggttttatttcaattcgatgcc

SEQ ID NO: 36444 - DNA, 735 bp, Oryza sativa
  unsure (1)..(735): unsure at all n locations
acctgtgcccggccggaagaatgannacgttggtggtggtgaagaagggggaaaccagcgggggggagttctttgnagctatggatgggggtgggnctgggccactgacgncgncggtgcggganccagtggcgtcggggaagncggcgaagaagaacgggnagncggtgncggtgncggtagtgaaggcgnaggtgncggtggcggcagtagcggcgnaagaaggtgctggtggggatgcggcaatggtagacggcgctacaaaggtggcaaaaaaggcggtgtcggcggcgaggcgggcaagggcatcagggcggagagggaaaaggccggcgatggcggcggtggcgtgggnattaggagcgcgcggcgggggagaaggcacggcggggggccgagctacaactcgagtctgtaccgggtgggggagtacgcgcggtgcatggcagcgatgaggcggtgccgaggggcgctgctggtgtgccagatgcagtgcgagggcccctgcttctacgactgcgacgccaactgcaaggcgcactaccacttctaatagcggcgccgctgccgacgtcatttgccggccgctcgggaatatatatatgtgccaccggctgcttgcatttgcttgctcattgtgtgtgtctagctagctcgattggctgcttaatttatcggtgagaaggggatcctctagagtcgacctgcaggcgtgcnttacatgggtcctaacgt

SEQ ID NO: 36445 - DNA, 564 bp, Oryza sativa
catactttcgatcggcgactacgtcctccgatgagttcaaagctaagcagggcgaaacaaactctcaccaaaatgggaaggaccttacacgatcacacaagtcttgcggccaggcgcattcaaaatcgcagaaggcgacggtcgcgaattagcaaattcttggaacattgaccaactacgtaaattctatgtatgagtcaatatcatccgtacctgtaagacaccttacagtatcaataaagcctattcttaggcccatattacaatcaaactgttttcacccgatgatcccttaccctaatgacacctagcgttgaaacctatcctcatgtccctttacgccgtcttaacaaggcctccgaggaacctaagggatcttcggctggggacgcccagagccaataaggccttgtcagatcctatagagacgaaagaccatgtaagatctggtcgtgtaagagttctcgccgtgcgtattaaccaagctgcgaaatcggaaattaactttccaacttcacggctgggggctaggatcagagcttattcaaccaaggcaggtcaaag

SEQ ID NO: 36446 - DNA, 650 bp, Oryza sativa
agcttgagcctttgtgattgtgtacacgtttgaattagcgcgaattcgagctcggtacccaatgctaggcttgcttcagttactgtgcaacatcagagcattactatctaagattgactcgggtattctagtcccccaaatcgctcacgttgaaaaagaaaagattgggcttccattttctaacaatgcccataggaacaaagaaattccacaaggaacccagctacattcctagacccaaatatgacaccattcctattttagccccaagaatgtgaaatgtaatcctacaagctacaagcgagcgtcttcacataagatatacagtacaatcctacaagctacaagtttatacaccagcagaagctttgggatccatctagttgaatctgttcttaaaggctaatcagcaaccagagtgaatgacaaatcacatccaaggtaactacacgggtggattggggatgataattcaaataagcatgtaaatccacgaataccatacactcagaaagacaaaaaagataacacattctgacgaatcacgagctgtaagcagtcaagaagcacttccagtcatccaggcatcacaacaaaatattgagatgtgctaatgcaaacaagacaaccttaaaaatggataaccaatt

SEQ ID NO: 36447 - DNA, 1519 bp, Oryza sativa
catatcataggagtttagcataatataaatgaaacatatgctaattaaagtaaaaacgatctataaatatagatgtaactagtttattattacagtacgattgtgattcataaatgtaaaaacaccgaatggctgcttatttgaccgatggctggcaaccatatcacaccatcagagagttgattttcggctggtacttgcatgttgcctcatgtttgctattcagacggtgggcgagtcacatttctcatcactaggatgagaatttatcatcactatgacgagaaatgatcaacttaggagcctccacctccctcttgacatctttacggtctgtatctatctcctacgaaaaaaaaacaagtggaaaatgttaagagcaggagtgacaaatccagaactggagctgaacgtgaaccaaaaatatattaaaataaattacctgtgaatcattgggcttcgtttcatcgtctattaacatctgcgccttttggagatatgcattctcctcttgaagaccatactcattgactagggccgtccaagtatcttcaaaatcacttgctgtgcgtgcatgatataagttgtgtagttctgacttcgtaccaaataatatgtgccaacggcagcgtgggtgatcatacttctgcagcgactgatcgatcttatcgctccgggcaccagtgttcatcttgtccatagctactggcaatataggtataaattccagaatactaagaagaggtcaacatatatgagaagtacatatacgtacagataagttggagccatacctggaacagaaatgtgttgttggtgagaaccagagagagcaccagaagtgagcagagtcgtattgttctgctctttatatgttgcaattgtgtctccgttggaaggaatgaaaaaattaatatcattaccaagtataaagatcttatttatggtaatatttatagctattacgaccgataggttacataatataatttgttaccgtcaacatggatcgatccagtcagaattgggtatcaattgattaatttagtaaccaactagtgatttcggtactaattggccatagtcaacgggatagagagagagtgaaaaaatgcacgtctgaataccacaagattaatgacataatctgtacttttataggtgtacatgtacacataggtttatgagtgacagagcgaacacgtatacatgtatatcccacaagatgaatgacataattatgaaatagaaaacatatccgaatttaattaaaaacttgtccaagtgcaacacgcaagatatgggaatatttttacaagattgtatttaaaaacaacgatagacttgcttctatacaccaacaccacacgttgatgcatagtgaccagctaacttgcatttcgtgcacaccttgatcaatttgttcttcgatgtgttctccggatttgtggggcatccagttctatagtgcccgttcagatgacagttcgaacaaatgcgcttttttcggactccacca

SEQ ID NO: 36448 - DNA, 539 bp, Oryza sativa
acttaaagagtttatcacacgcatgctgctgccaatggaagatgtcaacgtagacgaacacaagtcatgcacgatcaagactctctcggcaccggccgaggtgtccataaatccatgtatatatatgcccatacttctacgcgtttgaccccaaaattacggcaattacgaagggccccgtgtttaagtacagtactaactaccccagtatccgacgccataagaaatacgtataaaaatataatttttagtaatgtatatgctcgactcgagtataaaaattctaatcaggacggtggttcatataggagtattaggcaggcaggaacgcacgtcgttttcatggaagcagaaaattcggcttgcttgtgatgcaaattctcaaaccagccaccgctttatatgtttgacttaaactctgtgctaagacttttggactcaagtgagtagtatcagtttatattagtactagtcaataatatatggaatcaaagaagatgatgttgcgaagaaagtacaggacgaaaaaagggctgcag

SEQ ID NO: 36449 - DNA, 564 bp, Oryza sativa
ttgtttgcgagaaacacggtacataagcagatgctttgcataaatatgcacattcacccgtataaatgcacatgacgtgtgaaaaatcatgagacaatgtaggttatatttgttactctacaaacttttttttaacgttactccacaaacttgctcgacatagggagggagaaaaataataataaatcgtaataataatggtactggaaaaaaagaagaaagcctatgatgcattgggctattgcattcagtaggaggtggatgggctgggcttaaagccttaaatgcaattgaggttctagtgacttactgtggaattaggttaaactgtatactgccgccgtttcatgcattgtccatatttatatagatgttaatgaatctagacacacatatatgaatgtggacaatactagaatgacttacattatgaaacggggggaatatcattttctttgatacaaatttaaataattacaaaaatatcgtgacaagaatttaaaatataacaaaggttgtgatattgtttaggtcattaagtataaataaaaaagaacaaaaaag

SEQ ID NO: 36450 - DNA, 1008 bp, Oryza sativa
tcctgcagccctgtggtttctgtaactatgaccataatacccttggttacctgaatttactctaaaatcagttatgatttgaataagggtgagattttatgaaacacttggacaataaaacatgtgcttgtgtaccacaagacataatacgtatgatttatataagtcatagtacatatggttttgagagaccagcagcaaccgatttcatatttgagagatgaatgaactgataccacaattgagagaccaaatatggactattttatattttagttgaaactatattccaaagagtttctgggtcttgcaatttggtgaaacaatatgaaatataagcacaatcaacaaataccatgatatttatctacatgcattccgatattgaatttgagtttcataaaacccacttggatagtgttctcgcaacattcccacttgaatttgagtttcataaattcttatcctaacaacttttaaaacatgccactacaaacatttaaaacctagctgttagtgaaatataacagaactagaaaatcaacgcaccctttggcgcgtttgctaattagcctgcgtgtgtagctgtaataattatttaaatatttacaatgctctaacatatcgtagtgaaatttattgaccctttttttaagaaaatcggaatcctatttttcaataaagtttatgaattttcaatacaattcgtgttttgctgcaatttgtgttttatctaacttatacgatctaaaaaattagaacataatatttttttttcaacagaagttttatcaacaatagctagcatagtctattttatgttttactagaaaaaaatgcctgtgcattgcaacgggtgaagtcaattttaatcttattattattgttatatggtttagttaagatgaaattcaccgtgggagttcgcttggatatatgtatttttagaaaatcatgagctgcagttaggagtccgatcgtctcaagttagcatgcgagtttttttaa

SEQ ID NO: 36451 - DNA, 887 bp, Oryza sativa
tttagaatacactctgttggattgagatccaaacctccaaagttggtaacaaaatccagtaattctttataaaagctactcctatgctacaatgaaattcattcaatttaccgttaaactgaaaattgccaacaaagttgaaaagaaaaaaatggataaactcgaccaaccaaacaacatcttttgtatacaacatcatatgatacaacaaccaaataacatatcagctcatataggctaaactaatgcagataaccaaataaggccaattacataagcttagagttggttacgattagcttagatggggatacgagctaggctaaggttgttcgagcaaccaaacacacccttgtagaggtggatatacctatggacatatctgaagcgatcaaaattaccgaaaatatagtagttagagcatgtgcaatagcttattttagttggttctaataataaacacgtcaaatacaagatgattgggaagaaagagagggtaaagagagataaaagcgagcgctagattaagcaccagctaagcatagcctctcatgtctgcatgcagtgttgcttaatccaaagagcctacgatgacacactagtggctggttacattacacaaataaaaagtagtactctaggacattacatagaggtacttatacatagagagaatctaagagaatgccaatgacaaacactgaagtcatataaaataccatcaaatagtgcgagttacatgaaatgtcatcgcataagcgactttgtcccagaaatattatcatacaagcaaatttgtcctagaaatgctatcgccgttagggtcccgtccatcccacgccattaaatgtacttttcattatatagcacttactggagggatgacc

SEQ ID NO: 36452 - DNA, 626 bp, Oryza sativa
aatcaggcctgcaaggtcctcgaagcagaatttcagaacgtagctagacagcatctaaattatgaattgatgttggcaatagtataggtaggcatgaattatttctcgtatgtaaattatgataaggtttatggttctgatctcagtgagaagatgcattaccagtttcctttttttttttatctaaattatgcagcgtttgtacgtcggccacgtacgtgcatgggaatgcgccggcatggaatgagtgtgaaatgcaatccggaaatgtgtcgccagccgctcctgctgggatcacattgctgatatacagtattgaactgtaccctcaccgtcaccgactatatgcataaaaccgtcgaatttcagagctccagaattaaaatttggcaaaaaaaggtgcagatatatggcattctgttctgcaagttacactgaggcgccaactcgtgtcaggcttgctcggagaaacataaaaggatacaactcatacaacaaactacaaactcaagaagcactccgaattgaaatactcgccattgcttgcagtacgtacagagccgaaattgctacactacccttaagtttgcatgccgtcgctagctgcttatcgatcaatctcacat

SEQ ID NO: 36453 - DNA, 740 bp, Oryza sativa
  unsure (1)..(740): unsure at all n locations
gttgatttcgnnnncttgttgaacacatctactatgggcgaattcgagctcggtaccctagggaatcgcatttaacaaagaccacctgaaaaatcaattaacccaaattaccttaaaagatatgaacaaaattccagctaatgcattatcatagagtattttgcaactcacttcgcagaattgttgacaaatacatacttttgctgtcataataaatctgtgaagaaataactatattttaagggaaaaaattaacgataaaagtatatttaggactacgggagtatatatattacaccttttgtcggtttatagacactgagggaaagaacacattaggaaaagtcttaaaagaatatttgcaattccatgtaagtgggaaaggaaaaagggaaacaaaagcatttgcaaaaggggaatgcttgtgctcaaaaggatgagtggattatcttatctctgccgtttcatcatgtcatgaggtggcattctagtgattattgcgaccgntactggctctttcattgtcttctttcattgactcccttnntattagttaggtattgaggcgtcntcaagtaacanaaaaagaaattaaagataaaatagntattcaccagctggnaatatatatattaataccaaatatttattcttgaagccaaagattacgcgcctaacgagnncaggcgacgtgcattatgtaggctcatgataaatgcngatgagaatacagatgacaa

SEQ ID NO: 36454 - DNA, 2579 bp, Oryza sativa
gccgcctcgcccgcccgctcgctcctgcgtccgccgcctccacacgcgcaagaccaatccggtggagggtggttggatgcttatccattccctcaagggtataacggtaaattgatatttcataaatcattttttttattttcatttgttttttaacccaaaaatgtggcgcccacctaacgggagttaaaactgatggcaaacggctgattcgttttcaaaaagtgggggtaaaattgcaaaccctaaaaagtaagggtaaaatagtagttgaggttgaaagtgagggcatggatgcaattgtcctttaaaattttatgattgtattgtacaaatgaatagtccgcattaacgtgtggggtatcaattagtagttcatgaagaaagcaaccagtaccttccgagaaattaccattataacaataaataaatacttgaattacaaaggcctttttgacaagtggccccattacacaattccataatttttttaaaacctgtcttcatgttattattgtatactagaaaattagtgcgccagccggtgtgctcgctttatagcccttgtatatttattttattaaagtagtgaaaatttcacaaaattttatagaaatcagtttaatttccttgaaaatgatgcaaaaaatcatacattcaaatatttttgttgaatggaattttgattttcaatttaaaatagcatatcattgttgagaaatcctcaagttttctctcctttttccatccatgctatttatggttcttttcttcaaactgattaaattgtctactaatgataaaataggtggtgataattttaaaaaaaattgaagtgttgatttttttaaggaagctacaatgttcatcattccttggaaccaagtagtttaatgcatagacttgatacaaatgtttgccattacggctaattattttgttagtaggtgacatatctactgttgttcaatcttagtatatatatgtacggtctcttggaggtgtttaagataggtgtgtatgtttttataagagcgagtttacgcgaatttatatgagcgtatgcgtttaaactatggcttttaaaaaaaatgcgtttaaactatggcttttaaaaaaaaagtttaaatgtactgtagaatttgtgtccattaaatcttgtcctctgcctaataaatatcttaagaacatagccctattaacataacatatgataccgtaggtatttgctccttctcatagtcgatccttccagattctcctctctgcagcagcagtgactgtgttataccctaactgtctcacaagacatactgctgctcagtctcgttttttcttaatatgcttttgggatttatttgccaagagcctgatgacacgttggccgacaccgtcagcattaaaaataaaggctagaaaatcagcgtgcctttagaaaacacctgtgcaaattgtttcagtgtgttattaagaagcagaaattttgcaaatgtttatggaattagtacaatttccttaaaatttgaaaatcctaaattagtcttttcttaggtattacttagtattcatttgttgcgtataattataatcgaattgtttattaaatgatactcaacaatgaagtgtctcataaaataggtatgagactttttaaagtgttctagaggttttatttgcaaatttatgcttgatgggtggaattcatgccataaaacctacaacccgtcccaaaataagatcatcttcgtctccttccatttatctcaaaataattttatttttgagtaattattgcattggagtttgtgaaagcaagagacaaacatattgaaaagtacataaaatgggaaatatttgcattagaatataataaagtgggatatcaatccttttcttttgtattggtatgtgtggaatgggtgaaaataaatttattttgagacggaggaagtatttccatgccataatatataaaatctacgattgatgatgctacagtactctaatcaacttgtatgtgggctcttgatataattgctttgggtctatctatactattggtgacatatatttgaatctacaacaatcagatctgaactctgcatcttacaagttgatgactgatgagattataaccatattgatcacaacataaatcatgggtgagctatgataaacttcaaatgattaaaatccacaacataaattaaattacattaatataattacactgtagttgtaactacaatgtaactatggtgtaaaacactataaatactagtaacatctttgtgttggaataaatgggctagtcccaatttaattcaattaaaatctcaaggacccacaataaatgttagagataataataccaccttggagattaaaagtggagtatctcaacttaaatagggagttattggagattccctgttgaccaattgaggtgggggacggacagccacacgcgtgcgcgcgagccagccggggtgtggcgaggcgggcggttgcagacatacgagagaagattgatctcgatctggcctactccactctcggtttggtttactcccacactc

SEQ ID NO: 36455 - DNA, 570 bp, Oryza sativa
ttgtagatccatttgaatctctaagaatggagtctgcatccataagctttacagcccaacccagtcgacaagcaaatgatgcagctgcctgaagctgatacaggtcagcctgcaacgttttagccaattcagcaactgtagcattttcacttgatacaacaaatacagcatatagtagtctgcaaacaagaaaggcgtaaaatcattttaatagctacagatgattcttgcaatgcactatagtttaatagggaatggagctcagttgtgtggaagaatactcaaggcaagtactcactcttcaattggatcttcgtaagactgatccttatttgacacaaaaccttcaagccttgatactgaaacaacaggacaagtacagaactgaaccaattggcatttagggagaattgagctgtgttgtagtttcgtgtctacagaataataccctcaatatacacacactgttagtgcctctaaggatgttataggtttctaactgatattgtacttatcagcagtttaccgttacaagcttgaagcaactgtgccattgaattataggccaat

SEQ ID NO: 36456 - DNA, 3165 bp, Oryza sativa
gggttggtggcggtgttctgggtggaggtgtggatggcggagcactgccggcacgtgaaaaagccgtcgtcggggtcgtcctcgggcgtactcgaagccatggccgcagtactcgcagacaagatggatgccgccgcccccgtagtgacccggcgagccaccgccgtcatcgtccatgggagggatttttgtttgatcttcttgcttgtttttgctcgctgaaaggggcggagaggcccgcggcggcggcggcggcgacggccggtgagcgagagcaaccgagcggcggcgtggaggtcaggtggggttttttttggggaaaaagcgtgtatttttgtgggaacaatcctctacctgctggttttacaacgcaggtaaaaaaaacaaaaaagaattttcacttctcgcaattttatactccctctatcctaaaatataaatatttcatccaaaatccattatatcttgggaataagaaaatactaggatagatagagtattttcgtgattatgggtaagagcgagggccttcttgcggaattgtgtggcacagccacacacacatgagacttgagagacgcttgtttagagatggcaacacgatttgatcaccgattttccgtagtgaattcacataatggggatgtggatgattgatatctatcatttatgggaaattatattgtctaaaattcatcatcatcggggatgacaaaggtggggacgacgctccaccctccgtcctcagccccccacggtgacccgcgttatgtatgaaccaattctagactttttcagtcgtaatagcttggctgacccataaatttaaggcccctagactaagtcaacccttagtctcattccccatctccaccactgcaccgatccactgcgtcgtcgccgccgctccagactctagatgatttgttgtttaagcagggacgagggcaaccacggggaacgaattcaccgcacaagggggaggggaggggatgggggggaggggttgggatggataaaatgtacccccgtcgtggtgggcgggggtggggacggtaaaattttaacatcgtgaggacggggacacgaatgtgacacccgatggcgaaatatccgttgccatctctacaagggtgtcgttattcccctgtttgagcgtttgaaagcaagtggggtgggttgtggctgcctgtcccacttcctctatgtctgttaagatttatgttgataatccacatctcgcatatgaactgttaagagttaccactaaagcccgtgaactagcccacaatctattttccggtggctagctcttcttctttgtcaataggtcgataaagttgactacacaaataatttttctagatgagcagtcccctagattccaggcaacccataagttaccgtgcctaaaaaaccgatcccttgagaaccggttcacataccataggcggcaatcgatcttcacgtgtggtcgcctcaagcggccagcatacgaagacatatctttggcgtgtggctgggccacccgcacgcgaagatggtgatcttcacagactttttgggacaggcggtgcgttcaatcacgcatgagaatatgtttaggccatttgcaaaacctgtttttggtgttagtaaagttattaaaaccaagtgaaaacaattatgcatttttttgggaaaattagttatgtctttgatcattccatatagtttcacttgagcatgtctacttacattatctatatgctctatatagttggcaacaaaaactaaatatgcattgagccacgtcaccagcaaaacaagagccattcgatcattttcatgcgccatcacaaacatccagtaggcattaaatatcgccagttagtatcatttttcattcatattcatttgaccacttagtgtagtatgctgtaaaaaaacactataagaagtatttcacttttcatatgtgtcaacggggatacccgtagaccagataaatagggtattggggtacgtaggcatgatgatctatacgatacgacatcaaaacaaacagagagacaaagattatactggttcagacccttcgtaaggtaataaccctaatccagtttatatgagattgatatggaaaaccacagagtacacagagaacaaatgaatccggcgagacccttgtcgagatgagtcgacgagatctcccggtgagtaggcttcgcgtcctccggctgcgtaaactatatatggtgggtgtgttggcgctatgattcgatgatctgaacccctcgaggggtgtgccttttataccgtgagttgccttagtctctaagtacaactcggagacaatgaaccctacacgatatagaataaatccaatcctctctgagtaggactctgttaatcaccagcccatgaggatattttctataatatcttgtagattttcttaccgcatacgaaaatatatcgtatggacaatggtataccatacttgtatatttcgtaagtcatagataggaggtatgtcttatccgtaaccatgacaatatgtgaggtgcttttataggttcataatatttctcatatttatacattaaaatttggggcaattgcatgggtgcccccactttcgaagccaattgctgttctaccctcattttttagggtttgcagttttactcctactttttgaatctgaatcagccgtgtacccccacttctaatagccggttttaacgacgttagttgtagaaaaaaagacatttatacccttggtggttattgcatttttgcccctatttttttcagctttgtgtgattttgcccctattttgtgatttcagcttgtgtgatgagcatttcgaccaaatatgagcatctcttgtgatgtttttttactttaacaaaaaaaaaatcacaaatactatgcaattacaaaatttgaccaaaatttgaacaaaaatcacaaatactactagcactcatcgtcgatgctagtctggacgacgacacatgcgttggtgaggaactgcagtggcagcgcgaggtagtcaaggcggaggcgcgaccgtcgacggcgaggggcgacgccacctcctcgagccacacctggaggtaggcggcaacctcgacgcggccgtcgctgactcgcgcgcgcccatggctgccgtagcg

SEQ ID NO: 36457 - DNA, 717 bp, Oryza sativa
  unsure (1)..(717): unsure at all n locations
caaggggttgnnanctggttgaccanttngcttggnaccctgttccggacgatccacctgctccgtcgtccggccccagaagctcccgaaccagaagagcccctcttgctcgatcagcgccttccacacgccgccgtcgtcgtcgtcgacggcgaagcacctctctttccaccacccctcctcgtcgtcgccgccgcctccgttgatcccgccgccgaatgcgccttggaatagatcgtcgtcgtcaaatagctcctccagctgtttcttcacgcctgcagccgggtcgaccgtgctgcagcctctcttggccgccgccgccgccgccgatgatgatgatcttctcccgtgccatctccggaggatgatcctcttggacttgacaaccaccttcttgggcagcctgacgaagaggaacacggtgatctgcagcaccaggcacgggcagcagcagcacaccaccaggcagtccatggccaccagcccgggtggcctggggcccgccgcgcacgacgacnacgacatnggcggcggcagtcggagacagatcgatcaccgtcttttggacagtggataggaggaggagggagaagaagagatcgatcgagcttagctattagctatagctagcccatgcctaactgcatcgtggctagcgtgcctggaggagtgagaccgagggtgctaagttagggtgcttgagaagctcgagtggct

SEQ ID NO: 36458 - DNA, 512 bp, Oryza sativa
  unsure (1)..(512): unsure at all n locations
gatgggntttgttgtacacctgcttggtaccctcttattttatctctagaatttaagtttatcatgcaaagatatctacaggattaaattgttccaaaagccttacaattattcaattagcttgttccaaacaatatatttttctcattgcccatgcccacgacgagttgtatgcagatttggatcgaaccagaggctcccaaacaacttgaaccgatgttcagcaagctgaagtccctcgttctgacaggaattttccgtgggtgcgacctctcgtggacattgttcttcctccaagcagcgccggttttggaggaatttatactcgaggtaactaaacatatgcatgctttgtcaaatctcatctaacggcacagttttttttcgtctgaaaatcactctaatatgcatatatatatatatatatatatatatatatatatgaacttctgcaggtggacaaacctttagatgccaaggcaccgagtgatatttatggcgaaatgccgaag

SEQ ID NO: 36459 - DNA, 651 bp, Oryza sativa
cggcacgccggcgtgggagacgttcgccgtaaggcgtaacccaggcggtgtcctccgatccggaccttcgattcgacgagcatttgccggatttctcccgtgatatttgcggtgtatacatgcatgtggcgtgtgctcggttcgatcgggagctagttggcgacttgcctaaccccgatcgcattcaaataaattgccgtcgctatcaccaaatgatgcgtgcccatccccaataatcccgagctaatcaagccgcggtcacctttccggaatcgaggtccaggcagtagcagttaagcgttgcctttttgaaaaactcgatgaagttacggccatgtacgcaacgataagcatcagttttcgtactccattcgttagttcggcgtacgaccactgataattttggagtcacatcagatcatcattttgcccgtgcaaaagcgagtaaatccaatccaaaatactcaagtatccaagggatggagtactatttatttttcctactcttcacatctcggtacagtaataaaatgagagtgggtcaagttgatagtagtactcctattttcctactatgaagtactatggtttaaaattcttgggtaccgagctcgaaatcgcctataggagtcgtatacaatcacttgccgt

SEQ ID NO: 36460 - DNA, 631 bp, Oryza sativa
  unsure (1)..(631): unsure at all n locations
tgggcttttaaatctcattcttgctgccngcaggtcgactctagaggatccccatatatatctgcgtggaacacatcctataaaaatatttcagttctgtggactaaaattgagattgcccccaaggggatgccagaacgacgtcttcaagaagagaagcgacggaagaccgccgccgccgtccgttgggactcaaaggagccaagactgagctttcaccaggcaaacgccctcaggaggtgagacagcacgacaatgccctcaggagggtgatcatcgttgtcggtccggccgaggccggactaggttttcacccgccgctcaccacctacgaatccacggctgacgcaccaaagctccaccaccacactagcgtcatagcctaaacttctggttagcatacaagatattctacaaagcagaaccaaaattttcatttcttgatcctatcgtcatttgtataagcaagttccaatgatcaaatcctggttctgttgaaaccacagcagttcagttcacaaacgtcagaggctgcttacaagcttcctggaacaacaataatgtaaactatgcaaaatcagcagaaaacctttttcttccttgaaaatggttggtaaaacgaaattcactg

SEQ ID NO: 36461 - DNA, 526 bp, Oryza sativa
ccggccatttaattgccattcgagctcggtacccgatcatgaccactactcctctcaaccgcgtcttggagattaattaacgcaaaaatgatgatgatgatgatacgaaatagtagtgcttaattttgttgtgttgctatgcgttggtcaacttctccccaagtattctgtggcggatttgtttaggaatagtgcagtgcaggtgctatctggtgcccactttttttttcttttttttttgtcctgaaagaagctaatggctttggaatattgatcattgagtagcattgcagcattgttttggttcacatattgctcaactgaaatgctttgttcatcctctcaagaaaaaacaaaagaaaagaaaataagagagaggcttgttctcacaaaagacaatctgcctttcctcgcggctttcttagatcactttgtttctggggggctatatattaagtttcttagatcacttcatctttgataatccaaggcaccttgcgtcagatacttgtatactacaataata

SEQ ID NO: 36462 - DNA, 618 bp, Oryza sativa
  unsure (1)..(618): unsure at all n locations
cggcgccattgtgtttgacatnctcggtacccatcctgtttataaatatggatctgacaaataagtagcaccatcatgttggatgttgaaattatcaagcttgctcttttttattgtacttaatattttaccatttgggttggggcagggggtctaccagggaagccgcactctctcaactggttgatgcttttgaaagcttcattcttcatggtcttgtggagaacaagtaagctaatactttcaccagtcaatcttacagttgcatctagagataatagttacttagttgtcagcaatatggatattatatagtactagtgattattggaaacatgaaagacttatatgacaatcaagtccaacctagtcagatgtcagactaacacacttctcagtgaagatggactatatattaattcattctgttccattgtgaggacgtgttactgactttattttttccctctttcgaagatatgccaccctgctgagtctgttcaacagttcgataaagaagggatctacaaaagaggcttgtttagcatcccgtgccattggtatgtgccctgtaacactaaatactcatttccgttcattgcagctattgtttactca

SEQ ID NO: 36463 - DNA, 719 bp, Oryza sativa
  unsure (1)..(719): unsure at all n locations
gtggcncttgatttgtatttcctatgctcgcatgcctgcatgtcgactctagaggatccccaacacgtggccaacaaaattgaaatcatacttcagccataaaagagaataagcttgctacacttttagacaaaaaggttttcacctcgccgagcctgctgccctccgtcgccgagctttccctcgtcaacctgcggttcacgtcgccggcgctcgcgtccctcctcggccgctgcaccggcctggaggagctcggaatgtaccagtccgacgcggggttcggcgcggtgttggacgtggggcacgcgcggctgaggcgcctcgccgtgcacgccgtggacgaggccatgtacaagaaactgcgggtgtcgtcggcgccgaggctggagcgcgtcgtcgtcgccaactggttctgccgctacgcccccgtctcgttcggccacgtcccgtgcctcagggagctgcacttgaagaacaaagccgtttactaccaggaaccagtaagactaagcaaaatgttggccagcacaccgcacctcgagtctctgacattggggttctcatcttggagggtaagcatctaatgcaacatcagtcaccctacttcattcattaaaagaaggcaatcaactttttttatagtgtaagtttcgtaaaactgcagatactttcncactncagatttaagaagggtaccaagacgagttcaaaaaccactg

SEQ ID NO: 36464 - DNA, 596 bp, Oryza sativa
ttgaacattagtgaactatttatccaaccatatgtgtaatctgatcacatactttacatggtcgaaatggcatctccaaaatatttgcctaatttgaacaggggactttttgcatgataacagtgcaatgcctgcataatttataactaaccagccttgcttgatttagcagcaactgatctcaaatccatctctcgtacgtctttacaacttctcttcatcttttttagggtgccagatatcacatgtatggtggattggtggcccatccaacaccaacagaagcaaattaaagaacagaaaggaaagtattggtggcatattaattaaagagattcgtttgctttgatttattgcaatgccacctgcaggagtctagtacattcatgtacggacgtaccatatgcattgagttggtattgatttggtgaacacatcccctgtattgaagtttctgcaggcactagttcatataaagccgtgtttagttgcaaattttttcttcaaacttcaatttttcatcacatcaaaactttcatacacatataaatttccaatatttttgtcacatcattccaatttcaaccaaactttca

SEQ ID NO: 36465 - DNA, 649 bp, Oryza sativa
attttaagcacaaaaaaaaacaattgatgtgatatggcttaatgagagaagataaaaatatcattaactaattgaggatgaactatataggtatataagatattattaaaaataatgaagatatatattaacatattatttaaattatgtgagatgatgatttaacatgcttgtattttaaagctctaaaatttaataaattataaaattatagataatatagcatgtttgcatgatatttaaatgtaataactgttagtcgacgatgatgtagcatctttgcatgttaagctttaagagttagtgggttataactttatagtaagagagaataaggtgttgcaacataaatacagagtattgaagagagtagattttaaactcttaaagggatgttccttgttgtttgcatgtgatatatcactttacaaacatgcaagctaaaaatcaacttctaaaagttgcaaaaaaaactacagctagttaacgtatattgacaattaaatttgtttttttaaattgcgatatgtagaagttaaatttaacttgtatgtttgtggattgatatatcatatattaatctatctcgtcgatttttattttatttctttatacccattgagtagctgcaacaacgagtgaatatccc

SEQ ID NO: 36466 - DNA, 618 bp, Oryza sativa
gtgacactatagaatactcaagcttatgatttttctagaaatggtttctgagctcatgatatcaccccatcacctaatcctctgagagaactggcattcctcatccttctcttgtgttattcgtcaacctgttataaatatgttttcatagtgcgccactgattagtttctcttaacaactcttgttgtcctatactgtacagcatcaaagctctaagtatttaattagctgattaagtagtagttaatgaggagagaaactaatctgtcaacgacaggccggtcattccttcaaaagatagcaaaggtcttagcctgcaatagtcaacaaaacttgatctggtttcttggaccaactacgtacatgaacacaaaactattgacagatcttttcactactccatatcagatattagtactccatccgtttcataatgtaagttattttagcatttcccatattcatatggaggttagtgaatctatatagatatatatgtctagattcactaacctctatatgaatgtggaaaatgctagaatgacttatattatgaaacggagagagtagtatatatggagaaaataaatggtccctagctttagcttaacccaaat

SEQ ID NO: 36467 - DNA, 663 bp, Oryza sativa
acccgtgcggttcacatagagataggataaaacgagtcgatttgtgtggaaaaagaagaaaatggcgcgtgctttgacgctttgtagcattgaccctccttcctagggtcttttcctgcaaattccaaattggagcacatgattttggtgcatgagtatctaaaaacatcagtagtattctatattcttaagtcttaaccccgtagaaatcaacgtatcaacactcaagatcttaccactgtacaacctggctccataacgtgtgatttgttgggctcagaagcaatagcagctgttattggatggtttcgcagtacaaacgcccatgcttttatccatccgcgctcgtccgagcacgtctcattaactaactcactcactcaagtgaggtcaaattacagaagctcaagtcaaatgcttatctaatctgccgatactgtcgccggatgatgccattacaccccttcactatcacgcagaggctgtccaaaactatcaaatcgtcgtgacgacgcgagacctctcgctagcctgacagactggtccaacccaaccatatttttctacgactcgagccggaaatccaagaaccgagttcaccgcgcttctccccttgcacggtcgctgacaagtggtgcccacgtggaccggacagtacgcgtt

SEQ ID NO: 36468 - DNA, 660 bp, Oryza sativa
  unsure (1)..(660): unsure at all n locations
ttttgattcaaaggggccctaactttgaaaaaggcagtacacttgacaattgacatcaccagtacatcaacacaaattgaaatgtaccgaagaacatgtaatgaaatgtgagatgcagtcatgagcatgtatgcaagtatgtaatgacaagtgtagcaagtaattgatcagagtgtaaattgcaccagatatcctcagctttgtttcaatgtcctacttaggttcaccaatagtactattcagatctttcatggccttaaagtcgcacttgaggcaattgttagtttttggatgccatgtctcatcacagacaagattagcaatagttgcaacaataccatcagagcatccaacatttatcagacagcatttggaagttatgcctaacatgcttttaccagctagaattctgacgatggtaaacttatattatctgcagctacacaaaatttatttgttcattctatatattgataaagctctttgcacagntactggtattttctctcgtccttctcttcatcaattacaccatttagaccttctagcgccattgcagcatattgaacatgccttaaaagggctcataaattttttttcgtaccctttcgcacgcattgttttctcttttttagaaaacatgaaatnccggtgttgtcg

SEQ ID NO: 36469 - DNA, 561 bp, Oryza sativa
  unsure (1)..(561): unsure at all n locations
atcctatgcacattttggtgaaaagttagccagaggtctaaccacttggaacatttcctctgagcctatctctctcatctgattcttgcgtttttcctgtggtccaatcaaacggccattcatgtgtttttcctatgttttacaatcttctgttttaaaattgtattcctatcctgtgttttttctattactctgttttttcattcctacgattcaaatggacctaatttcagataggtaaagatggagtagtacttcctatatatttattactcactcggtttcatatataagatgctttaattttctctaagttaatttttctaagtttaatgagtttataaaaatataataattcttacaacaccaaattatatctattaaatataacacttaatatatttgatagtatctttgtttggtataaaaatattattatgtttttatataaatgtaattgaatataaagaattttgactttaaaaagatcaaatcaaagtgtagtacaacanagagagagatagagttgtatgatcctaatatggctgantcgcgtgtatt

SEQ ID NO: 36470 - DNA, 625 bp, Oryza sativa
atttacagaaataatctatcggcgcaaaaaattacagaaataggccctgccgccctagtggagggcgacaagctgacgtggcaaaccgcggctcgacaacgccgtctgccgccgtctgcgaaaattgcatttagcctagggcggcaaggggctaaatgcatttttcgcaggcctaaagagcatttggctcatacttttttgcatcggggtcccttgccgccctagatgcaaaaagtaccagccaaaaagtactaggcctaggctggcggcaagggttttcgagcaaaaaaaaacctccctctcccgtctgtcgtcaccgcccgtctattccccgtttgccacgtcagcttgccgccctagtggagcgcggcagggtctatttatataattttttgcgccgatggattatttctgtaaatattcaagaaaaaacatttaaaacgataaaaatttcgaagtgtcgtcgtgcaaagactggaagacttgtcggcccgggaagttgccacaactatttggagtgaggctgtcaaacgaacttggtttaaaaaaacagattgcatacttcattccagttgcaaccccctatttacccacaggcctttactactaactggaccggaataat

SEQ ID NO: 36471 - DNA, 805 bp, Oryza sativa
tcttgtggtgttcggagtcgtgcagctacacatacgaaagaaattgtgggacatggacttacatatgtaccatcctaatccaaatcaaaaacgggatgaactaatcaaactgaagagtgggcttgctagttgtacatggtagaatcagacttcatcgatgacaaacggaagtttgccaaaaaaaccaactaaaaaccaactcaaacacatatggtgtacaatttcagatctgcaactatgacgaccttaggcatgtatatgatgactccaagtatagagatggaggagggggtaatggatgaggatgatgactttggtgggtcaaaactatgataggcagaaaagaccttggtatgcttgatatagttttgttaaagggcttcgatcacaaacattaaatcctaatcaatgttttacatattagtattccccttacaacacacgtgtatttttctagtaattgtaataagaaaaatgatatccatgatgactttatcaatctcgagatatgtcggtccagttttttggagatagatgtacgtgcgtgcgttgataggaatgtgcacattggaagtgtccccgcttgtaatgtctttataaaggggaaaaacgcaaaatctatttcgagaggcatatcgatttagacttaacgagcgacacagacaattacgtgagaagtactagtagcgtgacagacatgcatgcaagtagtttttgctattaggttgtgcatattttttttcttcttatgaaattttctcttaaactactcatctgatctacgatccgattataccattgtgtt

SEQ ID NO: 36472 - DNA, 1742 bp, Oryza sativa
agggttgtattcactcggacccttatacatagttacatataagttacagtataattacactacgattgtactatatttatatttttcaatttttaagaataaatttgtcgacaattgtataagagcaggtacaatagcagactattcgccagctacaaccatattttaatgagataaaagatgagagagaagagtagcgggctacatatctgtagccagctgcagcacggactccaagacgtaatgtgtgtatgacaggtgggaccatatactaatagtatagtaagcatctattgtatgaattggctattacattggctatagataaattggagctagtagtgggctatactattaaacttgctctaagtaatcccataggagattagccccttcttttctagtagtttgcattagtatggacttggcctcacaacaccaattaactagtagttgctaaatggtagaataagggtttcgtctccaagaaaaaatgaaaacaatttatgctgcagtgaagcgcatgcatgaacaaaatgaagcaaaacaaatagaatagagcaagcattgattttagtaagaactcataaaccaactaatagcacccaaatactttcaagttagtgtatatattgtgccatgaaaattcatgtgaaaacagatagctttgaccgattagcgcattgccatactactatgctcccagatagagtagtgacatccaacaaactagcaataagatgaagctatgaatgaaagcctatggaatacaacttcatatatcaataaactaataataggccatcgctaagctggacgtaggtttattactcaaaggaaacaccaaacatgtacaaaaaccttcttgagtctaattggtatcccctcaggagggatggcaaacaaacatgacctaaatatcaagtttcgtattgccaagattttcattaacgacaaaaggaaagtaaagtttccgtaccacctctattgcattcgctcctatgttttattgactactaatatccttgtcgatcgctataatggaatgattatttttagattatggaatataattaggtgggttgtgttgtcctcataagtccatctctattgtgaatataatatctatctccataatgacaccaacgtctagagttgagtcctcctatcactgagagcagcaacaatgtagtttgatcatgtgtgaggacaatgggatgcatggtccctccaaccaaggtgataagttatctacaccgctagagggccatagatttggttgtggctttgtgcactatgctcatcattttgagtatcagtttttgcatttatttaaattatgccaatttgcaggatgcaacatttgcatcctctccacgtgtgtgtttatagttccaacttgtttattttgtagtcatgtacatatttttttactgtaattattatatacaaattataaatttaggatttatgacgcatttcattcgatgttgttgcaaagcatcaaccctataccaatactgaggattacttgtacccatattagaatgtgataatgcattcgatgtttgtacacgttggcaacacaaacatagccaaggggtcatgcatgtagttctctttttttttgtgtcacttctttttttctccgtgaaagcgttttctttttttttccagtgattatctcgtcgcatacgatgtttttcacgaaattttttattgtattttataaattgaatctg

SEQ ID NO: 36473 - DNA, 549 bp, Oryza sativa
atagcatgttatcatgagatttttttaaattacatatacaagttatacatagttacatataagttacagtataattacactacgattgtactatatttatatttttcaatttttaagaataaatttgtcgacaattgtataagagcaggtacaatagcagactattcgccagctacaaccatattttaatgagataaaagatgagagagaagagtagcgggctacatatctgtagccagctgcagcacggactccaagacgtaatgtgtgtatgacaggtgggaccatatactaatagtatagtaagcatctattgtatgaattggctattacattggctatagataaattggagctagtagtgggctatactattaaacttgctctaagtaatcccataggagattagccccttcttttctagtagtttgcattagtatggacttggcctcacaacaccaattaactagtagttgctaaatggtagaataagggtttcgtctccaagaaaaaatgaaaacaatttatgctgcagtgaagcgcatgcat

SEQ ID NO: 36474 - DNA, 504 bp, Oryza sativa
tctgtagccctagccatagacgatggcggacttgagcatctggagtgccttggcggatgcgtcgggatccaccttcgtgaactgaatgatttgacaacttgttggccacctccctttcctcgccaacgatattggtgaccaagaactcgaccatcctggtagcatcgattctctccgccagccactccctcccagcgaaacgggtgatctcagcaccgagctttgtagctcgaagtgagcacatgtgtgcaataaatataatggtgtaattgaatctcaacatatgaataattaactaggagaaagaaccatttgaagattactactccctccctttcagactataagtcattttgactttggtcaaagttaaactgctctaagtttaactaagtttgtagaaaataataataatatttttaacccaagaaaaatatattatgaaaatatattcaattatagatttaaatgaactaatttggtgttgtaaatattaatatattt

SEQ ID NO: 36475 - DNA, 2116 bp, Oryza sativa
tttcataataaatttatcttgggttaaaaatgttactattttttctacaaacttggtcaaatttaaagcagtttgattttgaccaaagtcgaaacgtcttataacttgaaacggagggactacatttttgttttatgcttggccctttcttcatcgccgatctttttttctctatagcttgcaagtattttcgcattaaacttaaccactgtcaaaaaaaattagaaatgtttattgttggatggagccacggagggagtatatacgaacggaggaagtagagtttttttaaagcatgggttgtacacatttacattaattaaaaaaacatttagtcaactcatgagactgaaatcagagtattaattaagatgtgtccgctgtgtgtaaactactatcttaggtgatgcagtttcattttttagggaaaaaaaaacggtacacttaaatcgtgagatgctgaaaccctctatttcataaatgaactacttgtcactgtccaaagttcaaacttttacaagaattattttttctagaaatacggtataaacgcagatgctcacaatacgcgtattatcgtccctatgaacacgcatatatgcacacgtttttctcctatgtgcatctcttttctcctatatgcatctctgaaaaactaggccgatatatattaatatcgacaaggtcaccacgagcgacgcaacatattttaagatcgataaagtcaccgctaatgacacgatatatcttaaaattgacgaagtaactacgagcgacacgacgtatcttaagtttgacgaagtcaccacgaacggctcgctgtcgaagggtacgtcacctaccataaaaataaatagctataaatgtaaggtagcacacgtgtcaagtttagaatttaaactcaggtggtggtatcataaaaaactagttaaacctaactagttgagctatatctcattttgcttttacgagaaaattatgcataaaatttatttgtttgcagggaatgtgtaagtgtcatgtgtgcctctgttctgatcacgcgtacatctgttgttacgatgttatcacaggattatgctatcgaaatttcgttcaattttattaaggttcactcgtggcaatttttaatttttttatgcaatcaggatgtgctccatcggctcatgtccatcctaatcagggctctctgttacggtggctggggggttgctatcctagtgttgacaaaaatattaaaagaacagaaaaaaaggactattaaaccaatgattaggaccaatatgaacttagttaaattcatggcatgtgggatacacaacatatatgttcccactagaattaatagtgatattccatttgtatgttggatggtagttacttttctaaagtcgaagtcaatttccacaacccaattggtctgagcaggaagtgacttatgtttaaggaagcaatagttttagtacagaactacaggcactaccatggaatattatggaacacttacataaactaggacagttatagtgcattattagtatagagaatttaggacatttcccttcaaataaaagaatttaggacatttccatttataaaacgaatttaggacatgtttagttgttgccgaaaaaagcttatcaggatttggtaatatggaactctgcaacagaaaatttagtgttgcaacgtagtttagtgttggcagtgatatctaacattgcttaattatatctactgttttattgtattcaaattatgatttataaatgatgctttttgtgcaaatattttatagcctttcctttgtgaatatcttgcatcataccttccttttggtatgacttattgagtacagtggttggtactcagttttactttatttttccccaccccagaagcagagaattgttcagatggtgagttctttgaggattaagcttgttccggacgttgaggatgcctgtggattatggaggaagctatgtgtttggtcgtgaagattaagtttatattatttgtttatttccactacgtttgtaagaattatttattattttttgtaagacgtggatctgtttatcaatttgttgtttgtatactctggctgatcatg

SEQ ID NO: 36476 - DNA, 2276 bp, Oryza sativa
actagggagaccaatatggaaacaatccgagtagtacttgtcgtttccatatagaacctactcgtccttccttatccggaacttcttttatatattctatatatgaggtatgattccgtataagacttggtatatggtggaccccgccgagtttagtcgattactattgggtatgtggtatccataaccatgacactaatattctctaaatttttcacatttcctattgcaactccgaattcgtaaaaaaaattaatgtatttttgagatttggcaaaaaatgccatatttatcatcataaggttaaacaactgttatatggcattcaagcgtcgtagcgatcgtgtcgaccatatgacctggaatggtacaggctagcttagtagttctttcttaatggctttatcctgcgggcttaaggacttccgcgaatcccgtgagcgtgggctagcgatgagggttgccattgttgcggaatccgattagatgatgtggatcgccgttgttgcgggatccgatgattcgccgttgttgcgggaatcacccgcagagataattgccagataggattgatgaaaagcttgtgaccttagtcttgccggcatacaccatgaagtgtgcttaggcgctggcgtggtggcggtgtagcgcgggcgttaaaatgtttaaggtgtctatgggtacagcgacacacctctgcagagtgtatgaattgtgatatgtcactccctatttcgggtagaaattacgaacgcggtaggaaaggaatctatcggaggttctaatacctgtggtgccttatatgtagtagattttataattacttaatgtaagcttttactacactgttttatgaacatgcataaaatttcttgttggattatgggatttggagatatatgtattatgcaggtggattatgggcttatattatttggattgctatagttggacttgttgagtaccattcgtactcatcccctatatattattccttgtagtgttgagctaacaattaggtgaagagaggattctacaaaattgatcaagtgttgcatacctctacatcaaattactgttgaaggtgatgaagatctataagagcaaggtactgttagtgctattattttggtaaaaactaatttcttatggtttctatttaatgggtttcgctacaattgtttctgctatgctactctggtgtgcccatttcttggtaagttggttcttactaaggaatgagccgtagaccggtattctacctcggaagtggaatacgagggtcgctacacaaggtaacaaaaggctgagtacaataagcataagaatagggaaaggaaaaggaaactggactggaataagaatagtgctcggctcgtcgtactgttgacggtccttaaatcataatatttgaccgtcaataccagcatataatagaataaaatgtggtatccaacttagtggtagggattattactaatcatttccactagtattggtgaagtatgtgtatgtaggtattttgaaaagaaaacacatccgtcaagcgacaaactgcacctccgcgcattcaggacgcatttacacggattggaggctccataagtcaattaaacaactccaaatgggcccaactatcatgccaatgggctgagggcctcaaaattagtgtccacgatgaaaaacgggttgaacggagccgtcccgggttcagccgaactgttcggccgaaccactttggtggctgttcatcgccatcctttacatggacagtcctgatttcatcccaatgacggttgcgtggtagtttggtcgtttcccatacctgtaaccgtcatatggaggctataaatagagctcctctcattcattcacaacacacaactttgagctaaattacaagaggctctattgtatcttttgtatattagaataaggtagagagtgaggaaaagctctggaggagtgcccggaagtttggcactcatctgacttctaccttgacgagtgtagctttctaggaggaattctggaggagtatcgaagctgtcggtacactctgctctaggttcggagaacttcttctataaagtaagcattcgtgttcctttcttatgttatttaaatactttgtttaagtaagatatatttccatctttgcgggttcattgtttagtattcatactaagtgctctagtactaggactctggataaagaaggaagttcctgtacaagtattagagtagtaattaataacttagatgtgatgtctagg

SEQ ID NO: 36477 - DNA, 2028 bp, Oryza sativa
aaaggagtgatatcctcatcagtgtatgcatattaatacatctttcaattctatgaaaataactgtggaaagtgaaaatatcaagttgcttaggttttactaggctagccacgttctagcaggcatactttccttcttgtacattttttcattaatacttcttagaaatctttatttttcaaatcaagctatcaaccttctaatatttgtaatgtattgatttatgccctcaaataatgcttattaattaacttaatttcatctatcatgactcctaatcagtggcggaggaaaaaaaatgaggtgtggcggtgtcgctggtgtggccgcagagaaaggaaaaaaacaatctcaatgcactatattatatgacgcaacattgtcccatcatgacgcaatctcaaacatgacaacaaacactagtcataagttcataaatcatccatttgccaaaagtgtaaataaaagaggcactgaaaaatacctcaagattccagctgtcagctcctcctcctcctcctcctcctcctcctccatctctactgcagcatttccgcttgcatgagtacttgcgcttgcagagccccggttccaaactcttcaaatctgcaaaacaaattacacaaatgcaattttagtatcaaatttgtatacatcaaagttcaaaccaacaaaaataatgttctgaaattgtcaaaatttgaagaatatgtacctctttgtgaaactgtcaaatctgaaattgtcaaactgttgattgcactcctcggttgctcacagctcacttgctcttcttgctgcctgccccgcgcctgcctgcctggccagccgctgcgcctctgctccacgccgctgcctcgcggcgccgcggcgccttgccgatcgctgctacctcgtgccgccgctccacacgaccgagccccaccctgccgccctgcgctgcggccccgagcctcaccccgtcgccgttggccatagtccgcactcctcagcgccgcaccgccgccgctcgcctgttcgatggggattggggagatggattggggaattggggaattggggaaattcgtgatagggtttcatcattcatggtcaaaaggtccatttacacaaaaacaagaccaatgggcctaattggttggcctggttcgctctctcgcgccgcgttcttgctctccctctctcgatcgtgttggtgcggcgtactgggaactgggaaggaggacgagccagggggagggggggaggtcgcgggaggatcaaggtatggcgagtgtcacacctcaccatacaagtcctccgcccctgctcctaatgcttacccgtgaagtttcatctatcatcactcctaatgcttacccttgaaagccccgcttgggattttccttgttgtgtcatttttttctagatttttaaaataaagttaagagcaggcactcacacacgcacaatcatccttacgaatgcacgcacaccccacctttacaagcactttcagaagactggctcggtatatcttgagatcgacgaaatcgtcatgaatggcttgttgtcaatcgtcatggatggggttgaggacgatggcggcggcggctcccgagtccttctgccgcggaaggggtcgaggacgatggcggctcccgagccctcccactgaggacgggagaaggtcgacgacaacggcagatctcgaaccctcctgccatggatggggtcacagacaatgatgatggctcctgagccctcccgctgagaatgggaggaggtcgacgacggcaacggtgactgtggtggctcccaagccctcccaccacggaggtgatcgatgacagtggcagcgatagtgatggaggatgatgagcgtcggagagagagcgagactggggagagagaggggtaggggaaagagaaggaaggggagggaggtgaaaaaaatggaactggcaactaggttccacgtgtagttagggctaatggagatttttgataaatattgtgacggagtgacatgtttcaatttccctaaat

SEQ ID NO: 36478 - DNA, 691 bp, Oryza sativa
cagtttatttttccaatgtttttagagcgagcgtgggcgcatgtctatgagtcgttcagcctaggagtggtcacgtgcaagggagtggtctgaccaaaagtctgttgtctgtaccacgctgtgggatggcgcgcggcatcgtgtgcgtgtgggctgcgagaagataggatcatgcgggccgccatggtcatggttgtgggatggcaggactgaatttgcgtgcgtgtcgtacaaacaggagcagctgtttttgcttgtaatttttcttttcaatcaaacatcacaaaacactacaaattcacagcacaaaacactgatgcccgcgtgcgtggcgcgtccacgtgctccggtgagtgctcaccatccccacccccacaaaatgtacggtctcgcaccggagatgtcgcatgggcgaggttacatcgagcgtacgtgttgtcaaggaagctagtggctccatagtacccaacggtcacctgcatcaactgggctgtgtttgatagtaagggttcccaactcatctctcttgtttttcgcgcgcacgtttttcaaactattaaacggtgtgttttttaaaaaaattatatacaaaagttgcttaaaaaatcatattgatctattttttttaaaaaaatagcaaatacttaattactcacctgcaaatggaatgctccgttttccgtgcaaccca

SEQ ID NO: 36479 - DNA, 928 bp, Oryza sativa
  unsure (1)..(928): unsure at all n locations
gtcgtaaagaagtggtcctcgttaggtcgctaggtcatcattggtgagagtcgttaagtcgttaagtcgtcgttcgtaaaattcgttaagtcgttaagtcgctaagacgtcgttctcgctaagtcgttaagtcgctaagtcgtcgttcgctaaaacgttctcgttcaaacgttccaccatgaagtcgncggtgaagtcggcgcncgncgncgaaggncagttatgtcgncgncggtggtgcgnncgncggtgaaggtgnaggtgnagttggcgcncancggtgnaggtgaagtcagcgcncggcggcgncgncggcggtgaagtcgncggtgncggtgncgncggcggtgaaggtgaaggtgnacttggcgcacgccggcggcggtgaaggtgaagtcggcgcacggcggcggtggtgtcggcgcccggcgacaacgacggccggcggtggagtcagcgacgacgatggcggcgaggtccggtcggccgacgcgtgtcaagatcgatcgagagagagagaatgcgagatcggaggcgcaagatttgcgcccctcaccttgagggaggcaatgctgccgatggcgttggcaagggcggatgagcgcggtgagcatggcgacgacgacggcggaggcggcggcgatgtctggggcggtaatggcgcgagaggaagaagatcgatcgtggagaagtctaagtgtggcgcggggaagccgatgcagtggatatttatacccggtaatcttttgtcctggttcgtggcttcaaccgggactaaagatatctttagtcctggttggtagtaacaactgggagtaaagaacaaatgtttactcctaaagatggttgttactactaaagatgtgtacacaaaacccatttatggccttcttaaattgtctaacaagtcgaaataaataccaataat

SEQ ID NO: 36480 - DNA, 1836 bp, Oryza sativa
aatgcacgtctttcttaaaacaaccataaagccaaaataaacgtacatacatctaatatataccggtggaaaaaaaatgacggtttttgaaattggattttctacaattgataaaatatactaatttacacatataaccaaatatatgttgttaaactagatctataatataaatacaaaatatccaatcagcactctttaaacgttctatcttttaattattttaaaattagctatccaatttacgatcatgttgtattttttagttaaatataacagatgatgttaaatacgtcaaaacacatgagaccgacatgtaataataatattatgataagtatttaaataatttccatcatattttcgggtgataaatatcactcgacgaatataaaacactaatttaaatgtacatattgaaaaaaccaacaaaaagaacacaaactttttcacgtagatctgatttgaaagtgttttttggtttttttataactatttgatagtatttgagaagtgagccagacgtgaaaatattatcaaaatatttatggccaatgaacttaccgtaacagagccccttaatccatcgtgagatttatggccatacatacatgtattttctctttggcaaatagttttgacaaataaacaatcacataacatgtgcaattaactatttatgatatattttcttatagttgaggaattcctcggtgtcagttattacacgaaacatgtctaaaatgaagtcaaataattttttaaaaatatcatccacacaaacattcgtaacaaaaattcaagcaacattaaacaaggtgtccgcatatatcaagggtccattaaacttcctataaacgctatcaagccaccatgtggctcctacaaatgctcctaagccgccaggtgtcgctctaataaattagataagtctaagaaatttcgataaaaaaaggaaaatatcctgccattaatttttattaattttcagttaatacggtggatccatcattttacattgttagatctatgtatgttaaaagaaaatgtcaagtacgtacacaactctccctcctttgttcacacgaacataggagtacacgtctctccacccctctcttcttccttctttctatttatagtagcaaaattatatatataaaaacacagtaactaaataaagagaatatcttataatatattcgattttaatttgaactatatttaccatattttggcatgtacatatataaaaatatcatttgacataaactcctttatatcacaactaaatagtaataaaatattataaaaataacatatatcatgctattgtaaatgatctactattatctctcctgctcactttcttatccatattttctagccagcagctcagtacataaacaatataaaatgctatattaactatctatgatatactaatagtccattaaactccttacaaacactctcaatctgtcatatagtgttctacaaacactcctaagacgtcatgtggcgctcaaataaactagaatatcctagaaattatgataaaaaattaaaactattgattttcctttaaataggtgaacccaataattgtaactactacatctcacagaaataaattcggtacccccatctcaacccctaccatatgtgtgcacgcatgcacgtacgtacctactccttccaccatcctactcacctctaggatccaactctcatcttctattttctagctaacacataattaatgtataaaaaataataatagctaaatacatgtacttttctcagtttatttgatttggtggggtattaataaac

SEQ ID NO: 36481 - DNA, 2082 bp, Oryza sativa
  unsure (1)..(2082): unsure at all n locations
gcgcgcattgaatgcgattctagctcggnacccccatcaggcccacacacgtaagaagcgtcatccacatcgtgcaaatataaagaattaattatcaaaaacaaacataatctttttataattgttcatatcgccgatgcttataatcatctcgtgtgctttggataaatcgtaaatatcaaacttcagccacccttcaatacccggtgcaacgcacgggtattttgctagtttttatagataaatatattaatatttacaacaccaaattagttcatttaaatctataattgaatatattttcataatatatttttcttgggttaaaaatattattattattttctacaaacttagttaaacttagagcagtttaactttgaccaaagtcaaaatgacttatagtctgaaagggagggagtagtaatcttcaaatggttctttctcctagttaattattcatatgttgagattcaattacaccattatatttattgcacacatgtgctcacttcgagctacaaagctcggtgctgagatcacccgtttcgctgggagggagtggctggcggagagaatcgatgctaccaggatggtcgagttcttggtcaccaatatcgttggcgaggaaagggaggtggccaacaagttgtcaaatcattcagttcacgaaggtggatcccgacgcatccgccaaggcactccagatgctcaagtccgccatcgtctatggctagggctacgctatgctttgccagggcaatagatgaggttgtatcatgggtgtgagaaatatgatgaaggatggcctcgatgctgcccaggccatgctgttggatggtgtcacttggccaaggggggtgcactggagaaggagggtgacagtgaggtgaatttgacaagcactacgtcttagtccatgagcgtcaataggagatagaaggaagaggtggtacgactagaggcaagaaggatatttctcctctagctttcatgatggtagtcggacatgtcatgtcacgtgggaaaagtggcaagggactatggatgcttttccattggcaaaaatttatgaataaaggcaaatgtggcatttgaagaattggcaagggtggcaaataattaaattctcttttgcagagacgtggagagagataccgctttctccgtttcctactcgctgcatcactcatccaagcacagtgagcccaaaaataacattgggccaatgaacccgagcccggcctagccgtccctcgtgcgggcgattgtcacgccttgattttttttcaaggatttaaacttatctaataaaccatttttagaatttatattcatgtgtaaatttattgacaagggaagtaaataagggaaataaaatttccttaataaatcatggttagtgttacttttcttaaattctccatgcctgaaaatactccttggattttctcaaaattcccatatctcaatagctaatttgaaaatacaaacatcattacagtagtaatcatcaaagtgaaaaccgctaaattgtcaaccactcatgcccgctcactgctccttctccccacctatcgttgcttctcacagctagatccggcaaaggtaagcttggagtagcccagatctacgatctgcgagctcagcactgcacgttgtagccaccaaagcaggcaatggtcccttcaagctcgggcagctagaaggctgggcgagcattgacggcaatggcgatgcctacgacgatcgtgcagcaacggagaggagactacaacgacgactcaagaggagtcaaggaagcaaataagggaggtgggatgcatccccgcctcgctcaccatttacaacctcgcatcccgacgttcgtccacgcaactgcatgcacttagtcaggtgagaagtgaagctcaatttgagcaattccctcttgtcttgctagtcagacgattttcgtacatgtagagcttatccctacaggccatgctagcactaccaaaaaattgatacaacaaaaattgatttcaaacaaaaaagcccataaaccaaacctacatggcctataggataagatctttgtgc

SEQ ID NO: 36482 - DNA, 1044 bp, Oryza sativa
  unsure (1)..(1044): unsure at all n locations
caacaagagagtcacagattattgtccaatgttttcgccaagggataggaaacattttcattgttcgccgctgagcctcgccatgttatgtccaatgcatcaagacaggctctctgatgaaaggatcgacaatggtccgcgaggctgttggtgacaggcgggtccctacagggcgtttggactaatattcacaaaaagatacatagcagctatttgtttctctcacttccaaaacttataaactcattacatctataaaaacccaccagattctatgtagatcataagatctctagagtccatatagatgcataagttataaatacatggcatgtggcatgataaaagaagtatttatagatgtgtccaaatacgactcgatacatgattatgcacattttagtctccctaaggaagactatgtagtatagtaccattatttgtctttaacgcagactctgtataagaatccgtcactctgtttctacaaaactctatatatatgtttatgtcaatctctctatatttattgattcaaatgcatatcaatgtgtatatatatatatatatatatatatatatatatatatatatatatatatatatatatgaagcaattaaaaagagggctagcagaatggtagaaaaatacagttattaccaataaaattttgtcgagatgtcttcataatgcaccctcaattaaaaataggaaatcccttgctttaatttcattttgttttgttagatcttatttatgaaacaatctaatacgcatgcccgcgcgtatgcgcgggctttcttcctattttatatacatgtgggcagtgttagaaagtcaaacgttatgaggcggagggcttattttagnnnngnnnnnnnnnnnnnnnnncgnnnntnnnnnnnnnnnnnnnngnnggtnctagagatctgcaatcatgctctgggnnnnaggnnnggcaggtccctttcattttcntnacagannnncggacagatcgaggaaaagaataactatcatatataccatttcttttccgtttc

SEQ ID NO: 36483 - DNA, 1587 bp, Oryza sativa
gtgttcattaggacgaatgcttgcatgccgcggtcgactctagaggatccccatatagatgttaattaatctagatatatatgtgtgtatagattcattaacatctatctatctatctattatatactaaaagtccattaaacttcctaaaaacgctctcaaaccgcatggcaatatctaatcttaccgttgatttttacttaaattggtggtcccaatattttagaccattagattagatttgttattaaaaatactaatatttttctcatttatacatacacaggataaatatatccgcacgtatgtacgattaaagagaaacaaagcttacctacaaatgtacgattaagaagacgtacttatgggaaaaaaagataaagcaggaaaaacatatgtacctctaacacatcaacgatctttaaaataagattttctacaattaataaaatatattgcttttaaaaatatctatgatctataaaataagattttctaccgttaataaaatatattattttaaaaatttacgtaaatatacgtagttaaactagatctataatataaatataaaatgtccaatgaatgctctttgaacattgggattattttaaaattatatatccacatagcactatctattattgccattgattttcatctaaattggtggctctggtattttagaccattacatctattaaaaaaaagtaatacatttatcatgtatccatataaaaaaatgtatccgcatgtacgtacgcgcgtacttacttaagaaaacaatagagcaaaaaaaaaatataagcacgtctaataccagtgggaaaaatcgacggtctttaaagtaggattttctacgaatagtaaactgtacaaatttatgcaaatatacacagttgaactagatctataaatataaatataaatacaaactatccaatcaactctatttgcacattacgcctttgaaattattttaaaattatatatccacatagcactatatacttaaattgatcctgatattttcgaccattagattagatctatattattaaagaaaagtaatattttttcctcctatatgcttatacatgagaaatatatccgtatgcaagtatgattagcttacctgctgttcacaataagaaaaaaaaacatatgcacgtacttactaaaacaaccataaagccaaaataaacgtacatacatctaatatataccggtggaaaaaaaatgacggtttttgaaattggattttctacaattgataaaatatactaatttacacatataaccaaatatatgttgttaaactagatctataatataaatacaaaatatccaatcagcactctttaaacgttctatcttttaattattttaaaattagctatccaatttacgatcatgttgtattttttagttaaatataacagatgatgttaaatacgtcaaaacacatgagaccgacatgtaataataatattatgataagtatttaaataatttccatcatattttcgggtgataaatatcactcgacgaatataaaacactaatttaaatgtacatattgaaaaa

SEQ ID NO: 36484 - DNA, 1368 bp, Oryza sativa
  unsure (1)..(1368): unsure at all n locations
aggaaaccatcacctcgctatggaactgttcgagagggaggcaaaatcatggtggtgctagctggctttgtggcttcctgggatagagctgtcgatggagaaagtaaggggcattttgatttatagaaaaaatgtagaaattttggaggatttcaattctatgaaaaaaaaatcctacgaaggtctttgaaacaaaagattgtatcctatctaatcctttaaaatttttatggaatgggtaatcctatgtatattttggaggaaagttagcaagagatctaacctcttggaacattttctctgagtctatctctcttatcttattcctgcgtttttcctgtgatccaatcaaacggccattttctctgagtctatctctcttatcttattcctgcgtttttcctgtggtccaatcaaacggccattcctgtgttttttctgtattttgcaatcctctgttttataattgtattcatgtcagaatcctgtgttttttctattcctgtgttttttcattcatacgattcaaagggccctaaaagggaaaaggataaggcctttcacagtgcaagcgtggggaatagagagactgagaagattggaataaacgagagatttcttctgctttccttttttccacttcccgtcggctcagcttttatttttttttatgtattttttttcttccggtctgtttggcttccatttttccccaagtataaaaattaccctatatttattgatatttcacttcaaatgaaatttacaaataaaacacaatactacctaagaaaaaaaaggaaaagtttgaattacacccctgaacttttgggtgagtacgacttacctctctagacctaaaatccagacatcttttacccttaactatcaatactagatgaaaaaccaccacgggtagctttgtaagcggttttgatcctacgtggtagtctagtcaataattcttttattaaaaagtcgatagggcccacctttagatctctctcctcattatctatttcgctcctcattatctatttcgcccctcagacccctcttttttttgtcagatgccaaggaagaaacgcgtcaacggctgcgtgcgtcccccggcggagggccaaggcagtggccaaccacaattaagaagccggaattaccaaaccaagccaagtgcattgttttaattcaaccctgtccccaggtaagcgttaagccaaattgtgcctccaggggggcggttaaccacggcatccccccgattcccattagttaaacgtgcaggttggtggtcggccggcccccatcgccccccaaaaaatatgaagttaagggtacgagctagctaatcaanttttcaagcccacg

SEQ ID NO: 36485 - DNA, 2046 bp, Oryza sativa
atatataaagctcaactagtcaagttataatatcccaaggtatcaaggaataaagtaatcaagaacaaaagggctataacaaacaataggttaactccacccaatgacattcgaaaataaatgcaaggccaatggtgaggaccatgattatgctcaaggaggaacggacatctagcatactcgggatgccatgtgataatgttggactagagcttaggtacttgagattcaacttcggtcaacactggaatcaagactatacttagggaggaggtgaggtcgagacagtcaaagataccgggtgatgaatttggaaacaaagtcacaaacggttggtgacgaaataactttgtaattgtcagtatatttcatcaacatacaaatgaactaggatttctactcctactttgagtaggaggtattgggtataaatagatgaaggattgaggctcgaaataatatagccgtaggtgactcttagagataaaagttagggtttgttttgaggctacaattctagttcatgagttgagagatgagtgctttggttgcattttgtaaacacaatttgatgcaataaagttaatctatcttcaatagtatcttcaatttgtgttttttttggatacgatagtttgaccgcagttcattgggcgattagactggcgggcaggttgactggcgacaaagagttctgaccgacttactccataaggattgaaggttctttttgttttgcaaaaaaaaaaattatgcttttgatgttcctatcattcacctcccatctggtttcttgtattcgatcctacgctgccctcggccccaaggtcaccaatggccacctctctgcctccctcgagatccggccacctcctcctccaccctccactccaatgtcatcatcgaccacctctttgccatccacgagctccaggccaccagatccggtctgcaggtggttggggaccacaggttctgaatgccttgagctctctacctctaccataaggtcatcgttgtcatcaccggaccaagcctatcgttcaaaactctatgaagactactgcaatggcagcgaccacagccaccaccatctccaacagctcatcaagaacctagcagacattctccctcagctcgtctatcgaccacgccaccatcgtctcttacaccaactacaacaagcacatcatcaggaattttgagccgtgattgtgatcattgagatccaccgatttttttccatagattttttgtctttagagattattgtgtgttagaataggtgttgaatatactagtccgtggttacagttgaacttggagtggtaatagctggtagggggtggagttagagtcggactctataacctggcaactctcttaaatagaggggacaccacaatgtatttttggggactagaatgcagcgtacacacgtagggagataatgggggccaggtctgggacccgttgtggctaggagctctattgtttggggaggagcgcccataactagagtctcggagatgtaggcttcggctttgaacttcgctaacaaatattgtgtgttactatattgtcatctagtgtgtcttgggtgatcgactactgaagcgatcaataaagttagttcacgttccactatattgacaaacttttataacaagtggtatcaaagccgtatgtttcagaattggattcagaagacatgtcgaggaggaaaaatgaggtgagatcgcacatcgacagaatatcgccaatcgtggcgaaaggatcgatggcgacaacgaggactttgcggaggcgatgacctcactcacgatcagactggcgatgtcggcacgtgacccgaagacgatgccggacgtggccaaatgcgaccaaagagatcggagggtgacgctattgacagcgctgaccattcatgcaatgattgtggatctattgtggtccggaggctgttgcttaagtgccaaacctgcgagtatggtgagtgaacaagaaggatttcactgccgagtgttaggggacccattggatgtg

SEQ ID NO: 36486 - DNA, 608 bp, Oryza sativa
aaggccttgaaagaagaatgttcagactccaaaaccattaacatcgtttcgaactttagacgatatattagagaatccaatttaacagcacaattttttggagcaatgcagcatagagttgggctgaaataaacagctgttacaagctcaaattacaaagcaaaaattgctcaaattatgcggatgacgagatccagtaaaaaacaaccaaaggatttaaaattcatcctatggaaataaatctctattttaaatgactaaacaaccttttcagatttttaacaaataccaaatctaccctatcatatactgatactgatagtatatacttacggtaccgtaaaagttctctagttaaaagggcaagggccaactcgagggtatttgaggcctaattcttggccgtcattgctattgtatcaaattacttcaactcctgtaagctttaattcgttcccagcatgctcccacctaattattgaccacttatccgctctctcgctcctacgaccaacaatgatcacttgctcaccaccttttatcaccttttatctctactatgaatgtttattcatggtttcttttgaactgtataaaactagtcacaa

SEQ ID NO: 36487 - DNA, 1645 bp, Oryza sativa
aaaagggagagaagaaatgagacacgatttactttttgatataattgaatcaatcgctaaatcaacggagtatccttgatttacttttttctctacagcgatactgatagctactacaatacaccgatcactggaaggatatattcaattcaaatgtattgcctatgttttactagttaattactcaaatgccatcatgctacaataattttgttccgtaccttgcccctctctgatcaacggtgcacattatttcaccttcaagtaccttgcaaacaccgtaaaagatctcttatcatttacatatgcagagtaatatctttcttaaagttggttctcattaagttccatgaagattattattgttaaaaatataataatttcttatgatccatatatgttccaagtaagaatggcaatagacttgaatgaagaagggttttccaaacttattttctgtatgtcaaatcatattaataaagctcacatttgtctgtcaatcactccaaacatattgctagcatcactgcatccctgtaggttggtagatcaccgtagaatccataggaggtgttctccattgcccttcaccgcgattcttacctcccttcaccaatcacaccactaccactcgattctggccgatgctcggcggatgttggtcaccacacctgtcccttggggcaggcgttcggttttcccagttttatctggtttgtcttttcagtttctttagagttcagttttcactagaaagaaaaagacaacgaggcaataaaaccaagaaaattcggttcagttttcagtagaatccgaagcaccgaagaaattgataggatgcagaaggggctgggcaacctctcggcagtccgtaccgtgctgtgctgctcgttgatttccgttaatctcatgggctactctgcagtggcatccgaagcatggcgatgctatcctccaccaccaccaccacaggcggacggacgtcaccgatgcctcgttctgcttcgtcacagcgtccgctgcatcggttcacagcccccaggttgccaggcctccggcgctattctttctgtagctagcattcttaccgcatggctccactccatcgcaagaggcactacttgagaagtgctcatctctcccggttcgcaaccccctttactcccgggtagcgaatcgggagggagaatccgggactaaagatgacggtctttagtcccggttcaaatacccaggagtaaatctccatctttagtcccggttggtgacaccaaccgggactaaagatggctgagccacgtgaccggcaaagccataaccgggactaaagaattttcttttattttttttaatttggttgtgctgcctggtgtacatatatatatatatatatatatatataagggtgcgtaatagctaaaatgctcctctcactttcccctctctctctccgctttttacggatctagcggcgcagcggaggcaaggaggagagcgatggctgcggcggtcgatggagcagttcaacagcggcggcgtgccccgcctactgccaagggtggcggcgtccaggcgacgggcggccgacttaatcaccaccctctcccgccgttgctcgaggtgtgttgcccggggttgtcgtcgg

SEQ ID NO: 36488 - DNA, 1810 bp, Oryza sativa
  unsure (1)..(1810): unsure at all n locations
atgctgcntttgaacaaggatcacanttagacaattgttatgcgcaaccattggcacgtgttcttaagcaaatttagttacactgttcatgaaaataatgcattcggattcatctgatgcttcgatatttcactacactatggaaattaattaatgggtgacactgaatcaattgtttatgcatgcttaagtattctcaactctactacatgttgtaaataaacttttatcacttccatgtgtcctctgattcataagctttattgatttgtaacaaaatttggaataccctgtgtcatgtgtatgtataattaaaatactacctctgccaatgccctggtaataaaaagaacaataattacaacacaggttacaacatcggaatttataaaatatttatgctgaagtttgtacccatgattgcctaatgggtttgtcttcctcctttatcattcgagaacttttacggtgtttgcattccaaaagggtaaagatccaacagttctcaatcacaggtactatgtaaaggtatttaaatattagtatagatacttaggtactaaggataaaaatataattttgttaatagagaaaaagggtaaaattgtccctccccccaaattataataggtaccacgtaggtacgactgtacgagttaacatctacctggtaccacatgttcttatttgcgtctcttttgtgtgatttcctgtagatttacgttgtgtttgagttaggtcatttacctggcactagtgtaacatgttcttaattcattttctctagatttacttttttgtattctttgatgttctcttttgcgtgatttttttagatttacatattgtgttcttataacatgtttctggccttgggctagcaattggtgacgaatgtactcgaaatccatataattttcattttcgtcatccatgaaagcctcattttcatcaccaatcccagcttcagtagtatccatgtcatcctcatttaggtcatttgcttgctcatgaactagttcccgcaagaccaacaaagcagatggagttataaagagaggacctttccgtagatctgtagcacatgcgtgaattgcactcgcagattaggcgaccgcgtccatgtctagcggcaagccggtgagtgccattaatctggtcgttagcgccatgtccaacctggggaagaggaagatggcaacgggtcctcaccgacaatggcgatgggagagacgcaggttgcgctgccgcaccgacaccggtgtgggcgatgggagggacgtaggtggcagcggaggtggctgaactggttcaaaccctagaacacgaatgaaacaaaagggagagaagaaatgagacacgatttactttttgatataattgaatcaatcgctaaatcaacggagtatccttgatttacttttttctctacagcgatactgatagctactacaatacaccgatcactggaaggatatattcaattcaaatgtattgcctatgttttactagttaattactcaaatgccatcatgctacaataattttgttccgtaccttgcccctctctgatcaacggtgcacattatttcaccttcaagtaccttgcaaacaccgtaaaagatctcttatcatttacatatgcagagtaatatctttcttaaagttggttctcattaagttccatgaagattattattgttaaaaatataataatttcttatgatccatatatgttccaagtaagaatggcaatagacctgaatgaagaagggttttccaaacttattttttgatgtcaaatcatatt

SEQ ID NO: 36489 - DNA, 1362 bp, Oryza sativa
  unsure (1)..(1362): unsure at all n locations
gcgaacatgcgcgggccactttactaaaattaggatgggttaaatttgtattatgaatctttataatgtgaaagtgattattttaaaaggtaatagtctgaattacaccctttaaactataataaaagtgtggatgcgaattgttccggttatatctaaactcgtctatcaccatcattcgctaacatatgagttaatatattttttgttttgttttttcacctatgcatgttcatgggtaatatacgatggaataatctataatgttaataattagcatatcattatatagatgggaatgatataattaaaaagatataatgtggttacatgcgacattttcgatgctatatatctatgtttttcctggcaaatattaagtacatatttttttcctctttttttgacaaatattttttctctcagtgtaggtgtgcgtatgcctatttttatgatgggtgtccgcatgtttatatatgcgctcgagattgcctttaacattaatagtaaaaaaaatgctttcaagaaaattggcgaaatggcgtgtaacggtgctgtgcagcgtggcttcttcaacagccttgccaggagtggtcgctactcatatacacaatttgtggaaaatctcagagctgcaaagaaagaaagagaaaactacttgatggggctgatcgtatacacactttctttttttcctttataacatctgttgtgtacgtacatagtgagggattacttgaatagatataatataatgattgaaaataatatatccactggtttatgtgtaaataaacagttatattttgcttttcttaatatattttttcttatatgatcactaatttattagagcgtcatgcggcatcttggaagtgcaggaatgcttttagtcatagtcgtaatggattacttgaacatatctaatctaatggttaaaaataatttatccaccagtttaagtgtaaatcaatggctagatgttttactttttcttataacttttgttagatttaccctaatttattagagcgtcacgtggcatcctaggaatgtatgtaggtgtgtggaccccctataacccaataccaatatatttgtagtcaactattatttgttgtggcttggtggtatcaatactaacatatcatttgttgatggtttctcacttagtattgtccattatcagtacttgataacacactgcatattggggatcctctagagtcgacctgcnggctacaaggtgagcattcaacttgggggngnggggngtggtgggagagaaatntaagcagagtattgtnaaagaggaaaagatagggtnanntaagatagtanaaagaatgatatggatcttta

SEQ ID NO: 36490 - DNA, 879 bp, Oryza sativa
  unsure (1)..(879): unsure at all n locations
gaaatttgtggttggtgtaaaggataaataattatatctttttgtaggaattagtgtatttggtggcgncgcgagaatagaanttancgtgttcnnnnnanatancccccccccccccagtggcnttttgaattcantatcancttcttgcaagccngcagggcgactctagaggatccccaaacacttaatctttatctttatcttcaaaaaaattaaacaccaccttaatgtaaaaaaatggggcaccaataatattttttttggtggagctaagaggtaactttttacgtcagtaagagaaggagtgaggagagaggagtgaataagaagaattctttttactctctcaggcttaaaatatatagctacgggggatgtgaaaatgggactttgtgaactactacctccgttctaaaatataagtatttttagctatgaatctaaacaactgtgtatccagattcatagtcaaaagttattatattttgggacggaggtagtaacttcctctttctacctgtaacagtccacatcatcccaaccaaaaacatggggctctgcagcttcacctaacccaagactacagtctacaatgagagatttttttatgtccgaaaactttttccgacatccggttaaacgttcgatacgacacccatgggccaaaattttttttttggtgaactaaacaggccttagtcccttaaagaaaccctctaggtgttaagtttaggacggatgatttacacattttgaagcaggagactggagggaataggaggagctggggagtggcaaggatacgagcgggacgagtacagagccaatgttcagggaagaggcgacaattattattttaccatcagggaggcaggg

SEQ ID NO: 36491 - DNA, 1025 bp, Oryza sativa
  unsure (1)..(1025): unsure at all n locations
ttcttgaaattcaaattcatggggtgggcgatgcggtgatatctaggccagtgatcatggtgatgtctagcagggtagnagtcatcggccccttgattgaacaggaacgcattgagggtgttggaccacaaatacgttgcagaagccattaggggttcgtccttagccgaatttgctaaagtaagagcaagggcttggccgattcctagttcatcccagtgaacctgcttgctagccgatacacgcttgcaccatacgagccaacttctctcaggagaacttttctcaagggaaggccaagacttgaaagtattcttccaatgacctagatttgggctggccaatctaaagggtatcctattagtttcggcgctaatgaactcagtggggttagaattgccgattgggccaagaaagtactgatgctcgtgagacaaactgggaattgcaatcagattagagagatgctacagatgcaaaagagaataaagaagaagaaaataagatgagatagaggaaacccgatctactgcacaaaatagagatctagccgatgggtgctcacctctgcatactttgccgatggcgcggcggatgggctgacggaagtcgacattgctgcaggcggaagcttggccggagttgggatcgccttgaggtcgcctttttgcgccaaggagatcgccggagaaagagaagacgaggtttgtttaaccggtgagaacggaagtacgcgtgtcaaatttctcgggggtgcgagttagtatttaaagcgcggcggtaacggtgggaaaacaagcaatgagcgatattcttgtacatgaaaatatggcaaatccgcaacattaccaaatattccagacttggggggcatgtgttaacgcccaactttggtattttcggtatcgcacatgaagatagacctcaagcagaatccaatacatagatcgttccggaaacagagcaagaatcggcagaagttcgaatcggctgcgaccagaatcgacagagttcgagtcggacaa

SEQ ID NO: 36492 - DNA, 730 bp, Oryza sativa
  unsure (1)..(730): unsure at all n locations
cgtggcatganatgcaatgagaatcagcatggnacccancaggccttgtctttataatgtattaatacaaaggcagatcgatgaaagaaatatatgctcaagcacaaataaccacgggcgatcgagttgcataggcagatagcttggatcactgctcgttacccatatcgccactatgcaatacccctcatcagctaccaagtcttcatggctgcttctcgtcgtcataacagcctgcaccggcagcttattcctcgtcgccgatgcactacatgagcatcatcatgggcggccaaatattgccggcgcgacctgcgtgccgcacgagagggacgcgctgctggccttcaaggaaagtgtcgtcggcgaccccgtgggccgcctcgcttcgtggcgtaccggagaagactgcttccgccattggagaggtgtcaggtgcagcaacctcaccggccatgtccttaagctccacctccgcaacacggatggtggagaggcagctatgtccggcaaggttagtagctccttgctctccttgcagcatctgaggcaccatgatcttagcatgaacaacctccaagctctcccgagatttctcaggatagccggagagggtcctatcccagagttcctattagaataattgggctaggcccgatttattctattaaaatctcaaaggcccataataagtgttaaggataataataccaccttaggatttaagcga

SEQ ID NO: 36493 - DNA, 700 bp, Oryza sativa
  unsure (1)..(700): unsure at all n locations
aaactgggagatttttgttatcaagcttctagctagttactctatccagtttcataattccttacgttttagacaatggcatggtctccaaaatatatctttgaccttggtttttttattgtaacatatacaataaataaatgcatgtttacttttattatagtacttcgaaacataaatttatatatgttgntctagttcctttaaacaaaataattttaaagttactgatagtcaaagttacaaaagtttaacctcaacattgtctaaaatgtcaagaattatgaaaccgaagggagtaaacccttatggatttttttgaggtaaacatcaagaagaaggataaggtttctaattattaagaagaaaaaagagttggccttgtttgaggaaaaccaggcctgaaaacaacataatcgcattgtaaattaaaggaaagagtaaagggcacgaacagttcctaaacttgtacggccatgtcatctagatccccaaactatcaaaatatatatttagataccagaactcgacaaaatgtgtcattccgatcccaaactgtcacagcccttccaagatcctatatggcactgatgtgtcatgccacataagcgccaacgtggtatcatcaataactctacatgacaaacgagctttcgcgtctaaaagagaggaacannaaagcaatgaaaaggaaagagag

SEQ ID NO: 36494 - DNA, 700 bp, Oryza sativa
catcaccacccactcaaaccccatcgccatcgccagccgccaaccccgctagatccagccaaagcggcagcccgatctgggtgtgtgctccgccgccaccaacgggcgccgtcgccaccgcaaccgaccgccagttgccacctccatcactcagccccgccgccagccgccaccccgtcagatccggccggaacgacgcagatctagatggttgccaccgccgctgcccaggcagctcccccggccgtccgggtgcatgctgggcaaagccccgccaccgccgtccttgcggccgcgcggctttgccggcgcctgctcaggcggcggcgagccagggaaaggagggggaggagggagtcggcagcggtgttgcctctcgtgttcgtgttgtgaatccagaatattgaatgcttctccaaacatgcatgtttgcgcttgaaatataatgtaaagtgacatagtataagatatgaacaggaccaatccatgacagtttgaatcgaagaaacgtgcagacttttaattttgtccaataacagggcaggctctcgaaaagcttgtaaattctgatattgttgatcaagataattttgttttcgaagaaccttcgcaaaggacatggagttcatgccaatttataagataaacaataataagatgtagtgttaaagtcatattttacaagttactagaaaaaatg

SEQ ID NO: 36495 - DNA, 675 bp, Oryza sativa
  unsure (1)..(675): unsure at all n locations
attttccaggcggttggtaaatcctttatgagtttatttacacagattttacaccacatatgccatatatatatttctaggggtggtgaaaccatgtgtgttttagagacttaagcatatctgttaaagcagtgtgcgcatggcgtatgcctaatactttggaaatttctttattcacaacatacaagcttctttatagctggtttgctatgtgaattttcaatgatgtagccaactttaggttacactcattatattttacaaagcagtcggtatatcacttggatcatgttattgagggattcataccgcatatgctatatattgatatcaaggtacttggttgattgcaattatcaaaaccactcggttgggtggattatttattccttgactatatgcttagtttggtcagctaaacacatagtccggggctacacctattaggtgcatctaggcgatgcacctgactttatttttcagcccttcacagtcttcatatttggtaaaagtactcgngagaacatggcaaagatgattgaaagcacttgctttagagtaatctggntcgagagaagatatcctttcgactatgaaggtctcaggngctactgtgaagattattggtaccccatacccacacggcatgggtattcgactagttataagggataa

SEQ ID NO: 36496 - DNA, 858 bp, Oryza sativa
  unsure (1)..(858): unsure at all n locations
agcgctagtactagcttcgtgttgaatccagcaatgccctttactgaaggtgccctcttaggagtttttcacttactagctactccccgaattttttttatctaaacacatgcaaaccaccaattacaaatgtgagcacgcaataatcacatttaattatttagacaagatgctcatatgcagcgatatgtttccatcgaacgagtagcccaacaaactattgggccgtattgggctgctgaattgatcacgttagcccaacaacccacctctaaaattggttagttgcatcattatggggagttttctccattgttcaaatcattcatccggtagtatatcaaaatcatagggtttagggttgcatacggcgagttttattcattgttcaaatcacaaagaaaatacaaacaatgcggtattgtactactaaattctcaatactagcgattcatattagtcgatcaattgtttgctgcatgctagtttgctcaatcccatgtgctcagaattgatgaattttagttacactatatccacgctaacactgttattgccaaaggttatcctagatggtttatatatacgcacaccatcatcgtgttaaggctaccgtcatggcactgagccaaagctaaccgaataagaaatgagggaggtgtaatagactaccgggccaaccggatttacggtggtgacatgggcaggttgattagaagtagaattctaacttttgcgtgctcagatttgtaattagtggtttgcatgtgttcagataaaaaaaattcggagctacccctctgttccacttctaaaatttaaatttatcctgggtacagngcgatattcaaattcaat

SEQ ID NO: 36497 - DNA, 735 bp, Oryza sativa
aggtgtacaccccgaaccacttcccacaaggctactaggtggtcaatgaggttgactatgataggtgggtttgcttcaagggtcaaatcttgtacccaagcgtcgttgtcctttccttggggactttccttcctttttagagatcgcatagactagcgacatgaggtctttcggtctgcgcccatcaattcatgtggagtcctagaaacgcactatgtttccatcactgacagtgttggacgttggtaatctgtatcatcggaggttgttaatttgatagtcagtcgtgataaacctgctgttcttttcagatcaatttgtagtgtcaatccttcattacatcacagattcctaagctacaaggaagaggtcacataagtatacgccgcaatcgaggatcagtatgctcagagcatgttcacttgtattctgttctggggggtaacgagtcactccttgcaaaaaacatcttgacatatctccacatgaaacttcttatatgatcactctcctcattttgcctttttcccatctcttcgttccttatcaatacctcccacccttacctcgtatctccccgacattgcttaactatcatcacctaaccgccctctatctctcgatacctaaatgcttgtcacaacatcatgtgtccatcatctcaacgattccactctatcctccctgacacctcgtcgctagtacgaccgtctcatgtctacgtccaccaacccc

SEQ ID NO: 36498 - DNA, 730 bp, Oryza sativa
  unsure (1)..(730): unsure at all n locations
cagggccaatgaanaatgagatgcgagctggtacccatgaaaacagcccaagaagaaggccgaagtccattgtccactccatccaagtcggcgccgctctgaactctctggtagtaacccgaccgaagcaatcccactgccatctcggatctccccaccttcctccgctccacgcaaagcacccgagtccccccaccccgacctcccttccgcttaaaatcccccacccccgcgcgccacgccacccccttcttcttggcattcgttctgaccccgtcgtggggcccaactcccatgaggtgcaccttatacccccggcgtgcgcagcagccatgggagctcaacagagcgtcaatgcggggaaagggccgtgtactttccctgtctcttccttggattgggatgttctgcttgctgtgtgtgtgcgtgtgtgtggctaacgtgtttgtggaaatgccgcaaccaatgtggatgtgcacgtcgacctcacccacatgctctgcgaggcgctcctgctgccgaccatgaggtgctccggcttttgcctattaaaggtgttttcggaggcacttggatggccagacatgactttttggttgggtgatgtgtttttggggttttttcaagaactttggcgccaattttctgccaaatgtcggaagggcaagcatgttgggttggcttccggtggcgaaaattcatttttggataccggcccccagacatttgc

SEQ ID NO: 36499 - DNA, 739 bp, Oryza sativa
  unsure (1)..(739): unsure at all n locations
gccccgtgatganttcanatctnatacgccangcctgcagtctactttatagatccccctttatcaatacatactacgctctgcatccagatagtgcgcacatattactatttgttctccaaagaccacagatgaaattaaggggatgttggatgttacaaaatcaaggagcgactgcaggcatgtaaacatgagtatttagatgactccttgggctctaatcaaacatttaatttatctctttatttaagtcttagatgcataaagactacaaataggaacaacttatttggaaaaagttaaatgtgaaatatatctaacttttgtggatggaaggaggagtaaactacatcaaccacgaaacacaaaggctcaggtaaccacactaatcccctccttcctcctcctatctgggagctagggttaggaggcagcagagcaccttcgacaccgtcttcgaccgaccgatcgaccgaatccacgaacggaacaccgaaatcgggagggatccggatgctgcgaagcggctcgcccgtggagctaggacggcgagcactaacctgctgcgaggagtcgtctgcggtgcgggggcggacgtgtactacgaggtggggagggaagcctctcaccacgcggcaatcgtttgcgttcaccgacgccaccggcttcacctcttgacgaatctccttctcagtcttccgcgccgcgtcattgcctttcgtgaagatttttcttttta

SEQ ID NO: 36500 - DNA, 980 bp, Oryza sativa
atcgaatctttgaacatatgtatggagcattaaatatagataaaaaaaactaattacacagtttgcatgtaaatcgtgagacgaatctttcaagcgtaattagtccatgattagccataagtgctacagtaacccatatgtactaatgatggattaattaggctcaaaagatttatctcacggtttccagtcaagttatgaaattagttttttccattcgtgtccgaaaaccccttccgacatccgatcaaacatccgatgtgacaccaaaaatttttatttcaccaactaaacagcccattctttttccttttgctatagtcctcccctttgtgcgtgagaggaatgaattaaagattctatgtttaactggtcttcttcaatcaaggcatgactttttttgagttggatttgaaggatatggggcatggcatcgggtctgcgagattgatcgccgcaagactgaggggctgaggcacaagcagaggccaaaatttcttcttttttttttccgtgaagtactttccttggtgtgctgtgatgagatgattaaagatcaagtttctgccttaatttctcaattggagcatgatttttcatgagttccaatgttttaagaatggaaccaataatgttagaatttgctttatttcaaacttagaagaatgtgcgttccagagaaatcaagaggccatggtaggagaccttgccatatactctctccatcccaaaatgtttgacgccgttgactttttaaaaaatatttgactgttcgtcttatccaaaaaatttaagtaattattaattcttttcgtatcatttgatgtattgttaaatatactttcatgtatacatatagttttacacatttcataaaagtttttaaataagccgaacggtctaacatatttaaaaaagtcaacggtgtcaaacatttagggaaggagggagtatttttttaggaagaccttgccatgtat

SEQ ID NO: 36501 - DNA, 759 bp, Oryza sativa
  unsure (1)..(759): unsure at all n locations
agtaaattaatgtggtttatgataatttaaatttaaatagtatgtagaatggtgattcaaatgtaaaaagtaagatggtatgactttatggaagaagaaaagaaggaagatagtttggaccgtagattaatcatctaaaggctaaaaacaattgatgtgatatgacttaattagagaaaaaaaaagaagaaagataatttagaccatagattaatcatttaaccactaactaagtgaggataaactatatatgtatataggatatcataaaacataataaagatatacattgaaacattatgtgaattatgttggatcataatttaacatgtttgtatttgaaaagctgttaaattataaaaactataaagatataacatgtttgcatgatgtttaaatgtgataattgttagtggatgatgatgtgtcatcttgttaattagtggattagtggatgatgatgtggcatcttattagtggatgatgatatggtatctttgtatgctaagcttaaggagttagtgaggataactttatagtagtaagataggatttcttgtcagggctcctttgaacctgctcatgatgttgttgttttccctaaaaaagaacccacctgtaatgcacgcaatattactggataatttgtaataatcagccgtgatcagagctagcatatattgttttcttgtcccagataagggggatcctctagagtcgacgggcnggcatacaggatgagacatatcaaggagcagg

SEQ ID NO: 36502 - DNA, 849 bp, Oryza sativa
  unsure (1)..(849): unsure at all n locations
tgaaaccgaggttaaggtgttgtagatttgaaaggttaccaagctgaggaggcactctaccaaacaatatggatgtttcagacacatcaagatatcttatgttcttcattgaaccaaagtactctgggacatggctggcttcaactggatagccaaacttgttaatagagacatcaagctccacaagttttgcgaggtttcgttgtgtcaatgactgagttttgcctggaagcgaggagcaagaaatatggagggccaccaaagatacccaagtatcacaatggtggagcgacaaggaatcagggtagtacaacctacacgaattagtgcgactactgggtaggtccgtcggtttggcacgcaaaccgaggccaagcaagttaacgtgtgattctaataaagcaagttgcaaacaaaataataatgattttctaattataggggcaattggtcaaagggtgacttgccttgctcaaggtcttcacgaagcttcacgaatcttcgagaaatccacgattgacgaaaatccggtaaccgcaactatacgcaaacaatcgaaatcctaaacaaaagagcaaaagaaagatcctatttagactaattaatagttccattggatagatctcaattttacggaattattggaagtggaacggagtcaatcggtgttacgaatcgggagacatgaattttctaaggattatttgattttctgtctaaaggaaaaggaattattaattcccttgaaaaagataatggaggagggaccggaatcagacttttaggccaagcgtgaggcgcagcccaaggaattgcgtgcgcngtcnaggcgagtgggtcngcgcgcgg

SEQ ID NO: 36503 - DNA, 2000 bp, Oryza sativa
  unsure (1)..(2000): unsure at all n locations
cgtggnccnattganattttcgaatgtcgagctcggtaccctgctttatttcaaacctagaagaatgtgcgttgcagagaaatcaagaggccatggtaggagaccttgccatatactctctccatcccaaaatgtttgacgccgttgactttttaaaaaatatttgactgttcgtcttattcaaaaaatttaagtaattattaattcttttcgtatcatttgatgtattgttaaatatactttcatgtatacatatagttttacacatttcataaaagtttttaaataagacgaacggtctaacatatttaaaaaagtcaacggtgtcaaacatttagggaaggagggagtatttttttaggaagaccttgccatgtatataggtgaggtatagcataatgttctatattgatgcaactttaggataagggatattttacgttcctctgattcagctcatgctgacaagttatgaggaacacctatgtcacgtccggagttttcctttacttaggtttcaaaatcaccaataaattattaatggaaattacttcgttaatcatgaggaaaccttaattatcaatgcatctaataaccgaaaaagtcagagagaatttttcccgaatactctttgcgtttaaatcattaacaggatttaaagcagaacgatcagagcaaaggaaataataatcagtaagtttaaaagtggcaagagttgaattaatagttttccctctcggccggttttggtcatgaaccatgcccggttcattcccctttgtccgttctcagttttgttttgcatgacaaaccgaatctcttttgtttccggtaccgttcatgttcttttcctagaacgacaccgcttttccttttctattttggaaattccctccaatcctattcctactccgaatccctctcctccttttcccccttgcgccagcctccccctcccccaccaattcggtcccctccctccctgaccaagtcngcttcccccctctcccccctctcccccctagccggccccacctcattttcccctctcctatataagccatcatatcccctcttttttcccacataaatttattggagtcctagccaaaaccttaaccacccccttgcgccgccaccgccttagccgccgccgctcctatcgtcgtcgccgccggttgcaatcgccgctgtcgtcgccctcgcgtcgccggtgagctcctcttcaattcttttggtatgattttacccatacatattttttcaatcatctaatctactcggttctaggtttaatccagtcgtcatcgtcgtcatcccggaggttgccgccgtcgcttccatcgttttcctcgccgccgtcgtcattttccggtgagatgcccctgtcctgtctttgtttagtggtcgttttagtttcctaacccctaaccctagtgttaacgaccaaatttggtatttttcgcatcaacacctagccgctctgtgccgccgtcgacgcccagttgccgctgccgccgtcggttgtgccgccgccaccgccttttgttgccgcgcggccgccgccttgcgccgccgctgccgcgtctcgtagcggccgctgccatgtgccgagccgccgccaccgccctagttgtttgccatgtcgtttagcgactgtggtctcgttaaaatagagttttagttgctgtttagcctttgttactagcttggtaagtgtgttgtcgaagctttagttcgttcagtcgtcagagtcgttctttaggtttggatggtcccgtgacacgatgagttggctcgttgagtcactaactcgtaaggcttgcttaccaatgatctaattcctttgttcctatttatctatgggcattaatctatgataaatgactaatgttttcccgttaatagtaattacgtagctcatattgtaaaattcatatctaaataatccaagctccgttttaatccattcaaattgcagtaaattcgttaaaatgtca

SEQ ID NO: 36504 - DNA, 682 bp, Oryza sativa
  unsure (1)..(682): unsure at all n locations
tcagaaatcttgactaaactcgaagtcctaactttctctaaactcaacttactaaaaatcaatactgggaggcctcactttatatttatactcgaggtaggcagcataagcctataatctaacttatacaagaagccctaatatcctaggaaaccttcctgtataaaaaaacaaacttttacaaactctaatggtaccaaatttggactcactccaaatttaactcctcatcccacacgaacacaatatctccatcacatgccatatggaatctccatctaccacgtgcattgatcttcagcctaagcaccccgcaagatatcctgatcgttcagacgtaatcttcccccaagttgactactgatccatctccgacaatgctctccaaaggcatcaagactcacctacacatgaatcaaataagaaaccatatttgagcacaagttcactctaactttactcaacatgagcacacaacaacattacatatgcataggaatcatctaaaagtcataaacacgaattaatcacgagtatccaattaaacgacccgaaaccaaaaccgacgcagagccggtctgtcataccggcaggttggtcggtctaactaatgcacacaccgcccaaattcnttggaacccggggaacccaagggggggccaaaccacccctccttttgggg

SEQ ID NO: 36505 - DNA, 676 bp, Oryza sativa
tctccgactgattatttcgtcactaaggctacaaaacgctgccgctattgctgggtgcattcatcttcactgttagtttatctgactgctgccgactggtttcttcacttccatgccgattgcatcagctatcaccgatggataatttcaactactccaaaagtataagctatatgctcaggggcttactagctcaaacacaagtatcataccttcaatttggaattgttccggatacatgcaacatgaattcatgatcatgggtttattttctgtgctcaaagactggactatttattattccccgtaagggttatcaactgaatacttgcgccagtcaggattcaatctttatatctattttggagtatcccataaaggataatcacttagatcagaagctatttatatgagctacacttggtctatattacccggaagatttattactcgggagcatgttacatgcgtcatcctttaaagggtgtcgaaggcatattttttggcctaggcctaatatgtctgcagcccatattttcaggtgtggcctgtcacgttcttttagggacttaggcactttttgcttaggccaaagtgcacgtgatcaagtgtccaatacccttttaaaaaaatacccctttttttttaaatttttaaaccccccccaacacccaaa

SEQ ID NO: 36506 - DNA, 676 bp, Oryza sativa
  unsure (1)..(676): unsure at all n locations
atattttgtacaacgtattttgaatttaaatttttcatgaccaactgttcatatcattacagtacacgtctgaaaatggcatgttttgtcgacatttttacttgtttcgaggcaataagaacagatcaaccataatgagtgactaatgaacatgaggtatgtttacgtttttatttttcctgcaggtcaggtccttccgttttaaaatataaaatatattagcttattcaccgtcttcaacattgtacatttaccactatattcttttgtaatacttgaggcatttctttttttttgggtgatttttgacatctgtgacgggtgagaactaaaaccagtcacagctgtttcgtcacctttgacgggttgcaaagagtcacccgtcacaagtgtgagtcacctgtgacgggtatattttttagcccgtcaaaggttttaattaccagtgacgggctttcacccgtcaaaagtgaggtgttggtattagtgaccactagtctctaaccagaccaaaatncgtaaaagtgaggggtaagggcccgtcacaaatggacgggatccggctagtggttattggtctttttgcaaggacaantnttgttcttccattccaattcgggtgaaatttttaaaaaaacccgcgggggggggggagaaacacccccccccccctttt

SEQ ID NO: 36507 - DNA, 1124 bp, Oryza sativa
cctgtcccttgttgatacaacctcatgcttgcccgcccgcaggtcgactctagaggatcccccctagaagatatacccatactaatcacaagccagcgtgtggtccaggctgagtttagagtataactcgaactagtcaacatatcatggcaagggtagaggcgatggtgcaggacagacttggatttttggtctctgctgcttccgaatttacctaggcacgagaggggactgcccgctgcctgtataggagagggggtgaaacctaaggtgggtgtattcattagggagagttatatgatgggttctgtcacgacctctattcgggtacttcggtatcgcgactcatggtagacacgatgttgaggctgtgtcttgtgagtaaaattgtacacctctgatcaaagtaaaattattcgaccagctcgtcttgattagtctcactttattaataatttgacttaatgaacgggtatagttcaggtgatttggttgtgcctgtttcaacgtggatttagcgttgtacagtgatgtttaatattgctcaattaaatatataatgttttactgctttcatcttatgatttataaatgctgcttttactacaaatatcctatgagccactcctttgaatatctctgcctcagtatgacttgttgagtacggtggttggtactcagtcttgctttatttctcacccctcctcccaagaggcagagaatgttttgaatggtgagttctatgaagattaggcttgtgccggacatcgaggttttgcctgtggatttggaggaagctacgctttgctaaaaagattaagtttagatggtctttagtttttccgctgattttctgagtttattttatatttttgtaagttgtggaactatatcaaattatcatctgtgtactctggctggtcctggacagagattcaatatacattctgcttggaattcgggttagcgaatttctgagcgtgacaaccaaacacctcccaaagtaaattgctattggtgagaaattgtgtgtattttggtggtatttcaaacgaataatgtgttttttcagttccatgattaaagaggtgtacaagagattatatggatcacgattcagaggt

SEQ ID NO: 36508 - DNA, 1499 bp, Oryza sativa
  unsure (1)..(1499): unsure at all n locations
aatttcgataagcattagatctgtactttgacattttccgaaaattcctcaaactcaattcagaaatttgaaagtgaattcaacttttacctttcaaattaattttttaatcagtctttcctcatttacaatttgttcagattctcatatatcaaaatccaccccaagataaaaaaaaaatccttatgatccgcaggatgatggatgataaaagaaaacacaaagatttttctatgggtagatagcgaagatattcctaaattaatttttataatttgatataactaatcattattaatattatgttttaattaaagtattagttatgagattaatcctactttgatccccttggtgatcgaatgcaaacatatatttacatatacatgtaacaaagcgcaaaatctttaatacgtattcattagcacaatactgatatctcatctatacactcaagcagcaaatccaagttcacgatgagcacaactatcgcatgtttctggttagcatcaaagcttccaacgaagcatggtcggacacgacaaacgaaacggattaagtaaagaatcaattctcacggatgtacatgctttggaaacaattgttgtgaacacacgcgtttccgtaacaataatgtagcataccgcagcggagagaaaatgcggagatcgtaggacgccacgatgacgcaagcagatgggaatcaatctcggataaaaattatgtcaaaaacatcttcaatttttataatagtagagataccagtcttcacgctaagtcacgtgttattcggctgcttatacactggcacggtatatgtttaattgataattattgaaaatataggtgcagtgaagtacctactttataatttgccttaaatatatggcataatttgaattaaagctaccattaaactgattacttttattaacacaaaattttagtcatttattaaaaaaatatttaaggatcgtagcgttagcacgggtatattactangcttcttttatctaccctataattcaccaatgtatggtacattctcatttcacattgatcgggcagggatcgcccaataaatncaacggcctaacgtacttccacctctccataactctttncctacaaaacccgtccgtacggaaggctggcaatcttcccttaagcgcaattttggtcccttttcccgagcgcagcggggcttaattgcggtgcactgagatgaaaatgccgggaacaaggacaaccgggcgttgtcttgcctaacttgccttttcaaattcttcggggggttaaactccgcggtccttaacgggttgagggcaatcgggtgccacggcgtttgaaatttccgggcaaaaacatgggaacaccaacacccggtttggcacagagaagggagagggccgccacacttgggatagtggcaaccggattataccagggcccttgtggggggagggttaaataggggagaaaaaggaccttttgtttct

SEQ ID NO: 36509 - DNA, 1802 bp, Oryza sativa
agtcatccatcccctcaggcgcattatgggctccctttttccggaggggcagccgtcgcttcaaatcggcgcttgccattgatgatcgatcatcgccggtgcccaacggtacaccggggtcgttgtcctagcctcacctcgcctcctccgatttcctccgcgtcgctataactcggtcgtctccctcaccggtctgtagtggccattcggcatgccatgaacgtatgtcaacttccccggcaagatgacattggtgaaccgcacacgccggctttgcgcacatggcgaggggcagcggtccggccaagctcttggtgaatgctggcaacaccggcatactacgcagggacccgtttggggagggagaggagataagaagtaggggaggagaaagaaaggagacgagataaggtaagaactactgacatatggaacctatatgttttgttttcatttctttcttcttttgtttaatttagttttcagtggcacgtcaatgttacgtgggacaagaagcaagacaaatcattcacgtaagtcggttctatgagttaagagacgttatatcttagtattgcgggtttaaggacatgattcaaactacaatagccacgtcatgctgaaaacataggccgtccaatttttcctccaagcattgtgagcggttggatcctacaattggtgaaagctcttttcggtccttccagaaacttgttttgcaaacatgtcctcccacatcccaagtcccagtagaccacccccatccaccgccgcctcctccccattccccacggcaaccgcttcctaaaccctccccaccgccatcgcttcgtcctcaccggcgtgatggatggtgttgggggagtcgccaaatgtgtcagctgtctcatcgagcacaccgactctgccttgttgaggaaaggagacacggatgatgaggagaagacgtctccttcctctcactatacacacgggcagcataacctgcgccatgtggtgccgcctcctcttcgtaccaacaagcccacgcccctttcgccaccaatgtcatcttccctgattcactgccggggcgattggagtggagaatcccatcttcgtcctcctccatccaggtatgaaagcccaaatcgacgagcactgacttagggccctgtttctttcagcttaggattattataacctagattattgagtcagattactataagctagattgttataatcagtagtagaataagcggttagttgtttcttttctagattattagagcttagattattgggtttgcaagtctaaagagggagtggggtagcatggtgggtaatttttcacccaataatctagaaaaagctcacctaaatgagcttatcagattataataagctgggctccagattataataagctacttcaataagttgtctgtttctttcagcttactcttaataatctggattataataattccaagctaaaagaaagaaacagggccttaaaaggcttaaaaggcttaaagctgacgcgatcacctcttcctacctctcatcggcatcacgcactcctctctcccccatcccgactgccctcgtgaccatcagatgctcgataaattgcttgcatggacattaggcaaggtaccccttcttattgtactaatggaagtgtgctctacgtgtacaacttttgtagctaataaatcaagcaccaaaatatgcacacattttaacatctcactgctgattaagcttgattacggatgaaaagaaaatccagcgatcagctcacagtattctagttt

SEQ ID NO: 36510 - DNA, 906 bp, Oryza sativa
  unsure (1)..(906): unsure at all n locations
atgcatgacttttttttaattgttcttctaaaaaatcaaataagatggacgattaaagttgaacagaagagtcatggttgcgcttaaaatttgcgcttaaacgctgttaggtgtggttggtacaactaaaagagatggatacccgcgagcggcggcgacacaagtgtagttgagtagtagtttaattctctaaaccagatgtggcaacggatagaaatcattcggcgatgacacaagtgtagttgagtagtagtttaattctctaaactagatgtggcaacggatagaaatcattcgagcatgcgggtatccatctcttttagttgcacaataaccagatgtgacaatggatagaaatcattcggcgatgacacaagtgtagtaaaccagatgtggcaatggatagaaatcattcggcgatggcatatgctcgcgggtatccatttcttttagttgaaccaaccacacaccacatctggtttggcgatgacacaagtgtagtaaaccagatgtggcaaggcatatgctgcaacggatagaaatcattggcatatgctcgcgggtatccacatctcttttagttgaaccaaccacccacatctggtttagagaattaaactactactcaactacacttatgtcgccgccgctcgcgggtatccatctcttctcttttagttgaaccaaccacatctaacagcgtttttcgtcctcgctttcacgcaaaagattcgaatccggtgtgttacagtgaccgggcaaatttctatttaagctgctgctgctcaagttaggaaagcgaagtggtacctatctaacttcagtggccgnccttgctacagtagcgccaagtactgttggcttgatgcatgcttggcccaagccattggctggtggtagcttttt

SEQ ID NO: 36511 - DNA, 1110 bp, Oryza sativa
tggaatgtttgtacctactcggtaccccacatatttgataactggtaaccaacagcctgctaccaacataacaccagttcaaccgacggcaccagttttggcttctgcaccagccgcaccgtcgtcagcaccaaggcaaacaaccaatcctcgattgttgaccagagaacagccacagcatgttggacaaaatatcaatcggttgacccacgagcaggttgctgcgatgtttctaccaaacccactggtggccaacccagcacagtcaatgccgattcagcaaacaccaccaagacagcagacggttctgccgattcaacagcagaatttgcagcatacatcggctgggctaggaacacctgacaatcggtagaggcaacatgttgtgaatcaagttatccctgaacacttggtccataatgttcaacaggatcaatcggtgttgccccaagttattcctgagcatttagtgcataatattcagccgaatttccagaattattatggaggtaatttgagctatcagtaccagcctccattgcctcatgttcagtatcagcaaagaggatcacctcagccccaatttgctcctcaatttaatcagttcgagccgattccacagcagatgcaaggagtaccccagcagagaccttgggccgacatgattgcagatgtgatgaggaagcagtttgggctcaagccaaaggactatggaaacctgtatcagcatccataccctgagtggtttgaaagggttccattgcctggctgatacaaggtaccagacttctcaaaattttcagggcaaaacaatgtttcaacttatgaacatgtcagccgattcttggttcaatgtggcgaggcatcggctattgacgccttgagagttaggttgtttcctttatctttgtccggatcggcgtttacatggttttcttctctaccatataactctgtcaatagttgggccgatttggagaaacagtttcacagctatttttacagtgaaattcatgaaatgaagctatcggacttgacggcaattaggcaaaagcatgatgagtctgtgcagcattacattcagagggtcaaggagatgaaggataatgc

SEQ ID NO: 36512 - DNA, 607 bp, Oryza sativa
aacgccgcaaaagctaggctgttggtgctggcacgggtatgctcaaaggtcagggtggtcgacaccacaactagcagtgatgataataacttctttcctgcaaggccgtaaataacacaaggagcagtggtacatactattttctgagaaaaagatcactactacaaaaatgattttcgtagaattttggctttcttttccacaatcgaccaaaagggaaaaaaaaaagtaaacgcctgctaaaatggtttaggccacctcaggataacaaactgtggcagacccaggatttatccgatatccaagcttgtctaccccagatcacaataggcaggactaaaagtaagacataaaactaatcacactatgacatagaagtaaaatacattttaaaattgggtttactcctttcaagcctataggaaaagatatttacataatcatatattaaatatgttgataaaaaaacaaagttaatactaaagtaaatttcataaccaagaagatacaaattgcaaattacaaaaggtagtttcatatttcgattaccccgcggtctaatcatgtgtaaccgaccccaatcagacactcataggttctggaacgg

SEQ ID NO: 36513 - DNA, 934 bp, Oryza sativa
ttgttagagataagagtcgtgtccgacatggacatattttgtaatctcaggtataaatagacccctaacctcatgtaatgagggacacacgtttaataacaatctcagcgcttcgccacccttttctttcgttttgttttcgacgagttcttgctttcgggttgagctgcatcggtttcgatcttcaactagaagtaaaacttggtatggtggcttgcgttctcgggattagtgcttccatctttatgacactctaaccttgtgtatgtaagctgtcgagttatcatatatcctatataatctctgacaatattgttatttaaccttcagttggctaacatctatcactagaaggcagccgatcaggttaaataccaacgttgacttagattatatagggtatccaccaccctatgaaacatccaacgacttgattgtctaaatattgtctttcttttcatacttatagctgcatcagttgagtttgaccctataagtcgtgattagaatatcaatctctagcctgtctttggttgccgattagggtagtatcggggtttcaaccgatcttacctgatttagccttatattttatgtgcttaattgatatgctagatccgccctttatattgagatcttcttgctttcaggtatattaagcttctcggttgatatattttgcttgctttaatatcttaacatagagtggtatcggagtattagccgatacatgctagatctatctaatcggctatgctatgagcgcttataatctcattgttaatatatatttcgatctaagtgatttatactgtctcggcataacgatcgatctatcccaatcacttgacttaaatatatatcaacatagggattatgtaccattaatatctacagccgattgaatagatttagttctttcttatttattcag

SEQ ID NO: 36514 - DNA, 1246 bp, Oryza sativa
  unsure (1)..(1246): unsure at all n locations
aaaaaagaaagattttttttagaatacccccccccccaaaaagtgtgggtggtgggaacaaaccacaaaggtttcaaaatttaatttgggagtctcaaaagttttcccaaaaaaaaaaacccttttatttttccaaaacctttatattttaaaaacaaccgcagttgcattgtgggcctacacatttcccttccccccaatgaaagccattttcccaaatttgattttgggcctgtttaaaaccgccaaagtatcgcaatttaaaaaaggttccctttcccctggagagagaggcaatacccccaaccctttttagggaaaccagttttgtttgtgctctttataagagccaatgattgaaataggccctcacaaagtgtcaaaagatggggtacaagaaagttctcntcccttggtctgaatgctgctaataagacacacttgtcgattctaataaggcccttaactttccacggcataaacatgagaaggtgcttttgaatactgcattcgaagaataaaaatctaatgcattaacactgagctagaacataaccagctataaagtgctctaatcaaggtgtgtaagcaaaggtgaatgacagaagcatacagaatggtgaaggatagtaaagttacaaaccagcaccagtcctaatacaaatattgaaattggaaaggtttgtaagttacagcatagagttggttgtgaaatttaggctggccatgaattaaaaaaaaaatgattcacaagttgtctgctgggttgctgcaaaaagaggtgcctcttgtcctccacaataaatttgtgttgttccgaatttatgatatcacagatattagagagttgcctcaatgcagtgaaactgcattactgcttcgaagacattacaattgagagccagcccaacaaagagctataatttacatcatcccaaaacaaagtaagttttcaatacaagttataggcatgtaccatgaagaactgcagttgtgtaaatgaataaagagtgagcctaagtgtacaaactacaaagacagttatgtcttatgattaacctgtcatgttctttaacatgatggtcaggtatatgtaaaagtatttccatgttcataatgaatgttgtcacgctcagaaattcgctaacccgaattccaagcagaatgtatattgaatctctgtccaggaccagccagagtacacagggtaccgagctcgaattgcctatataaatggtcatatacg

SEQ ID NO: 36515 - DNA, 712 bp, Oryza sativa
  unsure (1)..(712): unsure at all n locations
tggcgggtggccggtggggttggnttngggtggtggccggtagggaagggttggtgtttccttttttataagtgaaaattaattgaatatatgaggtgaggttactcatctttgacgggtgtaaacttaaaacccgtcataggtaagtactcatcagtgacgggtttatatgtggacacgtcacaatcattatgtgtcgggtccttatatatacccgtcacaggtgagtatttacctgtgacgggtcattttttttagcctcatctatgacgagatttattttaacccgtcaaaggtgatagtatctgtgacgagatattttggtccatcatagataggccgtcacagatgggctaatctggcgtagtgagaaaagatcatgcactcaattaagcagctagttaattaatttacatatggccttggggtttatgtccatttgcttatgttttttcaacaaaaaaaaaagtccttttgttgtaaagcaaaggagcaacacaacttttaaggttggggcctccaacaattgtaagtacatgtttttcacaaagtcagcctttaaaatcacgaaaaaaaacacgaatatttgagaaggaattaatatcaaataattagaaaggttgaaacttcaaacccaggccagctagcccattactttgtggagctatgtagcgcccgttccgtcgtggcgcctagcgggaaaattatctct

SEQ ID NO: 36516 - DNA, 1065 bp, Oryza sativa
ccctgttccaataaatatttttaaagaaacaaaaagtcaaagttgtattttggagaccgtgtcgctgtccaaaacgacttctttcatgagtacggagagagtatagagtaaattatatgtactgtactgcacttaagggtgcaaataggatgggtcgtggctatccgcgctgcgtgtcggttccaccggtcatttttggatttgtcctaagtcaaacgcacgttgctcttttaaatttgatcaagttcgtaaaaaaaaacataatgtctatgacacaaaattagttttattaaatggaccattaacatatttccgtagtatactaatttgttttggtatacaccggttttaaatgcgtcggtcaagcacaaggaaatttgacttggaacaaacccaaggtgatagcacattagttgttgctcgccagaccacactcctgcccgcgtatatatcaaataatattggggtttgggtaaacccatgaacctgcccaacaatttctgtactatctcttgagctttaagcctccaccacatagcataaactaaagctatatatgaatgtgagaaattaacttttagattaactattcataaagagagaaatcagaagatgaacagccatgccattcctgattcggatttcatcagatgacagccagaggggtcaaggaactgcagctttgtaaggttgttaagttgaggaagcaccgtgcctgccaacgaatattttgtgataataaattttaaagtaaagaataagagggtattgatgctaatagcacaaaaagtttcttataaacaccaggtgcttcaattgcatccagtttgaagaatttggctgaacataagtacgtgctagccagatctctcacgagtcacaacagtgatatgcaaagtcaaattgatgtgtatacagtggctagtagcttcagtttcgcagcagtgacatgaaccgagtttaaaactataatatactcttagtcataacaacagcattggataattctgccatgttatgagccggctgatagtgaggcatgaaacatataattggtaccaggct

SEQ ID NO: 36517 - DNA, 665 bp, Oryza sativa
  unsure (1)..(665): unsure at all n locations
acttcttagaagtcaaaatcctaatactgttaaaacaatcaacaaaagagttgaaacatgcctgtactcctggcctgcttgtgctgagatctttcaaactagaacaatccttctcctgcatacaaaggttgtcatgattaaatggtaaatactaaaatctaaaacactggacatctgcatgcagataattgtggagaccaatcatagttgcataatcacaacaaatacaagtaatgcaagattctcataaatcagaatattaaggttttcagtgaacttacttagctcatctaatgaaatgctagcagcactctcgccagatttaatcagccgaatcttacctgtacatataaatatttttccaaggataagcttttacaacaacaaagacaatcaaaataaataagtacaaaagaatagctatcaacattactcaaatgcagtataattaaacaaagcagcaggcttctgtgtccagtttggtaacagagttatggagttaccccgagaaaattgttcaaacttcaaacgttatttattcttgctataaaatattactaccacaaagtttctagtggaatggcagatcaacataccatcgcgtcgaagacaaatctctggtatattnntcacttgatcattaatgctgncattgtatactctgg

SEQ ID NO: 36518 - DNA, 684 bp, Oryza sativa
atcattctttcagcaatatctgccctttgggataccaattgtttaagcagttgtccacgattcagaatgaagaacttttgtcttagctttattttcctcctgtgctttatccgtctggtaaggaacattgcaatgagaacaatgcaaataaagcctgttgcgctaccaactcctataccaatgcttaaacctgaaagtatatatatatatagatatttgtttaccacttttaataaaaaaaagtttcccatgaaaatagtttgttacttccccaaacatgacttgtgcaaaaatatttttcaaaaaagctagtgaatattatatatatacctatggttggagtgcagggtatgatcttgggatctttgctctgagttccagatgggcacgaacacgcatagtttccaatcttgttacgacagttacctttgcaaggatacaaccatggataatcgcactcattgatgtctgtccatcaaacgatgttgggccagggaattaaaaagaagtggtgtcaatttgtatgtttctagttgcaagaaaagggggcatggaaatttttggagagcattctcactttggcagcctccatgtaggtagggatttccttcataaccttgagagcagttgcaaaggtaccctgagcggctaggtctgtcgatgcaaagagcttgttcctaagcc

SEQ ID NO: 36519 - DNA, 682 bp, Oryza sativa
agttccagcaaaaagttgggtgtaattttaggctggccattatttaaaaaaaaattattcacaaatttttttgttggttccctcaaaaaaaggtgcttcttgtcctccacaataaatctgtgttgttccgaatttatgatatccagatattaaagagttgcctcaatgcagtgaaactgcattactgcttcgaagacattacaattgagagccagcccaacaaagagctataatttacatcatcccaaaacaaagtaagttttcaatacaagttataggcatgtaccatgaagaactgcagttgtgtaaatgaataaagagtgagcctaagtgtacaaactacaaagacagttatgtcttatgattaacctgtcatgttctttaacatgatggtcaggtatatgtaaaagtatttccatgttcataatgaataacaatataggaactcatgatcaacagtgagataaaaaccgacaggagttctaaaagacacaaccaaaacaaataaccatatgtaagaaccaggtaaaaagatatttcaagccgatcagttaaacaaattgtttccaacaacaagtcaccatgaaaaataaatgcatagaactgaatctagaaaggaggtagaagtttgtaattcatacctgagaagatgctttaattccaagaaatagctccacgaact

SEQ ID NO: 36520 - DNA, 685 bp, Oryza sativa
tatgcatgcgtacccattttcaatagcgtaaacatattttggtcatatatatatccatatacatatgcctttgcataacatatatttgtataaatccatatatattatgcatgtatatacgtatgatataatatgatatatatctatataccgataggtttgtatgcatatatatgtattgaaacatatacatgcatggttcatgtctatgtatatatatatatatatagcccgtccatcaccagggctatgctaaaaaaaaaaaggtcagctcgatctttagtcccggattggtactcccggtttggaaaccgggactaaaggggggttacgaaccgggactacaaagggtttctccaccagtgctcttacatatcactttttgtgatctttgatgtacaactttaatcactattatatattaaaacagagttagagtatttacggctaatttttttccagtagtagatgatgtacccatcgatagtgaggtgttcatggtaacttaatcaatctcaagatatgtcgggcccagtttttcggaggtgctcataaggatagaatgtgcgtatgtattcatatagttgagtgcccacgcattgggggcacatgagattgtaatgtgtttattttaaaaaaaaagagtacctagtaaaaatttgtattggtatagtgtcggcaacta

SEQ ID NO: 36521 - DNA, 730 bp, Oryza sativa
ggccgtcattgaatgagactccgatcgtacccccgatgggccgtaagcttatgaaactcatgccgtcgaatttatccaccggtctaatatgaaaaaacagagtgggattcagatattagctcgggcatgctcaatttatgtcgtcggctcctgcgccgaccccgtgaggagccttctaagggtggacaaaaagctcgaaattcgtggctcggatcggctcgtagcaagctcggctcggatcgactcgaactcgtagtcttaatgagtcgagtatagctagccttttagctcgtgagcttaacgagctagctcgcgagctgctcgtttagctcgttagtataaaatatcactaaattttcatgaacttagtatttattgactagtgcttagtcttttagttacatcaaaactattcatattcagtaagtattatattagttagtgtttattattatgttaatatataataaaatgttaaaattgaaattattaatacgatattaataagatatagctcgttaacgagcctaacgagcttaacgagccagctcgcgagccgagccgagctagccttatagcttattaacattaacgagccgagccgagctggctcgttaagataacgagcttaaacgagccgagccttaacgagacgagcttgctcgttatccagccctagagccggcgcgtagacaaaggccggcgcccgtttcaacgccgtaaccggccg

SEQ ID NO: 36522 - DNA, 560 bp, Oryza sativa
ataaaccagtggtgggcgagcgtggtagcgtagtggcgatgggcgaacgcggtatcatgtggcgggtggaggagggagccgcaacggtggaggtagccggaggagaagccatccttctctacggcgacggcctactccgcccgccgcgtcgtttgtcgtcctcgtcgtcggccgagccatccttccctacggtgttcgcgcgagcgcgcacctatcctcggaggtgatccgctccttcatggagctacgtcgcctccggttcgagctcaccacggaagaaggcgtgctgcccgccattgtcgctccgcaccccgcttgccctgctcttgacggagagaggatagagagagagagaggagaaaaggagtgaggatgacatatgggccccacaattttttttattctgactaggatgccacgttatccaaacaacccatatgtactatcatgtaacctattttgcatagtttgaacatttaaggggtagacattcctggtatttcagttaagggaccttatatagactcgatgtaaagttgagggatgatatgtgaacttac

SEQ ID NO: 36523 - DNA, 612 bp, Oryza sativa
tacccgcgcttgtcgttgcggggcctggtgatctccgcgtcgccctccgccgccgccgccgccgagggtgcggccgcgaccgcgccgtcgaacgacggctcggcgggggcgtcggtcgtcgtctcgcgcgctggcctcgaacccgccattgcggccgccgcggattcgccaccgctgacggtgggtggtgttgaagttggagtggactgcgtccgcgaagacgcgaagttggcttggcagttggaacggcgagtaacaagttgtccccggagacaacgcgagagagggtggcacggcagcagtgggtggacctgcagcgcgggttggtggacttggtagttgggcacgtcaggagtgggcaaatgggctgggccggaatgccggatttgtgcacggcggcgtgcaccgggacatctttctgtttgaagtccggcgtgtaccgggacatcttactgtttgaagttcgaagtcaagtaaacgtctactcgaacgttcggaatttttacggaatgggaaaaaaactactccctccgtttcataatataagccattctaacatttttcacattcatatggatgttatatgcggggtaccgagctcgaattcgccgt

SEQ ID NO: 36524 - DNA, 724 bp, Oryza sativa
ggatccccctttctgatgatatgaatatcaatctggacatgcatgtctcgatttatagtactacattgctaatcgttcaacttcattggatgactcaacaagaaatgcaatgctttatacctctctgaaacaaattttggtaccggatttaagtgtgacatgacgtcttcatgtacttgtattttatacttgatgcttcaaattaagtactctctccattaaaaaaaagaatttatggttatgaacctcaacaaaattcaaatttatagttagaagctaacttttttttagatggagggagtagttaataactcgctatcttaactcgtcagaaaacgtccaccatgctttttactacttccaccacccataaaaacccttgtttctagctatagacctgcccttctcttattaatatttatccaagttttaatctagcgagtgttttttatagaccatgaggatgaaactgctagtagaatagttaaactcaaacctattggagagataaggatttcttatgcagggcctgtttagtagggtccaactcctaaatttagctaaaggagttgggtctggagtggaattgtggagctgcctaaatccagctccacctctctagatcatttcgtgagagagctccacccagcttcactcttattttaggtggagctgaaactgtttggttgagcttcagatccaggagaagtggagctggggtacc

SEQ ID NO: 36525 - DNA, 582 bp, Oryza sativa
atgacatcaaagcgaataggctcttaatgtatattggcaagatcttgactcggagcaattgccagatcgcagaaggtgacccactatttcatataaatgtactaggtgcagactgcagaccaaatgtgtgacacaatagatgtagtgaattctcagttaaataggatgaaaccactgttcaacgatgaaatttctgcgcaaaacataggtattactctcctgtggtgatattgttacagtattgatttcatacatgcacaacctgtgacgatccatggacctgaagatgaaacaagatttggaaaagcagtttcgtgcacgtacaaaaatgactctacactgaattaggacctgtttgtttcggcttaatattattgtaacgtagattgttgagttagattactgtaagctgaattataataagccaacatatatagaataagctataagctgtttgtttctctggattataagctgtttgttagctgttagcaacccaataaactaaaaaaagaacatttagagtagattactagattaaagtaatctggcttatagattataataatccatcataatagg

SEQ ID NO: 36526 - DNA, 506 bp, Oryza sativa
ttactagtgatatgatactccacatcacatgtcagagtaaaatattaagggtcacaagttaaacaaaagatagttcataaatgcctatggttaatggttaatagtacctcctgtcacaaaataagtaatgttttagacaactacacggtcaccaatgcacttgttttattataatattttaaaattttatttaatataaatctaaccatattatttttgaaagttggatcagaatatttaaagaaaaattgatcatcaaagttgtattccaaaaatttgtgaatgatggagtacaacattggagtagtacactccaatatggtgatcgtggcaacgtggtacctcaacttgtttcaatatggtgaccatggcagcgtaacacctcaacttgttgagttccatggtgatgctctccaattctcactcgagagaacggggagggggcatatgtcccccacgaccaaaaaagctatctcatacgacgggaaaatcaaccaagcctcata

SEQ ID NO: 36527 - DNA, 550 bp, Oryza sativa
tttccttagttttctctattagatgaaaatcgattaaacttccgaaattcataactaaatcatcgtaactcggattcgagtggttcaagttgctaaattcatctaaaatcaagatctacatgttaaaaatatccacatgtactgtttttgcttgtttttgtactattttgttgattttgttctttcgctttagtttccgatgttccgaggagagcgttttcgttgaggaaggttcagaagtgtttgcggaagatcaaggcaagtcacacagatctcaaacaaccctttgagcatgttgaacccgtttaaagctaatgttttatttcaacttatgcattattttcgaatgtcatcgggaggtgagcctttcccgattaattaatggccgaatatgactttattttcctatgggttataatttgactagcatggaccttatatattggattggttcagctagatgttatttatagttgctcctagccatgcttagaaacaatagctcattaaagggatgaatcatactatattattaattatggttatattt

SEQ ID NO: 36528 - DNA, 553 bp, Oryza sativa
ttcgcgctgattttattattgactcccgtcaagcaattaacctgtgctctttctaattactgacaacgtgtttctataggactgctagtgttaattcctatgtaattcctttgcatcacaaattcttatatattccggataaaactacatgaacatcagaaatgatgcggaggagtgagtcaaggagctttttttcgaagttccaagctccaaaagccttttctcctttctcaaatttattaccagaaacaaaaaaaaaaaaggagacaacgaattaataagcagcaaatgaagcttgaggagcaagttaaatatagatcactaacccagttgtttgtgcgagggtgatgacggtgagactccagaagtccttctcgagcatggagacgaagccaccgaggaggatgaaggtagtccacaaaaccaccaggaagcccatccctctgatggccatggacaagtaccccataaatagggcataactattgatcatcaccacttccacccattgagagtcatcatcgacattgtcagccattgtgtatcacttctt

SEQ ID NO: 36529 - DNA, 769 bp, Oryza sativa
ctataaatataaaaccaaacaagtggcatctattggcataacaggaagcatccaagaacccccaaaatgtggtacaagtctctagtcattgccagtaaattgaacgtagactggacgttttgcaaagaatgcagtatgctgaagttcaattgtccttccaattgttctgaagcatttagattaagttttgagatcaattttagttcgatctaacaaattattgaccacgacaaatcaagatcacttacaaatgtcctcttcaaattaacagaacagataagaaattggccatacatacctctgcaatatactttgagtaatcgtcttccacagggtatttctcgctagcatagaaaagcatatgctctataaaagaagaaccaagcataagtgaatcaaacaatacagagacacatacatgttaattactgcaaaacacatgccatgaagctctctacatgcgatagtacaatccaaccaagataaaaaaacaattcaatgaggtttgaacagtgcctggtgatgcattaaaactctttaaaggtacacactagaaaatatataaaagagcaacatacaaaacaaggcaaattaaacatacactaagcacatcgatagcatgacacacagtgacacaagaaagttgtgcttactttatctgtccaaggaaaaatagttacaatgactagtgagtaaattaaatttctaattgaataacagtgtctccttagatttttacaatcaccttaagtatccaaataatatgttc

SEQ ID NO: 36530 - DNA, 504 bp, Oryza sativa
tactatagggcgaattcgagctcggtacccttgaccttgtactggtttgtgtgtgtcggtatttcccttacaaaatgatgagttggtgtgtgcgcgcaggcgcagcgcgctactggttcaaagcacagcagccacaccttccgcgaaccgatcgttcgatcggtccagccgcgtccggtttaatataaaccggcacccgtaaagcgattggcaattcaatcggtattggattgatcaatcatcgtcacctcgttttgcttgtctacttcgatcgccgcctccgcagccgtcgtcggagaggaggaggaggaggaggaagaggaagaggaagaggaagaggaagaggaggagtgggagatgaagaaggaggcaggggcagggagcaagctggggaggtggctgggggcgccggtgcgggcgctgtcgagggcgtgcgactcgtacgtgcggaagatgtctgcgtgcgcggggcacatgccgacgcacgcggcgggcgccatgggg

SEQ ID NO: 36531 - DNA, 694 bp, Oryza sativa
  unsure (1)..(694): unsure at all n locations
cttgatagacancttgctcccaaccttcaacaacaacaacatttatgttagcatacttagaacaggataaatattatgtgccttccatcacatttcaaatatctatatataaactaataatataaagatacaattctattattgacaatggttttgacttttgataatgcccttctgataggatatgtgtaatttttccaaatttactaatttaaacaaataaagaaattgtgtacaaaataacctcatgccagtaaagagacccatgctgggctcccatatggcaaccaagcaattaaggcaaatcgattacactttcaatatttgagcttctacacatgaggcatcaaaatgtctggtatcatgcttcagattcctcgtgctagttcttttcaccgaactagagatttctcatgccaattcacaattgaattcccatctggttgtctgttcaggcaggtaacaagacattccccacttttatgctacaacaagggcctcatcctatatacctatacaaatcatcctcactaatatgaatttgctgccatgaggtgcagccacgtcacttaaattgtttcaaccgttagatgagcatctatcaacaatagcaaccggtagatcaaaagatcaaaagctcagatagcatactggtacatgttcatttatttgggccattccaaccgcgccgttc

SEQ ID NO: 36532 - DNA, 701 bp, Oryza sativa
ccatagcatagtggccaggttccgaatcggctgacccaatatcaggttgttgccacgtttttggaacctccacctgctgtcgatccaatacagcagcaaccgattcaacagacactcccagttcaacaggttgtacaaccaatccagcaacaggttgtgcacccagttcagcaaacaccaccaaggcagcagcctatggagccgattcagtagacgccgttaagacagcaaatcgttcagccgattcagcaccaaggttcaataagcgcattgcccgggtttgcaacgcttggtggtcagcctgtacaacaatttttaaatcaagttgtcccagaacacttggttcaccacatacagccggatggcacagtaatgcctcaagttgttcctgagcacttagcacgtaatatctagccgaaccttcataattactaagagggcaacttgaattatcaatatcagcctccttccccgcaagcccaatatcaactagggggactggctcaaccccagtttgcgtctcaatatggtcagttcgagcccatgcaacaacaggcacagggagcagctcagcaacgaccgtgggccgatgtgattgctgacgtaataagggaacagtttgggcttaaaccaaaagagagtggaagcttgtatcggcagccttaccttgagtggtttgagagagttcctcttcccaatca

SEQ ID NO: 36533 - DNA, 653 bp, Oryza sativa
aaaatattccgaactgggggggcatgtgttaacaaccaaatttggtaatatcgacatcgggaaagaagattagatcgaagtgaagtcaaaggcggagatcgaattcaagaatagagcaggaatcggctggagtccagatcggctacgattaggattggctgggtctgagtcggactaggtaagccgatgcggccgattccgacaatacaacttggtgtatgacatcgggttcaattgaggtgcttcaagatgattgccgcacatgcatagagtccagagaaggcaattgtatctattaattatgatattttatgtaattccttagagatatgcttgggcaaaagtctgccgcaaagacttatggtatcttagagtttgttagagataatagtcgtgtccggtatggacatatcttgtaattctcgagtataaatagacccgagccctatgtaatttggaatctacacacgttcaatacaatctcggcgcatcgccacctttttgctttagttttatttcgacgagttcttgctttcggcttgacctgcaccggtttcgatcttcaacaagaggtaaaacttgttatgatggattgtgttctcgggattagtgctttcatctttacgacactctaatcttgtctatgtaattcg

SEQ ID NO: 36534 - DNA, 560 bp, Oryza sativa
cgagacacaaagcaaagtggaggggcttgacgacaacagggttagaagcaagcttttctaatatctgtgtggtgttagatattatacttccgggtatatcatcatgttccaaacaagatcatgtgtaatacgtataactattcattattagatgtttgcttcacaatactctatatggctaaataaagttagtacttcctccaacttcttattatttgtggactaaggtgagattgtctttatagacaccgttcaatataaaaattgaccacccacaaatgataataggaattaaacttaagtcttccggtccaaaagcaacactccaagccaacggaatatagtactatgtcaatgtaacacatcaatttatttaacatagatataatagaaaaatagacacatatatcctccattctataaaaaatcaatatgggacggagagagtaattaataacctattggtaggtaagattacgtctaaagcggtactagtaaatatggaaacaaaatttaaacttatgatcatactcgctccgtcccaaaaaaacaaaaccaat

SEQ ID NO: 36535 - DNA, 559 bp, Oryza sativa
agtgcttaggatgcttagccatgctgtggacccccgtttttataacaggagtcaatcgtgtaaacagtaccatttccctggatcagatctggtacgcacgaattcatagctggaataccaagtgcacatacacgagtgtctaattcgaattattacatcataagcccgcaggcatagtcttaaatcatcggaccgagcggtccggaatacatccaaaagcagaaatagataaggcagcggaattcaggcagcggcatgccattgccacaggcaacgaccgtactaagacctactgagtgccatcgtcttcatctccctcctggtagtaggtatagggatcctccgaggcttcatctcccgcttctgattaattttatatttgcaagggtgagtaccaaccgtactcagcaagccaccacagcaatgatgcacatgacagaggaattcaaaggatggctatggttcttttgcgcaagcaagttttgtaattattttcacaagcctaagacctagcatagactgatcaagttttattaccagtgttcatatttaacaatga

SEQ ID NO: 36536 - DNA, 624 bp, Oryza sativa
ataaaataaataataattctattttttttaataagatgaatgattaaacaattcaagtgaaatgttaaatttgttatattagaggacggatggactactccctccgtcaaaaaagacaaaccacgagtttccgtgtccaactttgactgtccgtcttatatgaaatttttttataattcgtattttcattgttgttagatgataaaacatgattaatattttatgtgtgacttatctttttaatttttttcataatttttttaaataagatgaacggtcaaacgttaagcacggaaaccagggtttgtcttttttcctttttttttttttttttttcggagggagtagttacgaaggggcacagggaaatcatcaaagatggggaaattgtactcgtagctctgtaagggctggatcacgagctgcataggaatgtggtggtactagcgcaaaagcagggatggtagtggggtgcaacgtgcacggctgcacgcaccaaaaaaatgtgtacgcacatcacctcaccagcgtactgtatggagtacagtaacagcacgcaagcacacgcacacggagacacgagtcgcagagataggcttttggcgggaaggggtaccgagctcg

SEQ ID NO: 36537 - DNA, 593 bp, Oryza sativa
tcaccgcctgcacgcgccgcgcgccgctggccgcagcgctagtcgccttctctccctcggtgcgcgcgtggggcacggctcggcggcttgtggatggcgcagcgggatccgttggcctttaccggccttttcgccgggcgagccggatcggtgtttgcctggcctgcacggccgcaccacacccggtgcgtgtgcgtgttccacgcgcatctgtcgttctggcgtagcggcgcgccgacacgcaggcacgcggttggtgtggtaagcgagagtactccgtgttttggcatgaatccaaacaggtctatctggatacctgacgtcagatagcgctggccttctttgtgtttcttctccaccaaagaacatgctggtttcggaaagagcgcgcactaccagatgagtactttcccttctcaccaaggatctgtatgcctgcgtgtgagttggagcgtgaaggcacggccaaattagggcatgtttagatccatttggaatggcaaatgacaaatgacaaaagttttgatggcaaaagttttagcattgcaaaagtactagttggtgtttagatgcatgttaagggtaccgagctc

SEQ ID NO: 36538 - DNA, 554 bp, Oryza sativa
tatttcttgatttctagtagtagtttatacttcatcaaaagaaaaattaacctaaaaagaaatataacctcctatagtataataaatctagacaaacctctatttaaatttgttgtactatgtgaggtcaaattttcttttatattggtttttttgaacgggggagtatgtactatttgaaaattataaatcgttgcaaggcatctgtctccaaccaagtggtcgatcgatcatagaaccaacctactccaattatctatccaatgatccgtacgttaagtttgaccttctgggatgagccgatgtgtgcacctgtcgaagtttgggcgcgtccgacttttgcatggctacacgctgtggcaacatcaggaattcaggatcgtcccagtacctctcactgtcccagtgatactcagaccctgtttagatcacaccaaacttgctttaaacttcccaaacttttcaaatcacatacatcacatccaaaactttcctattcacgtaaactcctaacttttttttcaaagtaccaactttttccaaacttctcctca

SEQ ID NO: 36539 - DNA, 571 bp, Oryza sativa
ctacttctacctcaccatgtcacttttggcccatagaagacaagagatcaagttatacacgttttggattcggattcaggcctcctgatagcatcaacttcaaacggacctagccgctgttctagaaggaatttcagggcccatgagtacttgttggaaagcttatggagtctactttctgatggatttggttccacatcaaaattcctactaagttgccgggaaactgcaaaacaagccacgtatctcatccagtccgaatctgatttgtgttttgggccttgtaattgtgtcgtgggcttagctcaagggggtgtgcgccctagggcaaccctaggacatccttaatcatatttattcagtagccgtcaccatttagagtcgggttttgcttagattattctgtcaagaacagtttcgccgctagatcggtttgtggaaccccaaattcgagtgcttaatcattcatatgcaatttggttgcaatctatcttattctcgcttgtgttcttcgattcgcatgcagggattagccttctcggtgaggtcaaccgggtttcggcacggttga

SEQ ID NO: 36540 - DNA, 908 bp, Oryza sativa
  unsure (1)..(908): unsure at all n locations
tcacctccagtggggctgccgggtgaaaactcagcctcgactttatttgagaccttgacggacgacggtggctgtgtatccgtcgctcctctccttggagacaccgtctaggtagccccttgccgaatccttccagacaactggtgcaagcttgctctagatgcatgtccccttcgtcggcgctctagcttatgcaaggtagccacgtcggagggcctaggggggagaacggttccatccttctctctcataatcccaaagaggtggctagagtggggcctggtgtcggttattagggttaagttttgaacgttctcggatgtagtttctttgttggcttagcggtgaccggtcacgcatagcggcggtcggttcggtgctagctttctcctaggtatgttgagttggagctatcggtgcgtgggtgggggttatttttcattttttttcctggttacgacttcccagggttataatcttggattttttttcctgctcaatcaaaaaaacttcgcactgtctggtgcgagtcattaaaaaaaaaaactctggattcaccagtgcggcagtgctacaaactgatcaataacattcgtcagacatatctctgttttacataaattaagcaacattaatctctgcacaacattgagaaacagccatctttaatttatttcacataaatagaacaacattaacttctctctttttttttcatacattaagcatgctcatctttatcaagaactaagctgtatcgatttattcaaagcgacagtagtactagtagtagtagcagcagcgacgtggtacaatatattccaccaaaagaacgctgctactacgcaatagcctaacgtgtgcctgacttctaagacaaggttgcgggtncgagatgctaacatcag

SEQ ID NO: 36541 - DNA, 618 bp, Oryza sativa
tctgtttgatgaatgaagccatacttcacattttagatcttcaagtgaatttcatttggggcttgctattgccttctgttgttttggttacaccacaaatttcagcatacattacttgtaaattagtggttatggaggacctgaaagaaaatcaataatggttgctgtgggcacaaagtttacaatgtcctggagctgtcatattaattcagtactaacccaactgattgctcctcgcttttgactgtcctgtggctgtgatgccacgggtgattggtgactgttccatccaggccatgcctattttagcttgatttacaggtcctggattgcttatttgctgtacagggttggatcactttggctggaccggcaaaaggaacatgcgtgttgccgggctaaagtgtcagacaccacatattgtatcagttctaggcctttccaacaggcaactccaatggccgtactctgtacaggtttgatagaacagtgaattgaaaagtgcctgttacaggtaggacgtgtgaatttaccttgtagtaaaggtggtgaactttttatgcgatctttaatacagaaaagaaaaaatgtgggaataggtatggttgatattgtttt

SEQ ID NO: 36542 - DNA, 757 bp, Oryza sativa
  unsure (1)..(757): unsure at all n locations
cggccgcgtgaattgcaattcgagctcggtacccnnnnnnnnnnnnnnnnnnnnnnnnnnnnnnagtgtgtaacgatcacacattggaactggcacatattggaactgtccccaatgtgttgttttgcagtagtgtttgcttcttttcttcttaaaaaattttgtctgccatgcatcttcagttagcttggcgaaaggaaaataaaaatacaacgtaaaatcgacattgatttagttttgtttagcaaatccaaaaaaaaaaatctaacttggtcatagtggatcaaggacatgccagactttaggactcgttcttttactcaactttccgcttcaacatcttcattttccccatttttcattagcacgtttttaaactattaaaggtatgtctaaaaatgattatatatatagaagttgtttaaaaaacaaataaatttattattaaaaattgttatatgaattttcacatctcgcgtgcgctcgaaattcctctccacatggagcgaacgaacgagctcaaaagaaaatgaaacgccagaaatgaagccccattgttatatccagatctaggtgtgtttaggtcacaccgaagtttagaaagttggttgaaattggtacgatgtgatagaaaagttgtgtatataaaaggttttgatgtgatgggtaagttgaagtttgaaaaagaaaactttacacactaaacaagggggccagagaaatttcccctttggtgttaaaaaaaatttgggggggg

SEQ ID NO: 36543 - DNA, 747 bp, Oryza sativa
  unsure (1)..(747): unsure at all n locations
cgatgagttgaaatctagctcggtacccgttcagaccactgctgtcgctgaaagcaaccattgaagtgttcgattcaaccgatcaaattccgttgatcgctgttgtgctccaccttgtgtccatgtccatcatttgacatcctaagtagttgttgcggtgtaaaccacttccctcatatctctaccatgaatctccggcaaattctgataccacttgttataaaaccagcttgaaatcaccatcaataactaaacgtgaatgaaactccatagaagatccacactggtgacaacactgaggaacgatatttgataatggagtccaaccatagcttatatctctgggacactgattacggacggtcctccttgatccagcatatttatatatcgtatcagagttacaacaacccttggcaagacaccgcttgcatccgttctctctcgcctaagttaagtcaccatgtggttacaacatatacgcatctctatttaagaaagagcctaagacaaagtccaactctatctctaccatacacctattaaaactctaagtcctaaataataaccaactttatacacatattcggcataaactctaatagaaagcaggggatantaaatactagaatgttttgaagccaaggacacctattagaagaagaaggggagtccgagatagatcgccgagggtgcccaagccctttggcccccacacacccccaaaagggggggaaaattttgtgg

SEQ ID NO: 36544 - DNA, 753 bp, Oryza sativa
  unsure (1)..(753): unsure at all n locations
ggggcagagtganattcgagctcggtaccctatattaaactcagtaatattaaattgcctgacgtgaacgtacccatcagtgcaaaaatttggggtcacaggaaagactatgtaaaataaaattgcaatggcgcgcgaggaaacaagacagagcggcaatatttttggtatttcgcgcgcattgaatttcaggaaaattaaccctgacggacacacgctaggcaaatttatttttccccgacaagctagttctgacggtaacacgtcaggtcctattttcctgacggaattttctttatctctgacgggatttggccgtcagaaagaatacagtttctggtagtgatgtggtatcactttatctgtattatttaaacattttacagtattacaaaagaatatagtggtaaatgtacaatgttgaagacggtgaataagctaatatattttatattttaaaacggaaggacctgacctgcaggaaaaataaaaacgtaaacatacctcatgttcattagtcactcattatggttgatctgttcttatggcctcgaaacaagtaaaaatgtcgacaaaacatgccattttcagacgtgtactgtaatgatatgaacagttggtcatgaaaaatttaaattcaaaatacgttgcacaaaatattattaaaaaatacaaattcatttataatcagtgttttttagaaaaaaaggtaagcccttttaccccagggggttgggggccccaaaattttgg

SEQ ID NO: 36545 - DNA, 664 bp, Oryza sativa
aataatgagatttagagagatgcaaaattcagggggagaatttcgctgactcattccagaattttgatatagaaaataaaatacccaaaattccatctagaaaaattgaacgaagaattgagtgcattatactcttttttccgttagataagttttcccagtagtttattataagatttttaatgaggcaattcatgcgacattgcaagcatatgctatgtactctttctccaaattttttccactgggtttttcttttctccaaattatacagtcagagcccaagggggagtgtttggaaaccgctggcctacgtaagcccggcctggctattcactaattgtgtccatcactaaacatagaaggtggaagagggagctataaatagagaggagtgacaaattatgctataaatcaaaatttaaaatcttactgatttattgatcatgtacggctaggttcacgcattaagcactactacagcgccaatttttccatgcgggatagccaatttctgcgtgcgggtgggcgggccgcatgcacccagtcgtctgggaaaaacgtgattttcgcatgcgggtggcgcgcctgcacgcgaaaaccaattttcgcgtgcgggcgcttaaaccgcctgcgcggagaaaaaaaaagaaacccaaaaaaa

SEQ ID NO: 36546 - DNA, 691 bp, Oryza sativa
ctttgaatcgtaggaatgaaaaaacagaggattctggcaggaatacaattgtaaaacagaggattgtgaaacacaggaaaaacacaggaatgaccatttgattggaccagaggaaaaacgcaggaatcagatgagagagatagactcagaggaaattttccaagaggttagacctcttgctaactttcctccaaaatatacataggattacccattccataggaattttaaaggattggatatgattcaatcctttgtttcaaagcccttcataggattttttttccataggattgaaatcctccaaaattcctacatttttcctacaaatcaaaggggccctaaacctacaagagaacaaagactgtaaaaatgtattgaaattcacattctaacaatggaaaattaatggatatgttcatcccattggccagatgtaacgaatcttacatatatccttgaaaaatggaataaatcaaatacccactcactttgtctagaaattgaacccccatgactaattatgcccgattgtgttggttcattgatgcttctggtcaactgagtggagaaatcaacaaatcagttttcacagttaaaaaagaataacacaatgcaagcatacaaataggtatacaagagtttgcaactttatttaactataatctacattctgcaatttctaccaaaa

SEQ ID NO: 36547 - DNA, 949 bp, Oryza sativa
atacaccggtgcaaagcgaagcctctgcagccccgggcgccgatggtggacgcgtggataaaaaagagatcgaacggcgagcacgatttgcggacgcgctgcggcgatcgctccctcgccctctcacctcaatcggaccggaatcacctctcgccgacgccgtcgacgatagtgatggtaggacgaggaggcctgaagaagaacagatcgacctgccgggcttctgccttcgtctcatcaggtgccggctggtttcacctgcgctgcgcatgacgacaaggagcaatggatttactgaattttcattgatgatattagttgcgaccatggatttattagttacgttaatacggagattgtgacttattaacatgtaaaaacttgactttgtggcgaccagttcttgagttgctcttaattatcctcatcttttccttgcctgaactcaccttgtgagttgctacttgttcttattaaatttcttcaaaaattcagattatacaatattccgtattttattcactcacgtaattagataaacaatcacagtttttgtaacacatccatcagattgaatatttcagaacaaccaaaaacgctcatatgtattccagatagaaaaatacagtctacagattacaaagggataactcagtattcttgcaatttgaacaaaaaaaaaaggctgttcaggttacaatctggacgactggactacaatccttgcaacaatttagggattatttcatattacaaaggagtgaaggactacaattttttcaacaccatcctctttttccaaatttacagtcctttcaggtatagcgattttccctcttctgtatatattctgcagagaagatagagaaccaccatcataaagataaatcgaaatgagaaatgcataagttctgctgttatcgggaacaccagaatcaggaataagaat

SEQ ID NO: 36548 - DNA, 697 bp, Oryza sativa
gcgggacgactctagaggatccccatcagtgctagtaagaagatggacctctcagatcgtaccgcattcctttgtccgttatactacatgaatctgtgactgatgctggcatgccaattgacctggacatagttataagaggaccttcatagttatgtatagcatgtgatcaactctctcatgacctcccatctcaattataatggagttttccactaagctgggaccaacggtggatacaggaaatttttagagccgaataaaactacctaccttgaatatttactttaaaagaatgtcttcaaattgctgcactaacatcgaaattttattatgtgtttgcctaccagcctaggcagctgccggagttgtcaggtctattagaacaggtgtcgaatatattagttctaacaggttacagttcgatttataattattatcgatgacacgggtagggttagagttgaccttcataacgcggcaacccttaaaactgagagagaggtgccataatgtaaccatggtacttccatgtagctgacggttgaggccaacgacttggattaaattgcatggtgtgtgctataagctaggttcaacatcgaagacgtggaatcaaccctcacggagcttcataataaatgctcttgctaggctctcataggaaaaaaaaaatctccgaccctttatgccctgg

SEQ ID NO: 36549 - DNA, 848 bp, Oryza sativa
  unsure (1)..(848): unsure at all n locations
gtgaaatatgctgaaaattgtcttgttatattccaactattgttaaaaggtgtncatagagttaagggcttcttctcgtccncccccccccccaaggagntttgttgtttgacaaccactnggnacccaacgaatgnnntccatatttggcggcaagcctccatcaatttgattctgcgacatcttcaaaaacgtggtccttcgaaaatgttgtagagaaccagcctggaaatgcatcatggattccagcatttggtcatagcaaggtcaagaatatcgacttgtgattgaagccatgagggaaatgagggacccatcgaagatgatgcaaagtatgccttctctaatctgaagggaggtaaccattcaggatccactacaagtctccaagtcattataacacaaatgttttgacttcaagctcgttagattggcaaagtgctcctctgtgatgacaccatccaggcaattggtaatggaggtacaagtttgtcaaatttgtgagcatacctatctcagaaggcacttgtccagtaatgttattattaaaagaggtcaagagtgactaaacttggtagcctccctaccaattttggtaaattcccagtcaaattgttattagccaaatgaagttccttcagttttttgggtgaacactgtggtaaactctcaaatatttttttgaaatctctccatatgccagtctataaatcaaggtcaagaaactttcccattggcacagaattcttcaagtttcgccttcatgaaggcacatgtttacctttctctcgaaaacactcatggttggcccagaaaatcaagaaactcggagggacaataatgttttc

SEQ ID NO: 36550 - DNA, 660 bp, Oryza sativa
ggcgaattcgagctcggtacccaatcaagtaaagtatttaacaaaattttaaaagcctagaagagaagatctaattttaaataataaattgcaatataaaagtgggctagataaaattttgataaatactttacttgattctatagtttctagatttttctgggatttatttgagccaaggaagtattttttaataaatggaattgcatttcatgaataatttaaattgaaaaagttttaaaaatcctccttttggctttgggccgaaagtcggcccaaaaaccactcctatgtggccacagcaggggcatcatcgccatttcgcatcatcaacgacgtcttcaaacggacaaagcgacggtaggggcatttctaacaaactgggcaatttggatggtacttttctactcgagctcattgcgatggtattttccaacaccaggaactttgcgatggtacgtaccaaatttgctcttcttttcggcattacctttctaggatgtggtaagtagggataagtatagggtggggagatcaataactttcaaatgacaaaaactgtagcttttttcataactatactgactttatgggatgtgggacgtacggataagcggataagcggagggtggagagataaattgaagtaactttgaaatg

SEQ ID NO: 36551 - DNA, 523 bp, Oryza sativa
agctcggtacccccgagctcccaagttccaggcgatggggcagcagcacggagagaggagaggacgacgggtggcagtgccagaagtggctacgacgggtggcggcgccagatgcggtgatttggcaatgacgcataggaaggataggaagaagggcggtggcgccaccagatgctagtgccaaatactgatgctcccgcccgagagagagagagagcgaagagagaagaagaagagagagagaggatgaggaaatgagtggtcggttcgccttgtgttggtcgcttgataatgagcattttcgtacttttttcattgattggttttgctaaaacaaacacaataattttatccccatccaaaataaaatctgatagttaatatatttgggtgttttaaaaatattcgatattgctaaaaaaatggttaagatatctgatgtggctttgagatgcgtgttgattggtatcttttaaatgatcggtttcattaaaataacccgtttatttaggaccatccaatg

SEQ ID NO: 36552 - DNA, 528 bp, Oryza sativa
tctacccaaatcaaagtgtcgcattgctcatcctcctaacaaaaaaatagtactattatttagacatgcatgactaaattaacagaaaatctaagtatcaatgaactagtaaaaagtacaacaaaccaaacctcaggaaggcaaccaagaaatctccttccggtgtcagttccttcccatgcagtcctcctttttggtcacatgccatgtctgcacttcgaatttgtgccatgttcctccctgcaatactcatcatcgatgtataaaggaacattcaacaataggccaaacctgtcctgctatatcggaaacaaaaggattaaaccaaatagcgggacttacccacctgagctataacccatactagaaaatacgcgcgccgtttggcgtgcttaatatctaaaccgttggttactttgtgtatgtataaaacatgatttataaatgttggtttttagtatgtgagcatgaagaataagtttaacataggcttatatatatcggaaaatagttatatataaaaaaata

SEQ ID NO: 36553 - DNA, 535 bp, Oryza sativa
gtcactgcaactaacatgattgtagtcgtttattataagaattagtacattcgatgttggatggaaagaagtacattcggaagaggcatccgatcccgaacgattatcatcagcatattgcaaattttagatcaatgaacagggaaaagcattcgatttcaaaaacgcgcgcacacacaaacacaaaagaattcaccctaactctgtcttcattctctcgagcctctgtcatcatgttgccaattctcttttggtaaagcgaaaagagaataaagatagagagaataattactccatccatttcacaatgtaagtcattctagcatttctcaccttcatattgatgtaagattcattaacatcaatatgaatgtaggaaatgctagaatgacttacattgtgaaacggagaaagtaacatctacagctaccattgtgatttgtttcttcatcggcgcagcatgcatcactgtaagaatttttttggaggtgttcaatgatatctcaaaactttatactccctccgtttcaaaatg

SEQ ID NO: 36554 - DNA, 2687 bp, Oryza sativa
acaagtggaaaaccctttggtcatctagagaaccaacagtgatgtggctttgaatgaatgtggattatcttcagtactctttcatatgggttaattattattaggagttttgttgtaattatgcccaaagacaaatgattgtgctataactatcactactagcaaatgtggtagtttgtgtctgatgacttttgctacagataatattaatgaacatgattttcactaatcatagacaaacgccaattatgcatctgtttgagctgtccacaggcggcgcgccactggcgcgccccagcctctagtaaatatcatggctagtgtagtgggcaccttatccaaacaatgcataaaaagatagcttgaacttgcagctaaattgttcctttattccacttcttttttttattctcccaacagtggactacgcatatctgggccacgttgattttttttttccgaaaacggccacgttgattcggtggtccaatttaatgcacttgcgagcaactaattccgttccataaaaataaaccgatataaaaataaatctattataggatatgactatcatttaaattaagttgtgctaatatgatcctaatgtttccgctgtcattttaatttatttcatgcttacaagtcaatcaaactacagtatatatgttcaagtcaaacaacaaaagaaagctagatcaatctgtgcactcatgcacagcacagcagtagcaaagcttcaaactaactgtaatatctattacatgctaaaagtccattgaacatcctacaaacaattctaggctgtcacgtggtattccaataaatactcttaaatcgtcatatggcactataataaaccaatggaaccattacattcaactactaaatttatctctttaggaaaaaaaacttaacgaaatgatttaacgggagcctcaaggcccacctcgcttgctcccccgaacatagggtctgtttagttcgcgaaaagaaattttttgggtatcacatcagacgtttgaccggatgtcggaaggagtttccggacacgaatgaaaaaaactaatttcatagctcgcctggaaaccgcgagacgaatttattaagcctaattaatctgtcatcagcacatgtggattactgtagaactttatggctaatcatggactaattaggctcaaaagattcgtctcgcgatttccatgcaaactgtgtaattagttttttaatctatatttaatacttcatgcatgtgtccaaagattagatttaatatttttgagcagaattttttggaaggccgtagtaatgcacgtagggctgaaagaaaagctcgggctcgtgagctcagcctgggcttggctcgagctcgaatgccaaaggagccaagcccacgcctccttttcagctcgttgctgaaatgagccaagcccgagctagctcgtgagccactggtttggctcatgagcctaggctatcatgtatttatatggatcattttattttatagtgaagttattatttgtaattatgcaatttatcatttataatttgaagaattgaatatataaacttattttagttatacatgtcgacgatttattcttgatcatctacaaattatatatgaagagatgcttcaatgggaaggctcgcaagccagctcgatctggcttgagccaggaaacgagccgagccgagctcatgttttagctcgtttctctaaccaagccgagccaagccaagcctagtttgttgcgagccagtgcaagccaagcctagtttgttgcgagccagtgcaagccaagcctcgtgtccacccctgcacgcccggcgcctcaggtctccaagctcaacctcttccgatctctttctgttcctattcttttatgttaccaaattaaaagcaagaaaagctataattttagtattaagctgagcataattttaaatgtacatatctaatttctgttctatctaaattgctcctgtatttataattaaattgacaattttagatccaatgttttgctatacataagtaatatgtcattgtgatcttctttacgtccgcttttctcagaggcattcggatgggcgatttccggtgatcttcaatggtgactccggcaccactgggagggtggaatttctctcccggcgatgcaatctgtgatgaaacttggcatcgtttccgaccgccggttcatttctcctctaagttcagctcggttcctttccggttagtggtggatctacctcgctcaaatttttgtttaacaacttcttcggtggccttagccctcagggctgtgattggtggttcgcctgctgatctctctgtttcccttctcaaagatcgttctttctcttttttttgtttgctccaaacaagcgggtttatggatttatcgtttgagatcttacatttgcaatgattttgttctgtgcttctttctttggagaaatggtggaccaaattggcagtgggaatttgatgtttggagtcgtgaacaagagaaagaatggatttttgtggctcgtaagaaacgtgtttctgattctttgaggcaaccttgtcgttcttatgctcaagctactcagcagcgggttattcctaggaagagtgtttttgatagattaaaggagtccttgaaggtgactggcggtgatactctggcgatcac

SEQ ID NO: 36555 - DNA, 569 bp, Oryza sativa
aaagttagccaatatgcttgttgagaatcatgataccatgtttgatatacaatcaaggatgatttagaaatagtagcatattagatgaagagtatcacaaataagtcacatactcattgatcaatagtaagttatctatctcaaggaacacttcattataattctagacaaagtatgtttcacaatcatctctgtgattgcctctagggcatatcaccaataagggacaacaacgatgctggtgctttggaggaaatggggatggcgatggtgttagtgtgtaggcagatttgggatcagtgtccaatgtgcggtgagtggagtaattgtgtgagggagatagatgagggtaaggaaaatgtgatgctttcgagaatggccagtgggacaagggtaaggaaatggtacatgtatgatagtacttagtgccataaggtttgtagtgtaaaatttgaacatttttagtaaataaagggactaaaagggtgaaatagttaagggttggaatgcaaaattttatagaggaagtgacttgtgcaatagtctcatctacggttctacgagtcatg

SEQ ID NO: 36556 - DNA, 632 bp, Oryza sativa
tgcccccccccccccccccttttatcatatggttttcaagaaagaatttaatatatttttagaaaggaaaaaaatactaacaaaagaagaaaaatctgctcagacatattcatgtgtataaactttatacacataaaatctatgtgtataaacattcaatgcagcaaaattctgtatgaaatatttgaatccaattgtcagacatttaaaatttggtctataaactttatgtgtataaactttgggtgtatgaactttgattgtataaacttggtctataaactttgattgtataaactttagctgtacaaacattccaaattaggaaagcatgtagagaaaaaaaagtggtgcccagaaagaaagggcaacctcctcgcgctgatacatgagcatgggctcgctgaattcgggctttcctgcctctggtagccaccaaataacaaagagaaaaccaatgtatgtctagagtttattaaaagggattgtttagattccttgggtggcaatcctatagttctaataactccccttttaattagtcaaaatatagtctctttcatatggataaaagttcaaacaacaaattccagacctaaatatgacaaacattttcaattcctaaaacttta

SEQ ID NO: 36557 - DNA, 726 bp, Oryza sativa
gggtttgggctgtttctccttgtctattaggagttgggcgagattcttctttccttccacgctgttattaacagaagattgtaattggttgcccttaatttcgttcagtgctttgagggcaccttcgtacaggctgcgtagcttaaggcctggtagcatgcttgggcgcaccacgacgaggaacaccatgtaattcgacagtgccttgatcgcccgtacatgccgcaacgatgatgcatattcaccactgatcaagaggaagatgtctgtggtgatgtgcaagataaggatggtctcttggaatgcaggtgcaaagtccagagcctcttctagttcccgatgcattgctgcttgcggtttcgccaacaccgccgctacttgttctggtaattccaatgcgggcaccatgggcggctgcttgtcaggaataataggcgggtacgctgacttgagacatttccatatactttcgaacataaggatcctaacatctgatgactgatagcataacatatgaaagcccaacgagttgttgtatctgtactcatccaacggtcattcagtgaaactaattacaacactgatttccacatcttcaacttccatgttatgtcacgagtgcactcgtcaaacaagttgtattgcccaatgattcctagccacctcctatagctagttgttggatgatccttggaaaagaacctccacggatccagggagacgatg

SEQ ID NO: 36558 - DNA, 717 bp, Oryza sativa
  unsure (1)..(717): unsure at all n locations
gtggtgttcgtgaaccaaaagacgccatgttagacagacaggtacgcgcttctcggtctctcacttgtccaagggcgagaaccgtccagttgggtatgcgcggctttaagcgctcggggctctgtgctcctcgcgcttcggtgttgaacggtcggtgacggcaancaaattttgtccccattgaacctgtagaggttttactgtttgattgggacggttagatgggtgctcgagggtcttcgctcctgttccgcttgaattccgatggttgctgtatccatttgtgcgaatgctgatggcaacgaatttgatcatcatcgcgggggattttttctagggtttattgaagtccgtactgttcatgtagcctgcacttcatttcattatacctacaagtgatttgcttatctgcaattgtgaaattgtgaatgacagtccatccaaatagtagatcccatgagattgctttctacgatttgaatagataccacaacttccttagttctggtatggtatgaaaattttctcatttgtggtagcttaattgcctacctatggctttatatgctgaaggcaggcaatacgtattagcatatgttgatcctataataagctggccatccaaatatgcttacgctgtagtaagaatcctatatgttggtgaactaaatgcgctatagttttaaggaaaaattggttgtatatgatgggctactg

SEQ ID NO: 36559 - DNA, 1614 bp, Oryza sativa
atgatgattttaagtgcacaagctaccctaatctgttcagtgtgactttgtataagaatgattcagttaggaccatgtgcctacggcaatggaggactcttttgttcttcccctctcagatgatgcatgtggagaatttttgcaactgcgagatcgagcaattgaatcatttgcagcttcaggcaagaagtgatgtttggagttttatttggggaacaggtatatacacagccaagagattttacaatctcaattactcttctttgcaacttcctaggcccatgatttggctgtggaaaaccaaatgtgtcatgaagataaaggtgtttgcatggcttctgttctgtgatagacttaacacaagggatatgcttgacagaaggcattgtgcaaaagaagatgatgatctcacatgtgctttatgcaatacacaccaccagacttcatgtcttcttcacatgtcctttcagtgtggcttgttggcagcagctagtcattcattgggattgtaatttggaattctttcagatgattgttttggcaagaatcaggtttgcacaaaggggtttccttgaggttttctttctggcggtatggcatatttggaagcaaagaaatgggctaatttttcagaatattcggccttcattccaatcatggaagtctttgtttatgaaagaagttcttctgcatatgtgcagaatgaaagatcctctcaagcaatctctttttgattggttacaaactttataggattgttgtttttgcagtttttatttatccctttgtaactttgtacatattttttgatctataaaatttaaaactgctgggcaaagccctggcagtacttccagtcaaaaaaaaaatgtcattgtggttatagacccatgcactttgcaagtttgcatgtcatctaaatataaatcaaatacttaaaaattttgacaacgtgttgtgttattataggtcaatcttcaaacgtgtcaccgttggttccaatgacaggggcacataggtttcatgtgtttgcttacaccgtggtcccgggctcactatctggaaaataaagaactaactcaaatattaatagcacaaaccacaacataaaaaaacatctagtgtctttacgggcggtttcaagtttgaagcacacgtaagatagcagcctcgcgcgtcgtccctcccccacgaaagacccgggaggcgacgccctcaccggtacccgtctcccattacctcctcctctgcctcgccgccgcccgagcggccgtgcggccagaaggacagcggcggcggggcttcgtcctcgcgctcggccgggggggggggggggcggcggtttgggggctgctcggggcaggggaaccgcccgggcagatctagcggtgggtcagccggcggcggggctgagcggtggggcggcgacgacgtctggtggtggtggcggcggcgtttcgaggtactggtggcggcggaggaaaccgctagatccgagcctggatctggcaggatggcgacggcggcggggttggcgaggggatggcgacggtgaggcgaacccggccgcgccggcggcggagttatggaccccccggtggtcgtggcggtggt

SEQ ID NO: 36560 - DNA, 2306 bp, Oryza sativa
cgcagtcatcgttggcgacaccacctggcggcagcagcggctggaagtgtggctgcagcgacggcaaccgggacgcaaggccggtggctgcgtaggctggcgatgcacggacaaaggcggcatgtggtgacatgcggcgggcggtggtggcgtgcggaggctggtcggcggggggcgccggtgcggtggtgcccacgcgctagcggaggttaagttggtggtggagcatcggtgcgtcaatgataggcaggcggaggatggcgggtgaaaacctagcccagccgaggccgggctggcaacgatggcactcaatcgtcattccccctactgagggtgttgtcgtgctgtctcaccccatctagtggtgactgccgggtgaaaaccctgtcaaggtttcttcagaccttgacggacagcggcggcgatgctactgtcacttctctccatggagacgccgtctaggcagcacccttgccaaaacctcccaaacatcggttgcaagcttgttctagagttatttcctcttgtatcggcgtcctagtttatacaagttggctatgtcgaagggtctaggggggagagcggttctattcttttctctcaccctctctccctaaatccctaagatgtggatagagtgtgtttttgtgtcggttgtaagggttgggttttgggcgatcctagctgtagttcctttgttggcttagcggtggtcggccaagcttagaggcagccggtccggtgctagtcttctcctgggattgtgtttggcgttgtgagtgtgtgggtggtggtattcttttttccttttcctggttacgatgtcccaagattgtaatcttgtaatttttttctattgtatcaatatgaacttcacactgtctagttcaaaaaaaaatcttgtgtctttaggtagaccaaacaatccaattagtctgtgatttttttaaaatatgctcaaaaaataaaagcaaggccaatgaatcagggaagcattcaaaaaaatcacatcccaaaagtaatgatgcatctttagttatacttagaaaaaaaagtccgggcattgcaacaggtgaaggctattttattttaatcttattattgtccactctgaaattcattgtgggaattcgatgttatatggtttagttaagctgaaattcactatgcgaatttgcttggatatataaatttttagaaaatcatgagctgcagttaggagtccgttcgtatcaagttagcatgcaagtttttttacagagatttcttatatgactccttctgaattttcaaaagtgaaccaacttaaaacctgacttaaatacggatctgtattttcaaaagcaaacaaactaaaaaccgactcatacacggatgacgtacaaaattaacggtaaaaacattttatagtagtagagagttgccaaacttaaaaaccgagtcatatacggattacgtacaaaattaccggtaaaagcattttatagtagtagagagttgccatctgtgttctcgctgagctccttgaatcgatcccaaaggggtgtctcctacattgtgcagtacaattgaactgaccatgaatttagccctcacatcccacagccaatccattcattaataaacaacgaaatcttagctgcttatataaaaggtgattacttttttaaaaaagttggcacctcaggtgtaacatctttatttatcatctcacgtcatttgaacttaaaaaaaaatacttgcataaaatctataactaatataaatattcctatttttccggtcgtcacatctaattttcgtcaatacacaatccgattcggtaagcaatagccatggaaaaaattgcaaaaaaaaaaaaaatcggcggccggcgccgacgccgcctccacgccatccgggccgccgcccctcccgctccgccgggaccgccgccgccgcacctccccaggggagggcgtcgccggccctcccgccgctgccaccgccgccgctcgctgggggggggggcgcaccgccgccgctcggtgcgggggaggcaccaccgccgccgctcgcggggaggcaccgccgccgccgctcgcggggaggagggcgccgccgctcactgtgggggaaggcggcgccagcgccacaccccgccatcgtcgcgctgtgccggctagaagggagggacggcgtcggtggcgggggagtcggccggctgggggaagggagagacgccggtggggagagggagagggagagagggaggggcggtcggctcggctcggctggggggagggggtgaggggagggtgaggggg

SEQ ID NO: 36561 - DNA, 2720 bp, Oryza sativa
gagggtgagggggagggttagggttagggtttcatcaattttaatctgatctgagctgtccatcaaaacgaacggctgagatcgatcgagggttagggccgcacgtgggccggcggtccactaagtgagaggaggagtatgggggtataaagtagctctgttctcttgcgggctgaagaagaaaatgggctgaaaaaggcccatagagaaaaaaggatttttgtttagatttttatttcaataaatgcagaaatgatatttgtattatcaaaattagcaattaagctatgtaaattccaagataatttcaatgagtgtaattaatatagaaaatttaataaaagttaaatccaaccataacattttatttcttacacttactttacttataaattaatttaattatatacctacctacttaaaaaatacctaaatatttcagaaaatttgtatttcaatttaatatgttttaattcaattttatctatttttttcttttcattgcaacgcaataccacttttgctataatttaaaagagtgtaattaatattgcagaaaattttatatttcattaaattacaattcatttttttcatataaatagttcaaatcaaatttcagtcaccatatcattacccggtgcaacgcacgggcattttgctagatcaaagtacattgagtataaaaatttcactggtattttattagacttgcctacataaaaataaatatttttcttcatgatacaaattttcatccatcgtcttttttagcagattagttgtctaaaccaaataacaaacaatttcttttgaacagattaattgtctaaaccaaataacactttttgtcactgtacacacttcgtaatcacccggtgcaacgcacgggcacttttgctagtaaaacaaaacataggaaatgccaataagagtaaagcggaccaattagggaaaatcttataaggtcttagaaaaaattggttcttccttttcaccaaaattggaacacccgttaccatattccattgcgtcattttttagtgcttagatgctaatacccttcaggtggcattattagtttcactacatcatgcacacaaaagacataacccactaaggtagaaatatataattggtttaaaagttatattaaacttgatattcactttgtttttttcttaaaaaaatactatgggtctaacacatcgtagggaagcagggtctagataagtattcgaattatgtcaatatgaatcagtaagagggattgttaacttcatggaacaactaaaacataattatttgcaataatagttttaaaaattttgttaaaaaagagggagcccataaacattccatttgaataaaaactacttgcttttaatttacacttacctgtttccaaaaacaaagtatacttttcttttgaatgataagtcagatcatagttaatttcttaccgaatgaatattgtatagtatgtagtataaagccaacgaatagcttagaaaaagttaccccagcaataccgattaagaaggtttttcagactagacataattttgaaatatagtatgaataatccagttgatggtatataagtctctaaagctgacaatatgatacacgcccgcacatttgcgcgggctaccttcctagtttaagaaactgttgggaacaaactcgatacaaattggtagaacacctggagaatataataaataaacaaactcgacaaagacagggttttggtgctgtcaagcagcagcattttctggtttatactcaatttaaaatagcaaatcaacatacatatcatgggagggcaatcccacacgccaagcatgccacgcaactagacgcactccggcttgaaccagcaagccacaagcaaatacagacgcaacaagataaggaaaaaaaatagaaaaaaaaagaaccaacaagaaatgttccatcagaaacaaacttcaaaaccattagttcattacaaacaatctagatcagtcatatgctgaacccagataagagataaacttgatatatccaccaatgaccaatcactgtagggactttagagttgttcttccaagtatatgaatcttgtatggatcgatcatcgatgtcggtgaccgttgtagtcaattgaatctacctgcagttggaattatagaagaaatatatcagatttgcagaaaagaagctgtgccctttcaatatgctccatatatgataagttcacaatgcactataaaaacaggttctagtttttgacctcctggtataaaagtttgaatatttggtacaaacatataatgtctgacatatgtacatgtctatataaatagaaggctactgcagaacactataccattccaacagaatagattatgtataacgacattagcacggtatcttagttagatctgatatttttgatactagataggtactagatctggtaccgtggtaccagacacaatacccataggtatcatatttggtgccaatgataccagacatgatactgcatggtactagatcctgctacctaggtaccatgctgacatcatgatgatgtcaactattccgttagaacagtatatcgttctgtagtattctgatataaatagcatgcaattaaaatatcagaagaacaaataattttgaaataaacattttcatgtttaaatatatctaaacttggtgaaaggatt

SEQ ID NO: 36562 - DNA, 672 bp, Oryza sativa
catcaagtaaaatttaaaatacttcttggtgtcttttaaattaaaaagccgtgattgcaacccggttcatcattacgacccatatgttatgaaccgtcacagataacatcatagatctgtgacaggtgttcacatgtcatacatgagtttttttttatcactgaccaataatcactaaggaggcttatacccatcaagaatattactacctcccccccaaaataattgtaattctatattggttagcatatattaaaggttgaaaagaaatactatggtgcccctcattaaaaggggtttatgtgaaaatggaaagatggctgagggtaaaatagggagaaatttaaaatgagaaatgattggtgggggtaattagtactctagaataacaataattttgggatgaattttcaatcctagaaatataattatttggggacggaggtagtactattcataattgatgaagagttctgttggagtgtaaatgccaacctacaacttaaaccacattttaaaacgatgaatattttttttgcaattatagaaagaaaatctccgaagggtggatcggactctcgctgttccaaaataatttttttatatgaatcgggctaatattttaaaaatcactttgaaaccttttggaaaaaccctccttgttttcaaaac

SEQ ID NO: 36563 - DNA, 742 bp, Oryza sativa
taagtgctacagtaaccacatgtgctaatgccgaattaattagactcaaaagatttgtctcgcggtttccagccgagttatgaaattagttttttcatttgtgtccgaaaacccttccgacatccgatcaaacatccaatgtgacatccaaaaattttcttttcgcgaactaaaccagttcccaactttttctttaaactcctaaccttttcatcacatcaaaacttttctacatacacaaactttcaacttttccgacacatcgttccaatttcaatcaaacttccaattttagcgtgaactaaacacacccatatataagcagagcaacaagtgtgagaatgctactggtagcagtgtacgtaatgtggtcgggctgtacgttttttgtaggcacaattaagacggtgacgctgcaatgctgtgatgagtgtagacatggtggactaattgtcggatcttgtacgaactggtgccccagactttgtgttaaacgaaaaattacagacgataaatatttccgttacgatatttggttggtcttttgacactaggtaagttggagctgtacgcatgtaccaaacaagccctacatatgctatatggatgccaaattcctatagtgaattgagtgtgtagctatgttactcagtgttttataaaaatgtaatactacctctctactaaaaattaataagtttatatttaggctacttttgtactaaatgatgaactacttgca

SEQ ID NO: 36564 - DNA, 1102 bp, Oryza sativa
tagaaaaatatagtagtattttgaacacaatataaacatattattaaaatatatttagtgttagatttaataaaactaacttgatattttatatgtcgttaaaagtttactataagtttggtcaaacttaacaaagtttgactagaaaaaaaatcaaatggggagtatttaataaaaaacacaaggatgacatgcacctctactatattaaataaaaaattttggtggaaaggataaatagaacaatcaagcatatgttaactactactccctccgtactcgtaaagaaagtcatctaggataatatttaactcaaaccttgagaataaaaatcatgaataactgtcaagttgttcaatttgaaaatgtaaaaattatatgaatagatttgtcttcaaaaatactttcataaaagtatacatatatcacttttcaataaatatttttatagaaacaaggagtcaaagttatattttggagatcgcgtcgctgtccaaaacgacctttacggtacggagggagtatgaacattgccactgtggagatatcgatatcatatagtcaaatatttgcttttccttttggattgggcagcattgtaagcttggtatgcatcaggaacatccaccttcaccatggaaaaagagcctgtaagaaataagtaccctgcattagcacgatttgagatatttgggattgatcttgcaaacatgtatagtcgagcaacttgctagtacaaggtcttcttgatggcccaggaaatatgaggtgatttcttgcagctagatttcgactgcaagctgcaaaatcaaaaatactttatgcaaaatttttaggtggtggcagtgggctggcgcacttgacgaagagtgaagattttttttctttttcttttgactgattaaccgttgtttacgtggagggaagatcgctaatcttgtactattatatagtaaaaattatgttaaactttcttcaaacgctcctaagtcaccatacatgacactcctacaaacactctaaagccacgatgtgacactctaataaattatagaaattataataaaaaataaaaatatctaaccgtcaattttcatttaaa

SEQ ID NO: 36565 - DNA, 601 bp, Oryza sativa
ccgaacccctagatgcgccgttcggccccaaacttcacaggccggcagttaccgacttgccacgacagtttctaccgactttacttgaataaccgtcatctgctggacacatggcactaggaggataaagatgctcattggatgcttggaggatctccactctctcaagtcacctccacactataatacccttctcctctccctcattcacacacaccaaagcacgagctgaattacaagaggctctagtgtactttattgtatattagaatagggagagagaaaggtagaaggaatcggaggaatcccggagttgtctgttatctcctcttacttttgtatcttgttaattactctgctttaatagaaacattattctgagcaattaaggtttgcttagtgagaattacttcttggttagttaattgcgtagacgcggtgtctgggtaattaatctccagtggttgctgcatatcctacagtacgtttgaggtgggtatagaggtggtgacagccctcaagagcacttaagtcctccctgtccgggtacatagtagagcgacatctgggaacagcgggttgccagtgcctaaagtattgc

SEQ ID NO: 36566 - DNA, 544 bp, Oryza sativa
ttcgactaaactcgaaaccctaactcaactctcaactcaattgctctcaaaaagcgataccgggaaccctcacgctccccctctatttatacccgaggtaggcagcctaaagccacgaaccaaactcatactagaagtcctaaacaccttaggaaaccctctagtacaagaaacaaactttacataaccactcataccaaatttggactcattccaaattcgactccgcatcccatacgcacacaatacctccatcgtatgccatatggaatcttcaccaaccacgtgcatcaactctagcctaggtatcccacatgatctctaaccaccacggacgtcgtcttatcccaagccgactcccggtccatcaccgcaaatactctcccgaggcatcaagtcacctacacatgaaataaacaaagaaaaccatattccgagaccaagctatctccaacttgactcattagtagcaaacaacagtattacatacgtatagtatccatctagaagccataatcatgaaacaatcacggatatccaaaca

SEQ ID NO: 36567 - DNA, 722 bp, Oryza sativa
  unsure (1)..(722): unsure at all n locations
ttcgagggaggagaaccaatttttatcacggggcatgcgctgtgaacaaccggaatccacgatacacacgctccccttccttgccaccaaagcctacacacaagcaaaagtcgaagcctcaatactggggttagataataaaaatttaggaatccagtactaagacacgacaagtagatcgaataggcatatatccgagtgcaaaaataatttgagaatttttagaaaaaaaatatgtctgaagccggtctgaccgccgaggtactgccggtccgaccgccgaggtactgccggtccgaccgctactaattggcggtcagaccggacaccggtcagaccagcggtacagaagcggtaagactccagtcaaaccggacaccggtcagaccggcggtacagaagcagtcaaacttaggttagaccggacaccggtcagaccggcggtacagaagcggttagagaagttccacccaagttgagtttgtactgcatatattgtaaaaattgtcacgcatgtatttgctattgggagcgctcaacactatacgggagaaataccaagccaaaattaattgggggcaatttcgttcttacccctacatcgatgtttaatattgattttgccatgttttttagggtttttgtttttgcccttatctaaagtggggatcctctagagtcgacctgcnggcntgcgngcatnggatctgcattcacacgtg

SEQ ID NO: 36568 - DNA, 985 bp, Oryza sativa
ccatagcctaaaaataacagaaaaaaaatctgaatgatttgaattacccaaataattatcatccaacaaagctaaaacaaaagtctaaatacaagatctgaaacaaattccaataaatatgaattttaaaaaagaaaatataagaaattacatacacaaatacctaaagttacagttgtaagaatagtacatttaacatataactaaactaaatttctaaaaaaaatctcagtttaggatactcaatccactgtcacaaaataattcacctcagtgtcacgaagcatgtcatctcaaactttcagaatataaaattcactagaataaaccatcattgtaaaaatttcagtgactacaaatcactctataatttaaactagtgaaatctaatgcagttcaggtccttttgtactaagaaatagaacaagatttcctctgaaaatttctagatgaatagcagacacttgtcccctctaaaaaatctgaatgaacaacagattgaagaaagttatctcaaactttcaatacaataaccatcattgaaaacatcaaacaattcagtttagaaaacaatatctaagaggcatatgaatctaaaattgattttaaaagagaaaatatacgaaattacgtacacaaatacctaaagttacaactgtaagaatagtacatttaacatgtaactacagtaaatttgtaaaaagttcttagtttagcgtattccatagcctaaaaaaaacttaaatgattcaaactacccaaataattctcatccaacaaagttaaaaaaaaagtttagcaaaagatttgaacaaatcccaatccatatgcatctaaaaattgatttagaaaaatgaaaaatacacaaaattacatacacaaaaacctaaatttacagttgtaagaatggtacatttaacatgtaactacactaaatttctcatgtttagactaattgataggctcaaaaataatccaccaaata

SEQ ID NO: 36569 - DNA, 635 bp, Oryza sativa
  unsure (1)..(635): unsure at all n locations
tggcccccnnaatagatcgacttcattgacgccngcggnngactctagaggatccccgataatgaagaagcacagtgcgtggcttaagctgctcctctgtcccaagaagccggcgaggtccgcggggatcgtcgagacgtgggcgggggaccggtccaagctgctcctcgggcccaagatcgcgtcggggtccaacagccgcattcaccgcggcatgtacggggagcaaccagggcagctcgggctgggttatgcacgagtacgccgtgacgtcgccggctgacctcgccttgtcgcagctccggctgtaccgcgtcaggttcagtggccacggcaagaagcgcaagagggagccgcagtgtctggacttccacgacgacgacgacggcggggatcaagaaagcgcgactcaccggcgcgccgtggctgagaccactctgttcgacggatacgtgccttgtcctgcagccgacggcaccgaccagggcacctatggcgtgatcgaccgcgaatcttcgctggcgtcacattggcttccctatcagatcgttcccccagcaggagaaagctgatgccactgctggtgtagagaatcctttgctcgatgaggagcgcttgtcaccaccacaacccgt

SEQ ID NO: 36570 - DNA, 570 bp, Oryza sativa
ttaatgatgtgtctttttctatatgtctttctttaaatgtggctgtagggaatactacttgtataaaaaatatatactccctacgtccctaaatatttgacgccgttgactttttttaaacatgtttgaccgttcgtgttattgaaaaacttttgtgaaatatataaaactatatgtatacataaaaatatatttaacaatgaattaaatgataggaacaaaattaataattactttttttaataagatgaacggtcaaacatgttaaaaaagtcaacgccatcaaatatttagggacggagggagtatatattagacctaatattttttagttttttaactatacagaggtacgcaggcgcgggattctaactagctagctagctagtattaacgtcatcgttgattcgcccccaaggttgaattaaactagtcgacgatggagctctataaatggcagtcccgcttccacgagctattcatgcactgctcgatcgatcaactgatttgtgaagaaggaacaacacaagatctagacgtactaagctagtactctagctcgctagctag

SEQ ID NO: 36571 - DNA, 560 bp, Oryza sativa
cgaggtgagcggcggatgcgcctactttgtcatttggagaatgccggatgtgtgccacgtgtacaagtactccttccacgacgatgcggcgacgccaatggcagagctgccattcgaatggaccttcatgatcaagagaacactgtggttcctgccccagtattccagcgtagccccaactccaacccaagtaacttatactcctaactatttccttcctcccttccgcaatcccaccctaaaattttttaacatgtcacatcgaacgtttgaacacctgcatgaagtattaaatataggctaaaaaacaactaatttcacagattgcgactaatttgccagacgaatcttttaagcctaaatgctccatgatttaacaatgtcgtgtttacaatgtcatgttacagtaaacatttgccaatgacagattaattaggcttaataaattcatctcacggttttactgacggaatctgtaattaagttttttttattagtgtccgaacatcccatgcgacaccatatttaatatccgatgtgacacgccacaactttacacc

SEQ ID NO: 36572 - DNA, 568 bp, Oryza sativa
attatatatataacaaagtaaatacatctaagcacttatgttactcaatgatcaaatgatgaacttacagtcctagggttcaaagcatccagccgccgccctgcacctctatcaacagctgtcctgctagtcctctcaatatcatcaccagaatcggaaattgtagtagtcttggccccagctcccagtatcccctgtccctgtacagaacgaggggagaatagaatgaggtgaaaaaatctcacgagtgatgtgatagtataaagcagcagttacaatgctatgaacatatctatattttttcaatgggagcaatatctatcagtcttgatacgatactcaggatgacaagagcattgaatagctacatctacaaaaaaaaaaaaaaagaagttggcttgccttatttggctgctggagctggtgccttgcttacaaatattttgggttcacatgaatgctgtgggatggacgattggattgagaatcacgctttgatggtgcagcgcctgatgatccattagtagatgatctgaagccaagttccttctcaatcacttggagtgaa

SEQ ID NO: 36573 - DNA, 570 bp, Oryza sativa
  unsure (1)..(570): unsure at all n locations
cggaagtagaattgaatccgactacgagtccgagtcaggtacgctaatagtggagtaatacggagactaaaccggggtcggccagagtaatggactgtttgtaaaccaaatttgaaaaatcaagtttccttcttatgtctggctggaagatcaaagaacagcaaatcatcaattgattcatttgccagctagtactccagttgaaccatcagttatcctaattcattcccttttttctaatgttcagagtacaaaaattcatttctggtaatgagatgggatcgctgtctcccctctccgctatggcatctcatctactccgatcctccccgagcataactttgactaattaatcagagtatcatccgcaaccgaaagtaaacatgaggaagagagtcttcctcccctttctctaatttgacagaaaaaaaaagaagagaaagaagcaattagtcactaacagaatttgagcatcagtcttgtcgatcgatcagcattatctgctggtgtcgccgccgggcgccggtgatggtgacnatgaggaggaatactcccatggcgtcatgtcca

SEQ ID NO: 36574 - DNA, 573 bp, Oryza sativa
tgacgactatggcttacatgttcagactggcaattgatctggccagatatgtcatgggttatatagaagagttaacatgttcatgttgacaaatgatgcagccattaggcagttgacgatggaggtctcacttggtataacaagagagttggatgattgctgtaggcccaagcttccctgtgtagtatgctcttttggctgttgataagtcgggtactggatcgaaagctgaaaatcccagcatgcaaagaccttgttatgatccttctgaaaagttggtccttcgtactttgtggatattaggaatagttcaagctgataccacctccgtatattatagggcatttttcttttggaaatatgaatatattaatatagtttttttttagagaaaccgagagatttatattaccaaaccagtagaatcactaggtaccagccgttccagaccaggtgggcaggcgggcagcctgcccaggaagacacggtctggagattaaagccatacgcgggaagctcatgcgccaccttatcaatactagatcttggggcgcgcctttgcgcgccgcctga

SEQ ID NO: 36575 - DNA, 571 bp, Oryza sativa
ccttcctatctccatctctcaaatcactctcctctcattgacgcatgcctcattttttactcctccaagcctcctgaccttcccttgatgtttccccttctaccaacatctagctatccacgcccccttcctctcttcctccttattgcgctagctcttgagcccttgcgtgatgagcctatagatcaccgaggtctcacattctctctcgacctccttgtctcgttagttttccctactttttttcgtcattggtagtcatgctcgttgctcccaccgttgacaagcctagatctagcgagatcccactgtcgagctccaccattccttgttgcggttggttctatcacactaaagagcccttctcgtcacacgagacccatcggtggcagtgatggaggaggagatgcgtagcaatggagtgagaggaaggtgatgcgctgacctactttctcatcatcgatgccgcctcactttcatcaaccatcgtatatttttaaagtaattttcgtatatttttttttaaaaaataacacattgttttagcatttcgaaaagcgtgcacggtaaa

SEQ ID NO: 36576 - DNA, 563 bp, Oryza sativa
atctgtggtgagttttgttagggcgaatttgtggtgagttactatgaatccttgtcagtgtgatgtataaagtagatatccataaccagctattttcccttttctcaagttgttcctattatttgtctttcaaatgataaaataattggaggactcactcttttcgggaaaagagttaatttctccagtgggatcgtgttatgatgattttttttcaaaaaaatattcaccatgtttgcaggttcttttttgtgagagctgggatgatggcatggttatttatcaacctatctttgtttgcaaagagctacctagctggttcagccaatctttcagtcattctctaccaattcttttgtgcggtattggacatggacatttcttcttttgatcatcatatactccatagttcatgatactagctatgtttcttcatgcagtggtatattgcagattacttccgtcatgaagaattcatgacttcaacgtagtatatcattttgtcctataatataaagatatgttaatatcaatccagtgtgcctgaatgatcatctgaaatg

SEQ ID NO: 36577 - DNA, 570 bp, Oryza sativa
ctccggaaaaagtacacttaaaaggacttaaggttcctcagcttatcatcgagttataaaattgtccctaaccacaaaaactagatatttgacatcctccaacttacaaaaaccattcactcttggtcctcgggtggtttttaccctggtttcgttcgatatggcagctgttcactcttggtcctcgggcggtttttaccccggtttcattcgacatggcagttgagtaagcgtgagacccacatgccaggtgacacgtcgtcacctctatttcccctttctctctttactcctctctgtcttctctgtgtgggtgaggcggggcatgtcgacgaccgagctccaccgccgcacccgacgatgacgacaacgcacaggtgcgagcctggccggagaaggggcggcgggcaccagccgcagtgtcagactccgtcttcacctacgttgccgtacccgacgatgatgacgacgacacacgtgcacgaggccgggcggagaaagggcgatgggctgtggaacggcggaaggcaacagccgcggcatcagccaccgaggccttcgtggggagag

SEQ ID NO: 36578 - DNA, 859 bp, Oryza sativa
  unsure (1)..(859): unsure at all n locations
gcattttccacccagctagaggcccatacggtttacaacttcgctacattgataaaaaataaacaggggcataaacaagagcacactcttaagattgtgctacaaatacaactattcatccttgctacaaaatactagcaatagccccctcatataagttactcataggacagatanaacagtagataatctagccataagttaacacaacagcaaggcatgaagatgcatcacacttatccatgcccctcatccaaaaaacatgtccaagtccaaatccatgttatcctctttatcatccatacttgttccagaattttgttgatctccacctttccaagagggattagacagcaccacacgggtctgcttcttgtgagaaggcgcggtcaacacaaccccttgtcgtttcaggttaccctttaaacctgcagccagcaaaatattaagtgaaaaccggctcaatgacaactaaacagtagctctcatatatatatatatatatatatatatatatatatatatatatatatatatatatatatatatatatttcataaataatttaaaagatgaacatttaaagacagttgatttgatactttatattaatcttgtttaaactgtgcatatacatggatatatgcggagtaataaattttattttataatatagaaaattctactttaaaaccgctgttctattagcatacagcatagtatgttttttttctggctttatagctgtagatacgtatgtttgtttggttttttgaagtgaacaatacatatgggtaatatccaattatagtgtacgttaacttttctcgtgaaaatttctcttctatatatcggacat

SEQ ID NO: 36579 - DNA, 607 bp, Oryza sativa
tagtagggtcacctgagctcggtaccctgacaaagaaatatgtggtcatgcactcatgcgttcgtaggttagtcaatgcatttatgtaacattagattctattgttgactttctagatcttttatatttccttctaaaatgaaatgtaaatgcatctttcatataatattgattatttagaaacccaactattacaaagtattagttttgcttgaagaagcttacattagtaagcatgttgaagttctccaaagcttgaacctacaaaacctggcctcgaacattcgtatactcagagttccactttctgtggaaaagatgtcagttaacgaccatataaatcataacggtcctagttataccctcaatacaaaatcaatgcttagtgaggttgaataacgaggttgttactacaagataatacacctgaagtgctgtcagatagttatggattgaaaacatttagatagtgcatgaaccgagttacctgaataattgacaaagcaattaaggacatatcacataagatttgttctacaatgatttctcttaattccaaatagcacatgcacataatgtagagttagcttgatccattcaagaagac

SEQ ID NO: 36580 - DNA, 610 bp, Oryza sativa
aagatgccttagttgacctcggtacccactgttgtgtccattaattgttagtttagtctaaaaccttttggttagttagagaacaaatcatgttcagtatgagtttcacactgaaattaactttggaaatgtatcattgcttaataagaggaacatgtatttattttggtaacatagtttttttcagtagtaaatagtaggtatatacctatgcaggcacaaaataagttcaggacaaccaagctaggtttcataggatatttgtgtccttgaggctaagtagcgatccaattttgaattgctgcacccaccccttgtagtatcatatttcatcatgtgcatcattatccacttcactgttcgttcctaccaagggaaatcactcagtaatgtaattagtgtggctactgtagtgatttttttttgtgtccattgtacataaaaaatgatttaagtatatgcaattttttttttactttactaacgccccatttgttttttaatttcagtggaccataaccaagagcaacagtacagacttcagtttaacaacgccaattgttataaatacgatgttggcaggtgtattgagtgcattctgggctttgtt

SEQ ID NO: 36581 - DNA, 615 bp, Oryza sativa
atatgcggtattcgagctcggtacccattaagccgccttaatttttactacataaaaatcagtaactaaacattcaataaatagacttgcatcaacgttgtcaccagataatttctgtagaattatagaattaatacataaatttcatgcttcatctattgtataaaaatcatacattggtatcgttcacttttgcatgtatgggaaagcactatattggcatacaatgccgcataggattgatcgactgtatgtgttgcttaaaaacaaaaagttgttgtgttaatttgtttagaacttaatcaaatcactattacaaaggaaaaccttaaaaataaaattctccgaacacttaaccattaatttaaggataatttattaagtgaaattgacgaggcatgatctcaaccgtatagaaataacggatggcatagatttagccaactccactcgatacatttgtacccaactctaggggatccagaccccaatatcacgatgacccctttgaatcatgttctacacattgtagttccatttactgctgattgcgacaaataagcagaatcctatattttaaatacttcttctgtgctaacttagattcaatatgca

SEQ ID NO: 36582 - DNA, 612 bp, Oryza sativa
  unsure (1)..(612): unsure at all n locations
aaggtgctnctgntattcgagctcggtaccccgaagtactaaacatagataaaaagaaaaactaattgcacagtttgtatggaaatcgcataacgaatcttttgagcctaattagtccatgattagccataagtactacagtaaccccacatgtgctaatgataaattaattaggcttaataaattcgtctcgtggtttataggcgagctatgaaattagttttttttcattcgtgtccgaaaatgtcttccgacatccggtaaaccatgcgatgtgacacccaaaaattttcttttcacgaactaaacagggccttagttttgtttttgtccaaatggctgtgtacatctggtttgaataggagagggccgtgttcttaattatttttagaaaagaaatcattttttctaagtcaattttgttaaacattgaccgatcgagtttatgacagcatgcaccaacatctacaagatcagaataattttattattaaattacccatcaaagatattttgttaatgatatatattgttataggtgttgggtatattttccataaacccggtaaacgttagataagtttaacttaagataaagctaaaataatttaa

SEQ ID NO: 36583 - DNA, 626 bp, Oryza sativa
  unsure (1)..(626): unsure at all n locations
tgtgggctannattgattgcgatcctgctcccnaccctaaaatttgagaggggtccagggcccccactgctaatacgctaaatccgtctctgcccgggcacagccgtgaccgtggccggaaaggggagatggggagatggggagaggggagaagaatatgtaggggggtgtgacatgtggagcccacgtggacccccaccattttttttattactttgtgtctaaaactgacatgggggtcccacggggtttaatatttttcatattgagttgccacgtcaccgccacgtcaatgccacgtgggatgaagacatagtcaaaagagccatgtaggcgccacatcggccaaaaccaccctccatactgtcgagggatctcgtttgtctggttttcgtaagttgagggacgggtcgtatccggttttacggttaagggatgaaaatcggactgaccgacaaatagagggacctaaagtgaacttattccaaagagaaaagcccaagtaaatcactgcgcagtccgagtccgagcccaactaaaccacgttctaatctctcctcctccgagtcttttcggtttggctcgatccgctttgccgcaacactaaaaaagaaagaaattcctta

SEQ ID NO: 36584 - DNA, 533 bp, Oryza sativa
atatttttcaacacaaaacaaacataataacaggtagaagtgaaatgattgtgttcctctaattttgtgtatttctaaatgttagtgctgtgagaaagggaaaaatacacacacgttttttttttcatatttccaaaagtgtttttttcaatcgtaggtgacataccatatgtacaagatgcgctcacgtggatagtttgataatcaaatgatttacttaactcatattagtaatctaaatgtgtattttgaaagtagaatgatatacacgacacacataaacaagttaaatgaccctccatatattttactgcataataaatgttagttttaatgaaactaattttgtgttgtagaaattgctaaacttttctataaaattgataaagttaaaagaaatttgactagtaaaataagtcaaaactgagggagtaccaacaaaaggactaaaattttcgtccttttttgctgttaaaataatttaattttttattattattcttttcaaatacatatgcattttataagaaaaa

SEQ ID NO: 36585 - DNA, 570 bp, Oryza sativa
accctttttttatctctgctttgcttccatgcatatcaaattttcatttttttattattatttcttccatgtaataactgcctttgagataagcctaaacaacatgttctagtttctttcaatatcatttttaatgggaaaggtgttatcaacaattctagttgttatcaatatagtttcgttttgcagaaactctaccaacttctcatgtatcgttttacttgattaggtggtgaggggagtggccaagaagagaaagtggacgagaaactgattcttttctccgggaatgattacatgggcctcagctcgcatcctgcaattcgccatgccgcagtgaaggtgctcctttcttgcacccatggctattgtttggtgcggaatttttttgacactttaggatttgcaccatgtttcattgaggggcaaatcctagactggcgcatgatcgatttttccttgtttgatctatggagtggactgaatcaatgcttccgtggttaactttgccaacattctggtgtatctactagacagctgaagagtacggcatgggccctagaggatctg

SEQ ID NO: 36586 - DNA, 510 bp, Oryza sativa
gcctccaagttttccgtggggtttacttcatgcaatgttttctctagtatctgaataatgtagtttctggtaaactcatcttctgtcatttatagctgcactaggaacttcaattctcaggctagtgacgttgctatctaacagttaaacaagtactgttgcgctactaaccctttcttcttttttttgcagtctggcatcgtttgtgttcttattgatgctctgattaaattggagatatattcaaactatgtacaggtgtttatgacttgtctttttttgccatgtcttaattgttagtatcactgttaggcattacacacatcatttctctttaagtaacttgaaattggtggtattgcaggcacaccttgctcctagtggttacctaaagatacccactgtgagttttctattctatattttccttttaattccatagtaccagaacctctgttcttcatttcccactcctgtttctattacccagccatctcttaggctgtgttc

SEQ ID NO: 36587 - DNA, 745 bp, Oryza sativa
cctcctcccgaacacagcctaagagatggctgggtaatagaaacaggagtgggaaatgaagaacagaggttctggtactatggaattaaaaggaaaatatagaatagaaaactcacagtgggtatctttaggtaaccactaggagcaaggtgtgcctgcaataccaccaatttcaagttacttaaagagaaatgatgtgtgtaatgcctaacagtgatactaacaattaagacatggcaaaaaaagacaagtcataaacacctgtacatagtttgaatatatctccaatttaatcagagcatcaataagaacacaaacgatgccagactgcaaaaaaaagaagaaagggttagtagcgcaacagtacttgtttaactgttagatagcaacgtcactagcctgagaattgaagttcctagtgcagctataaatgacagaagatgagtttaccagaaactacattattcagatactagagaaaacattgcatgaagtaaaccccacggaaaacttggaggcatgctcattcatatgaatgcacaaaagtaagggagcagtctcaaggcctcatgctaatttacaaattaacatacaacctcaatctgtttgaaattacagtcaattagtgatctaggttaacaaagaaacgaacaaaaacatattcatacaggactcaaagcatgctttctccctcccttgaaatctggcaaattgaaagaagttatcactattcacttgtaatgca

SEQ ID NO: 36588 - DNA, 516 bp, Oryza sativa
ttatatacaaaagttactttaaaaaattatattaatccatttatcaagtctttaagctaatacttaattagtcacgtattaatgggtaacaccggaaaccacggggaactccaccttccaaactcagcctaagtttagacgcaaacgcttgtataaacacacttatactcactcctgtaaacaaatgcatgcgtgtacatctatctctatgagtatctctcaagatagaatctgcatgttataagagttatgaagtcacaacagatttataccgacattgttaaaaggataattagctgtaaatacgagcatccatataactgatctcatgatttcgttggaacacatgtttttgtacgtacccctccgtcaaaaaaatttaatcctagctatgaacctggacatatacgtatccaggttcgtagccagtttttggacatagtagtaagcaataggaatcggtttaatcgataatggacttgatcgatacaattagctctattgtcgtatatatgg

SEQ ID NO: 36589 - DNA, 668 bp, Oryza sativa
cgaggtcgcgccgccactgaaccatgatcacctgcgcaccgcgattcctgggagtgggacatatatagaagaactcatcatggccgccgatcagatcctcgcgcagccttggtgggttggctcacgaacatggcggtttggcctagctgagacgatggtgctgctatttccactgccaacatcgtcggctgatggaaaagagaggagagaggaagatagtgaggggaaaagaggagagtcattgatatataggacccacattttatgttagcaaaccattaaaaaagtctatttataccggtttttaaagataggggagctcttatatctgatttacggttgagagatgagattcaagtattcaaccaagagttaagtagccatttgggcaaccagcgagcagcatgcattgatgcatagcaggagaagtgcgacacggcagcaagcagcagatgcatgcacatgtagtggcaccttgataattgctcggaggagtggtttaaagaggatgaataatttggaccttttacacgaacgataaataactatagtgtgttgtaatgaaagtaaactaccggagaaataatctttattaggtcggttctaatataagctgggactaaaaaattttatttagtcccggttaaaaatttgttgatctttatcaa

SEQ ID NO: 36590 - DNA, 680 bp, Oryza sativa
ttcctgcagcccggaggaggaagggggagaagaggaaggagcgtattgcgtatagggggaggggagtgcgggtgatcgctcacattagcaacaccctatagaggctccctcaactataaaaacaggatcaatttgtctcctcgagctgtttgaacggtggttttatcctacgtgagacgttgaccaagtctttatttgacgtagcacctacatggcaacgtagtaaaaaaaaaaaggtgggaccaaagatgctgccctccctgatctagctggccagcgccgtagccgtccccgtcatcccaagcattccgcaatgcgggatgggagcggctgccccagcgtgccgacctggccatgcaattccatcgggagatgttgcccgacaccgcgccgctgcctgctgctactgctgctgttgccggttgaagttgatcatgtcgtcgcggacgcgtagctcctccgcctgcttcgccatctctaggactcaagctgttgcagcgatggcgaatgcgagagggagagagcccctggtcttcaccacgctgtccgcaccggcgccgagctgcaccggcgccgccgaacgcagggaatgcttcgtggtgctggtggatagccgacagcgtgtccgactgcggcggtgacgtcgatgaccgggattgctgctgctgtgtgggttcatc

SEQ ID NO: 36591 - DNA, 623 bp, Oryza sativa
attcctgcagccctgtagttgggaacaaggatatgcaagaagtgatactgacaagcaggtttttctttttctgtttatcacaactccatagaaatgaactatatttaaaagggttttgacactactacataggaccccatcggttacccatgatttgtaataagccgtaacggcttaaaaaacatcaaaaccaacttcaaaattaaaatttacattttaaattttagcagcgttttaataagttaatgtgtaaacgatgagatttgctccgatctaacaaaaataactcgaggtaacggtatctcatggtaccaaatcgtttcgcggatcgttagatctaaacataacgtgtattgttagatctaacgatcgaaaatgatttgttgtcgtgaggtactggtatcacaaggtatcctggaacgcacaacaaagactgtacaggtgcttcatggaaaggtcgtgtactgcttggcgatgctgtgaagcttacaatattttcaagacgtacgcaacgagaatcaagggtcctcctagtcgcgccattcaaagcacgtcacgacctctactatatatgtgtactccaatactagacgcatgctttgcttatacgtgtcgggcatatc

SEQ ID NO: 36592 - DNA, 692 bp, Oryza sativa
tgcagcccatattgaagcaaataccttattgtcaatgaatccatttagttaaaagaaaatatttggtattgaaacaaaacgaaattgtgcttatggtacacactctcatccatgtttccttgtaagttatttacttatatcttattttcaccccctatggccctgtcctcaaaagttgaagcacatatactttttaaccaacagtaaattctgaacaaggaatacatcattatacgcttctttccacacccaaagccctgatgaggatgtcaatgtaatgctctcactcctcaggattcttgtctggaacacaagaaaccccttctgccgtccacagcagctaagccgccgccccccaccctctcctccacccacctccctcgtgcgctccgcctgcgcctcctccctctccccccagatcgaatcgcggtggcgacgcacccgagagccaaaggaccaagaaaaaaacaatggcgcgaggaggggagggagcgaagcagagaaaaatccaacttacgggcagccggagaagcaggtccgcgggaggggacacggattcctccgctcctcctagctcttctcccacggattggagaagaatctcctactaccaagaacgctcacccgatgaactccatgcgctcgcttctttctcctttcactgccgcgaccaaccacaccacagctgtgtc

SEQ ID NO: 36593 - DNA, 526 bp, Oryza sativa
agtcaacggtattatctattaaaaaacaaaggttatatatatatatatatatatacactctatatgcaagatgaagattcctggaaacgttctaattaaccaaggtagtagctaatcacgggttaattagagacatcgtcagttatagctaggttacaaacccatggatgacgcatatatagtcgtctttttgttttgactgtccatgtatccaactgtaaatgcaatgggatgtttacgttggaccattggaagtttggaacaaagccctgcatgcctatgtgactattgctgagttcgttaggcccgtagaacacgtgcgggaagcgtgctgtctcatctgaacgggtgcaaattaaaatggattattattcactggattgtctatttaattatagggacgaataaatattttgatggataagcttaaaaagatacgtactcgtgatctaaataattcatcagaaaaaaaaaattctatttcaagacagtgtgaaataaatatactccctccgtttcaaaatgt

SEQ ID NO: 36594 - DNA, 676 bp, Oryza sativa
  unsure (1)..(676): unsure at all n locations
agagagagagagagagtgtgtcataatagtgggtaatagcattagtaggattcatgcatatacgggggtgntnnggggggggntncccncnnnattcccaccccctcaccccgncttctcttctcccctccctctcctaccactgtccgctccattccaccccacccattcctccagattttgtcctctcataaacactcccccatatcttaacctcttccttccccccaagcaaactactcatctctctacccacttgctatgccccctctatttcgtattaaactcccccctttttccttaccattatacactacctgacttctgtgcacactcactccttccttttcctttcacacatccttcccctctccaccctgatgtcttaaccctctctctactccctccgcctccattcctacccatccaatcatataccccgcactaccctcatacattcgccttacccctcaacagctcttctcccttcccaactccattaagttgctcttcttaacattttgctcaccctccccacacaccctatttttcccccctctgcctattaccgccccctctcacaaccactacacatcgtcctcttccgtttctccccctctccctattcaatcacaactccttccctctttagcatcccctccacattttccccccg

SEQ ID NO: 36595 - DNA, 3948 bp, Oryza sativa
  unsure (1)..(3948): unsure at all n locations
acggctttgagatccgattcactattgccgaactcgagctcggtacccactccgagtacctcgtcgaggaggagctcgaggtcgtcatcaagcaacccgccgccgccgctgcgccaagaaccggcgagccaagccagcatccgctgccggcggcgcaggcggagcgtgggcagccgtcgtcggtgaccccgacggcgtcgttcagctcggcgaggtcgcaggagcggtggagcaacaggtggagcagcagatggagcagccggtggagcagcgggcggtggagcagccggtacgacgccggcacggtgacggcggccgccacggcggagtggtggtgggacatggacggcggcgcggcgcccgccgcgcggcggcgcgaggtggaggagcagggcaacgcgttccacggcttcatgcgctggctcacaggggcatactagtaatttaccactcgatcaatgcccagttcactcgctcgtcaacctcgccggcgccggcgatcgccggagaattgaattcaactgaatttgaaatgaattatgaatttctgatgcggctcggctctgcttttgggcattcgtgattaggagtaattaatagtgtctccttttctcttttttttggctgtgaattcttgtattattttttttcttgagtgcgtggatttcgagggtggaggatgcatatggtgggaaggtttttgatgccgtacggatttgaaaactgcttcttcctccgaattggagaatgtcggcgggaagattgaggaattcggggactttgaggcaaatgaactgaactgcccaataaaaaaacagaattatttccagcttgatcgtataggctatagaaccatgctgcattttgtttggatattgcaaatttgggagcgagactgtgtgccagaatgcatatatatattccctctgtacttaaaaaaaaggaatcaatttttgaggatgaagctagtacttgatgttgattctttttgtgattgaaattagcaaaatgaaaattactgttgcatttgtacatatatatattcaggttatacttatgcttctgaacgtgccaaagcacatttcacttattttaactgattcaggttttatgctgcagcatatgatcagtactagggctttgtttctttttgtattgttcatggggagtgtagtatcttctctatctaatcatagcatgggtgtgtgtagtactagagtacaacagctgaactttgaggcatggtggtgtcaggtaggcatgcaggcaagagcagcatggatttgttcttcttcgtccgtccaacacaaggtgatcgatgatgatcatcgagtagagtagagaatgcagtgcagagtgcagtgcacatggggatgagggttaggataggagattcctggtccttgagattacgcacaacactacaaacctcctctcctctcctactacagtctacagtgctagtagtactgctacttggaaaaggactcgcctgtcccattatttccattgccatttgggacagatggctactagtacttggttcactatcagtgtcaccattagctgctatggttagctttaatttgtctgcttaattaactgatttgctaagtgtctactccctatgtcccaaaatatcgacttggcactactaatactaggttttgctgaagaatattttgggacgaagggagtagctatctgaacgagtagcgtattgttttgaccatggccatatatctcattttgaccttaaattattattagataattatgttataattgaaagtcgtctaggtacatattttgatcgaataggtattttataaactttccttaaaaagttaagtgatcatcaaagcttaaacttgaatagtgttcatataaattatataccccagtgggtagctattaagcagcttgacctagcaagctgcatgcttgcctttaggtagggatgagctgatattgatcagactcgaaagagagctcggcaggaggacattgatgcgtatgtcgcttttgtggttggcaatgccattgccattgccatgccatgcaccggatggaaagccttttcattgttgcccttagctttgctgtgtaaatgtatgtgatgagctacaggactacatgctgctgctgcttctgcaggaagcagcaggacttcacctttgcatttctccatgcatgttaacacactcaactactgaatatttgattgttagaaaagtgaagagagaaaaaatgcactatactgagtttcttattatatatgccttgttctttttgttcgttcagttgagggatgtttttcgttttattttaatagctgaatcgcaccgttttctgagaaattcacgtataaaaagttttttttaaaaaaaacaatcacgtcatttaaatgcctggaagcatgctgctgaatgaaatggttgcattcccatttagattataaaataacacgtccattaatttgggtactatagctatcactactgaatcactgattcactgatcgatatatatatattttctatccatccatccatcgagagagaggccggtcgatcggtcagtagctagctagcttcttgttgttgttagctcgagctgggggagacaaggaaaagcaaaaggccctctgcttctggattctgcatgcattgcaatttcctttcctttcaaccttcttttcctttctctctactcccaaaaaaaaaagacaaacactagttttccgtgccaacgtttgactgtccgtattatatgaattttttttataattagtattttcattgttgttagatgataaaatatgattaatattttatgcgtgacttatctttttaattttttttataattttttcaaaaaagacggacggtcaagcgttggacacggaaaccaggtttgtctttttttaggacggagggagtacgtacgtacagctgctgctgctggtactcacagtctcttttcagccttgtgctgtgaatctgtgatgatctgtgttgctgttcaccagccgatggggagtcaaaaaattcagaagaaaaaggggaggcatttgccatcgattgaccgacacaacacacagccaagccagctgatgctgctctatctatagctctgcatatatgcaaatgtcgtcctagctatagtacagtagtgcaggcatgtgtacatgttcttttgcatgccatgagctgatcaagataaactgttgtatgtacgttgccagcagctatagctcaactgctcaagtgtggactgaatcagtgagtgtaaaaagatggagatatatgatttattttttttactgtgcctcgcatgcgagagatgcttggtgctgggggagcacaacagatctggatttttcacattttggtccttttgaaaaacttatttcgcaagtagatccctagaaaaacttatcccaaaaatggtcctttttggggcgccagagtggctgccgccgtcccaccgccgacgtggcggggcgatgctgaggtggctagggggactttttattgataactcnagctgggggagactaggaaaagcagaaggccctctgcttctgaacatggatgcgttgtaattgtctttaatcccaaccatgttctacttcctgtctactcccaaaaaaaaaaaagcagcgctccttctacgtgccaacgttggactgtcccgtgtctgtgaatttctattataaatcagatttgcattgcggcagatgacaacatactaccaatattgtatgcgtgccttatatttttaaatgtctttataaccttttcaaaaaagacgggcggatatacggtttgaccctgcaaaccaggttatgttctctttttctgaccgatgggggtgcgtatgaacagggtgctgctgggtgaactaacaggttccttcttagccctgttcatcaagtttaggatg

SEQ ID NO: 36596 - DNA, 2322 bp, Oryza sativa
  unsure (1)..(2322): unsure at all n locations
cgagagaaagacagatagttttcaacctcaaaaaggagaagtgataggtgttaacagtgtgtgaggttttttgttagaaggatagggatcctgtggactagagatagacgggagtagaaaaaatctcgtgggaggggngtatccccccccccccccccgaaattttttatttttgttttatttgtttgatatttttttcacgcttagggacacacacaagaaccaaccatagaaaaattgaactcaaatggacgtaatatgtgacatgtagaatttttcctctcctctcctctctccgaactagtgcagaggagagagatgtgcaacttttttatttttattttattttttttgatatttttttcacacttaggaactcacaggaaccaaccacgtaaaaaataaaatcaaacggatgaaatatgtggcatgtgaaattttccaaagctcaaccgaaaaacttctctcctcgaaaacacaatcttgcaagcggaatttggaggttttaatatttccgaacccggcaaagcgggggagaatcggatgtaactttttctgtagatgtccgtgcatatattatttgcctgattccgagtccgtatgagaaagttacgcctattttaatagatggcatattttgtccgtttcggtagagttttggaaaattctacatgtcacatattttgtccgtttgagtttattttttatacggttggttcctatgttctcctaagtgtgaaaaaaatatcaaaaaaatgaaataaaaataaaaaaaattgcatctctatgtactgtttaacttatatatgtcattttatgtggttatattttgaattagattaagtaatttcatatagtggtagagtgcattatgtttaacatgctgatcaaagggttttactaaaggagttatggtctaattttagtgaaggtgcaaagtagactaagtggtatgctagatattttcagacttagttaagtggtagttcgagtttaaattttttttgtggttggttgtatcgtgatcctgagtgtgaaaaaacatccaaaaaaataaaataaaaatgacaccgttgcaactccatacagagaaacaggaatggaggcggcggcgccagccatgctggtgccctcctccctggggcggcgccagcatggctggcgccctcctcctgccacgtcggttcacgtgcgccacggtagcaggaggacggcgctagagaggctggcgccgtcccgttggatgacggcgccagccactctggcgccccaaaaaggaccatttctggaataagttttttcaggggtctatttgcgaaataagttttttaaaaggatcaaaaatgtgaaaaatccagcacatcagatcaggtgcacttggggctagctagctatagagcaaatacctacatatataggaaaaaaaactttcatcttttgtcggaagtgaccataagaagaagaataaaaatggcaaatccggtacgtgtttgtttttaaataatatgagcttttattaaactcaaacaattatatctaaggagatacaactatgcaatgagatccatccgtatgacgcatcctacgtgcagaagcaaatacagtatgcactggcaccgaccatagtgacttcatttgtaagtgtgatggatttctcttcgaactttatggtttatgagaggtatcaagagctaccaaattcttctaagtaaaacactaccaaattctacagtaaaaatacaatacctccctctatctcatcaaagattgaaacatcactatttcattactactcgtaagctaggctcaaaagcctcaaaccaatccatataagtagcactggtagagaaaccatctttgatcggtcgaccaaattccacaatagtcccggttgcaataaaaaccgggactaaagatcatttttagtcccggttcaaagaagttggtgggtagagtcaggcttcaattatctttagtcccggttggntttgcccccgggtcttttgtggtttttggtcggccggtctttggtggtttctctacctgtgcctcttatatggattggtctgaggctattgagccttgcttacgagtagtattgaaaatgtgatgtcaccctccttgatgagatcgcgggaggtttcgattttttcagttgattttggtagtgtttaacctcgatgatttgtgagctcatgatacctcctctaaaccttaatgttcgaaggggaatggtgttccctcttgtgtcgccctgctgtcttgcatgcctgcgttatccatagtgtctcctcaccggctgttcaaaatatcatttcccca

SEQ ID NO: 36597 - DNA, 665 bp, Oryza sativa
ttttacgcgactcaaggtggaagacgagtgcgccacagataggtgggccgctttgtagggagcgagagatgggccttttggccacttttccatgggcctgaaaaatagtgctcctactacagcccacctgatctggcccgtaggcgaacgatgaaggtgacatcactcgtggacggcggcatagcaacctggaggctgggggtcgaagtttaattctccgaccccatgttttctcgattttttgtttttgttacgctgtctggatcgacagaaaaaaaaatgttgttataaagattcttatttagacatttttgtttctgttacaatgcctggatcgacaggaaaaaaacatgttgttataaagattcttatttagacaattttattttgctgtgacccattgattgcagatcgtgaggtgcaaaaaatgagttttgggcctcaaaacctgtcgacagcccaatagctagttcctatttgaaagggaaaaaaattactttgactccctcaactatagcccgagtataattcatatcctccaaccacaaaactgggtatatcgacttctccgactattaaaataggtgcaaacaatatccctcggtgtttttggaggtggttttggctgacgtggcgcctacgtaggctaaacatagactaattta

SEQ ID NO: 36598 - DNA, 624 bp, Oryza sativa
tgtggttcattgagaacctatgctgatgctcgcattgcgctctagaggatccccgctcggattaatttgtcggctctgaacttgtataggagtaaaattctcaggcgcaagcttttctgtagtctgtatttattcagaagacgcccgtctagctataccttgaaattagaaagaaaaacaagacatttgctacgaaaatgagcaagctgtcagcagttcaaatcatagtggtactactggacatgctagtgggtaacaatcgatcttgacgatggaaaccatcaaaccatggctttgtgcttgaccaaagcaacgaaagctacgtcgcatgtgtttcagactttcaggcctcgtttatctagtcaggactctgaatataaacgtgaggacgaccctgtttaaagccggctaatctgtccgtctaaaactcaaaatctaccaatctgctcgtctgaaactgaacacggacactgacctattcgctctgccaagaacacaagatgctaagtgacaacacattcaccattcaaaaattcagacatcacgaatgtgtttggagcgtacaaaacggcaccacgctgacatggcaatgtgaaaagtgtgaattttgattgcacggctgga

SEQ ID NO: 36599 - DNA, 617 bp, Oryza sativa
actccctgcatccaaagaaaaaaaatataggtcaaactttcaaaactttgagcatgtgtgttcgaattagacaaatgaaattcatatgtgtagatttgttacaaaagtactttcttcataatattgtaatattgttgggttccatacgtatattgtagtagtagaaatcactccctccggttccatgattcttgacgttggattatcaataacttttaaaatatttagtttgaagactatagaacatgatgtatagattagtcttagaaagtactttaataaaattaaatatttacttactttttgcatgtattataatagaaaatcatagtcaaagatatgttttggacagtagttgtaaaagttgtattttgtagagactatcaatgtcccaaacattttttttttgtgactggagggattatgttatttacatgttttgattttgttattgttaattgtttgagccatttcatctaacaataatgatgatgatgatactggtgatagtgttactgaacctgggtaatttacagattacttttgccttattttgttggtccattagccatatgaaatgcaacattatacattagacataactaaatgaaagactc

SEQ ID NO: 36600 - DNA, 1033 bp, Oryza sativa
  unsure (1)..(1033): unsure at all n locations
ggagtggacagtttggattgctcaaagaactatcacctcttggcgacatggttcacttcgattttttgaattcatcatctccttctcttgtgcactgcttcattcttaannntttcttttatctcttcaggatgggctgttgatatttctgcctatgatgacgatggaaaatgcacacatattcttctttgctcaaacccatcctcatatcaggctgttccaccaaaggtaactgcatgttaatctgccccttcatatcacaagtgtaagtcagttgacatcatcatgctgcaccaacaggttatctatgtacgcccatacataacattcacaaacagggctggacaagatttttacataaaacttagtgctgaagatgagccaaaggtgctacatgcacatgactggagggtttcttttatgcactcagaaggaggaactgaaaaattgcaggtatggcgtcactcttaatgataggtctagctacgtacttgtatgaatgaaattttcatgaagccattgttcagaactacacaactgtcattacttgctccagccaaatctttttcttaccatgtaatatatttggtgatagtgttctatatgttctctggatttttaggcaatattttagttagtaggtcttttctacattctgtatgttgtacattttagttagcacactattttgtttatttctcagcttagatttggttatgcaaaccactgttatttgaaaatgtgtggctgtatggtcagtatggagtattatcactttaaaacagaaacaatataaactatgcatggtttactcaaggacagacttgcaatggattgatgcccctgtgtctcccactctctttgatctcaaacttttcattctcattagtttggtatgcaaaacatcatttatgttgaaaagaagatagcatgcaaatatcaagatgagtgcctgcaaaactcaggaaaaaggagggtaattgtcctcttgttaggaacttaggatactatacatgcgctctagtatcaacaa

SEQ ID NO: 36601 - DNA, 682 bp, Oryza sativa
agctatgctcattcttaaccatttaaccattattcagattgacggctacaaaacagcggctctggtatgactagatcactagagctatgaatctgtctttaccacatcttttgtcaaaacgtcagcttcaaggactaaataattttacaaaatgaacaaccaaggtcaaagcaataagtattttcagaattttccaactgatggatatgctctttgctttagtgaaaaaaaaatattttcatcaaccatgcataagtacaaacatagttgatgtagtcgtcactatacctgctagtggtaccagaattgtaaccagtcatgtatgaaataaaaagcttctgcagatgtaagtacaaaagctctctcggtttatgatcaatcaaagagactccaacaactccaagttcaacaataagttccaatagtccagcacctgtatctgtatcattttgcataactggcgaggcttggtgatcacccagatcagatctgtaccctccctcttgtcttcttgggtaatcagcaaacttcaaaatcttaacatcagcagtctcaactatactgagcttgaggtgatgttctctaaaaccagcggaacattcatcagggttttccaggtcaacacactgaaagaaagtaacatctccttgctggatgctaacatcaaaagttgtatgtccat

SEQ ID NO: 36602 - DNA, 749 bp, Oryza sativa
  unsure (1)..(749): unsure at all n locations
aaatgttagatgtagaatcttgttgctgacgtatctttatatttgagttgtttctgttataatgcagagttgtgcactaataattagcaccaaaatccgaagttctggatttgcagaacattttatcctgatatagatagatggtttacgttttctacgaacagcactcagatcatgatttaagatgttagtttgaagactggctcagtaacatagtttctctgtgcttgtaaaaatagcacttttgccagtttgatttccttcacatatcaattgattccacttagaaagaaatcagcatttccatgttatggtgggtggtgtatgacttggttgcagtttcattttctttcgtagaatcctttgtgctgaagaatgggtgtgatatgctactctntgattatggatccagataaatctaggccgtatatagccttcacccttagaaaaagacaagaaagatgccagctgatcttccttttcttttttgttggccactctacctattctgctctaaacaagcaccactccacatctccactttgtgtgttcattctactcccacctaatgcagtggtagaactgtacaagaatcaataaccataaaacgcttgctaactatttgccttcaggtagtctgctccattgtagtggtcttcttatttagttcatatgataacttcttttagtacacatatgtttgagttaacacagataccacatggtatactgacaaattattttacaaa

SEQ ID NO: 36603 - DNA, 656 bp, Oryza sativa
  unsure (1)..(656): unsure at all n locations
cgatgggaagtttgatcatttcggttcaggtcgttactcatatcaaaactatgattatactattatagcngctaatatagtatcatcttctataccaacgattatattggtaatagcagagtaccctccccttttgtcattatgatcctgaatgagttgaaggctcgcgcccatcaggtaccagaccattctgccagggccaaaatcaaggttagcccttgtagaatctagtaaagcaaattctacagacagggacttggattgatgtaacccaataccagctgaagctctagtttacatatgctaccgtgtcgttgattgttgtcctaggaatttaaataatggcatgagtgctaatatatcgactcctagcaaacgtaatatagttggtaggtttgtgaggtcgtctagtgtttaagtggcgaaagaatatgatccattgggtcaattagctctctagcaaatcaacacatgatgccttgttacggctgtattacaattaatgaagaattcttcgatgcagctaaagatttggtagtatcagttcataaaataaagagcaggcccctaattccccgcaatctagggcaatcatgcttttctttttgtgctatagagatctctcacaaaaaataagatccttatccccacatagt

SEQ ID NO: 36604 - DNA, 540 bp, Oryza sativa
ttaaaaattacaccggggtttttaaatcggggaaggcgttgctccaacttggttggggaaaaaaccccttttatcccaaccgtgtgcttattcgggaaactatggttgtgggcacacccgggagacacaaatttattgcccttggaaataccccttgttcaagtttttacaaaaagggttttgggggggcctacaagattttgaaagaggggccaacaaccgttcacataaaaaaaaaatttgtgtttgcgcctctgtgtaaccactccttttgaaaaaaagaggttgttttttctgcaacaacacaccttgtggggggttttttttgtcagccgactttctcccacaaaagggtaaaaaatcttttttttttaaagggtgccctctggaaaaaaaccgttgaggttttggtatattataaaggatctacctttctttataaagaagggttcacatacaatttttggaaagtggtgcgtcacatttaagggcgccctcagcggtgtttttttaaaaagacacctcccgataattaataag

SEQ ID NO: 36605 - DNA, 613 bp, Oryza sativa
cagatggctgtcgaaccacggttgttcgacagggtgctaaacatgcgatttcgcctaatcgacctatatttttacaatttttcattaaaatcgtattatttccaaaaaaattcgtgtttaaaatactttgaataataaagtaagtcaaaaaaaataaataataattccaaacatttttaaataagacgagtcatcaaagcaaacaaaaactcaaaatcccttatattatgggacggagggaatactttgaaaactatatagtatcgttttttttttcattccatgtttgcattaacttcatttcggttgtaatcccaaagtttggccaccgttattttaagactagccactggaattttagattggaaaagaacaccggtccattttgcaactattgtgaagtttgccggtttaaagtgaaaatctgcaaactagataaaaatttgttcccaatatgcaatttactcttattataatctttcagaaagactggtagaatgctggcaagtgcttaaacagccggtttcaaagtctttccaacatcttgatcaatagttgacaagagtaatgctatctgaattctgaaggaatgctcacacttgtataagaatga

SEQ ID NO: 36606 - DNA, 719 bp, Oryza sativa
gcagtagttcatcacatgtcttgtctcggaatgcatggctatgacactgaattaccttactgggtctgaaatcccaaagccaattaaactccgtggattatcatgacgtgctatgtgcaagcgagctagctagctacgcttctgaatacttcaaaggacacttttgaacatctcaaggacagtatttcactttgctcactacatgccatgcacatgcatggctggaattatatgatcattatatctacctttatatcctgacatatagcgcctgatagagccccatctttgttggtccactcttaaacggggggccacccatccgtacacccagtgaccatgtgataacaacatcacctataatgagatgctcccccacaagtgccagtggccagtgcatgggcgcccttgattatatttcgccctgcatatctaccaactgataatacatactatctgtgattgatcaactatcatccaaggatcacgctactgtatacatacaacattaactagctctgaagagccaaacctaactacttaactatgaggatcctcagtgacagtcaatatgaaggatattgctgccctagattgagagttcattaacatgtgaactatcgggaccagcgatacaacggatctatatgatgtgagttcactatgtgatgcttaccatctacctattggacacagctcgagagctcgaagccatgcga

SEQ ID NO: 36607 - DNA, 657 bp, Oryza sativa
actcgctgatggcggcaacggagagacgatcagacgacgaccttaattggccggcctgcatatatatagttgattgtactagctccgacccatattactggacttttggagtggaaggttataaagtggagatcattcgccttattcaaaaaaattgaaattatattattctgccagccattggctgaatgatcaaaaggactgaacatatgacttatctttttttataattgcactaattgttcaaataagaccaatggtcaaacgttgcatgataaaaagccaaaaacgtcgcctattatgggacacagggagtactgcattacatgctgtaatctattccctcctccgaacttaaatattctacaccgttgacttttataaatatatgggaccgtggatcttatgaacaaccattcagtcattatgagttattctcctatcactagattcattgtaaaaagtactttcttgtttacatatggatttatatcttccacaaaagttcttgaacaaaacgaacgatcaaatattttttaaaaagttaatggtatcaaatatttaaggacagacggagtatatacttatctgattctctgttccgaggcagagtagaatccgctctatatgcctgcctccaaggaccaacgagaatga

SEQ ID NO: 36608 - DNA, 573 bp, Oryza sativa
cccgcatcgtcggtatctccgccagtgtcagagtatgaccagtacgggatttcgtttgcatgtagagggttgcggatatgtggatcgattcaggagatattctcgtatgattttggcgggttagagcgactcatgattcagtatagctcgggtttggtgggtactcgtggtcagtcgagaaggagtaaggaattcctttgcatttatatgatgagtgttatagcgcgagactgttcgatgtgcgatcacagtggtcaacatccctttgttagttgtttgggagtagtaaattatggtatagtcgcttacaattttggttacattattcatccggtcgcctgtggaatttggtattagagaatcatttcgtgatgttttagttctacccttgtcgtttgcttggcagattatgtgatagacagatgtggagtttagctatatcaatccatgtgattcatcctcccggataaataaagtggtgtagtgcaggaatggcatatgcaagcaggtctaagtgtattattcatcctatctgggcaatgagcaatgttagtactatatgcgccgagggtg

SEQ ID NO: 36609 - DNA, 2850 bp, Oryza sativa
ttggcccaatgtgacataggtgacccacagttggtgggctaggttgcgcactctaatataaaaaacaaacgaacaactcttgatcaattagtggaattggcatgtaagggatcaaaagtttggtcaattagtggaattggcaggtaagggatcaaaagttactggaggatatataatggatctagcttggaaatcttaataagagcatttaatttgttgtaataataatagtagaaacaatcctaaatgaggttgatttatgttttatgtggatggttgatcattatttgcggcagtattacctgaaatcatcttattgtactggctgacgtagtcatcaatggataaagtcacctcaaaatcctccttggggatagataaagcaccacgccttttgtaatgggactcagtagcagccccgagtgagtgaaatatacaagtgtctgcaataaattaacatagaattatttactttgtatatatagcttggggaagtaaagcaaacctattcctagtgtaaggacctgtttagatattatacagattgcgtgtaaattgcgagacgaatcttttaaatctaattacaacatgatttgacaatgtgatgctacactaaacatttgctaatgacggattaattaagtttaataaattcgtctcgcagtttacatgtagattatattgtttgttttgttattaatctacgtttaatatttcaaatgtgtatccgtatatccaatgtggcacgacaaaatttttcacccctgaatctaaacacagcctaaataagtcttactcttttccccctggtcatggaccggtggcagtaaggatttcccacgaagctcccttcctcgctagtttaccttcttactcacctcaatggtgtcgacatgaaagaatgccgaaaagatataaaagaacgatgtttcaaaaaaaattgaccattgactaatgaacacgcctttctttcctacaaagactgctacactagtacatgctgagggcacccacaatggttatctataagctctctacaagagatccatgtcagcatattttcctacttggaagagattaaatgaagagagagagcaaagctatctactaacatggagatagtctatagagaaaaatgaggcaatggattagagagctatagatacccatgtagacataccattgaagtggtttactattaatctagtctattgttgaggtgtacatgttttatagatagcaccttactttaccattgcgggtgctctgataatgctgcagttaaccgttttggtgtaaacacttaggctctgttcgtttcctggagttcccaactcccccatctcattttccgcgcgcacgcttttcaaactgctaaacggtgtgttttttgcaaaaagtttatatacgaaagttgcttaaaaaaattatattgatccatttttgaaaaaaaaatagcaaataattaattaatcacgtgctaatggactgcttcgttttccgtaccggagggatgggttcccaactcaaccaaaagaacagagccttacagtgttgttggagatgtagagacagaaaggttgtgcctttctaagaaaagagaggattgctgtacatatatgcatatggcaaatataccacgtcgttctttcaatttatcaagcagcaaaattattcaaatactcagattttgtaccaaggttgcacacacaataaaatttagttgggaagagatctgattacttccagtgattaacaaactagtaagtgaggtgataaagtagtgtagacaaggctagacaatggaagtatagtaaaagggtcaagcatcatgggctcctcctctgtcctgatttactgagctgtaggtgaatgccccgatgaacaaattaatttatcacgacatagtataccactaaaccatgtaataatcaagaattactgactaactgaacaatctacaagtaagtatggcagttcctggttgaggatttgtttcaaagtacgcactgcatcaataaagcttcgtcttttacgtacacaacacatcagaaatgcaattttatgatgtatattagggtgcaaagttgggcctttttacatacttgatgtccgtatgaggtcgggaacagattgatgagcacgatgaggaattgaggaggaggaggaggattatcttggcgccgcgcgcgttgagtggtgtcaagtgtggagctagtgtgcgtgggagcagagacacgatctgaagaaaccaaatgaatcacgatccgatcgatcctgccctgcctgagctcgtccctgcaaacaccgctggtttcttgaggccggatttgattcaaaacacatacacgcggacggacacagaagagaaaaaaaaaagcttcgttttttacgcgcagaacgcatcaaagacgcattttaatcatgtgctagggtgcaaagttgggttcttttacctacttgatgtccggatgatcaggtcaggagcgcctgctcctgctccgtcgaagcgagccgccgtacaccggcgtacgtgaaggagtggtgaccccgtggtcgaccgaggcggcggcggcgccgatgagctcaccgccgccgcgctgggtggacgcagcacagagagaggtggtctctctctctctctctttctctctctctctctctctttgagtctcaggtggtaaagcaacaagcgagaggaagacgacgacgatatatacgcgaggaggaagaagatggtgagctccaagcaatggtgtccgtcggatgagaaaggaaaggccaagatttcttccttcaggttcaggtggccaccacccacggtcccacccgcacccacacaggccacag

SEQ ID NO: 36610 - DNA, 1491 bp, Oryza sativa
agatttatggtgtgcttccacaatatttgaagtgttgtatttaatgtttagactacttttttgatacattgtgaatacccttatatttgatccagatacaacctccatctgagaatataagggatttcccccatataattctataaaaaaaatccctcatattcttatactgaggtagtattaagttgtgtcaagcattgctgtgtactacagtaatgtgtccgtatcggtcacgggctgatgcttcatgctttgcattctctcttaggccagtcacaatgggggtttcactggtgtgtcatgcacatttaataggggtaagactgaataaaaaatgattatttgcatgaaatggggatgagagagaaggaaagagtttcatcctggtgaaactcgtcagcgtcgtttccaagtcctcggtaacagagtgaaacccccgttgaggccgattcgtttcattcaccggatctcttgcgtccgcctccgccgtgcgacctccgcattctcccgcgccgcgccggattttgggtacaaatgatcccagcaacttgtatcaattaaatgctttgcttagtcttggaaacgtcaaagtgaaacccctccactgtggggattgtttcataaaagatttcatttgagagaagatggtataatattttgggtagccgtgcaatgacactagccattgtgactggccttatggatcacaaacaagttggttatcttcagacactgattgtgtagaagactactaattcaacatgcctgagagattatgagtaagagttttagtttaacatagcaaaacttaagcatgaacggggatgtagctcagatggtagagcgctcgcttagcatgcgagaggtacggggatcgataccccgcatctccacctgttgttgttttcatttttgaaaaatgcaatctttagttttcttccatgcagcaatcatgtaaccgccgcatcatctacattctcccaaattattttttaaaaattgattcttgtttgtttttcttttccaaattgaaaaatgcaatctaaagttgtctttcatgcagcaatcatatgtaaccgccgcatcatctatattcttccaaattgaaaaaaatgcaattagcagttttctttcatgcagcagtgatccataatatacctgcaccatctacattctctgatcttagaatattaacaaacgacagcataacattcaacaaagttctgttgataacagcactgcaataacgatctgtttatcacaaacgcccgaagcaaaaatacaccaaaaatgctggaagaaatgttgtggtcacagtggaatcaaattattgagaggtcctcattcatcaacgagaaatgcatccatattaagtcacaattacagcattcccaaaaaatactcttatctacagaataggggcctgactatcagctgacaaatttcatcaaatcaatactaagtgttttagtaagttatatatgctggtgt

SEQ ID NO: 36611 - DNA, 1455 bp, Oryza sativa
tatcaaaattccttttcagtggaggtcacctactacgttctcactggaagacccgtggaatatcctacttttgtttattctcggaaacaaatctagcagcgtaatcatacaagggcttttaggaaccaacagattctccagagtacagaagaaacagccggttgaagtcctgatataccgttgctggagtaatgctcaaatagtcagtgaggatcagcaagctctgggtcacaattgatttgactttgaacatttccaaaattgacagtaactaagcaaagcgtgctactgatggagcatcttctgcataacaaaaggctggttacgttatctaatgcttggagaagttaggaaataactggttctagaaactggattggcaaacaactttagcaccaggtaagtggttccaatggttttttgctttcaccaagattaacaaactgggaaaactaatacaggcagctgccctaccacggtgcaaatgtcttatctaaggaagaagagaagttgaatctacacaagaagattcctagaattacataaagcttatgctcagatctgaaggatacaaagataataatttcggtagaggcagctgaactggttcttgtaccaaaatgaaggtacataggaatgacagaatctttaagagaaaaaggagttcaagtcttccacattgaatgattatggagattcatcacgagcagtcaactgagagatactccttgtcccttcagaattggaagcacacaacagtcgttgtccttgcacattgagatgctcaattgttcattgtctcgtttacagacgagagatggtaatcactaatcagatctagcctgctcattattctactggtaatgcagtgatgaaatgtgttcttaaaatggtgagctcagtcaggcctgtgcactactacaataataatgcaactagaagggaatactaggttactgttaataccgcaaggactagtggcaattgaagccattatttttttttctttacatgtatggtgcgcttagtgatgcattaatcatgctttgaacttttttggtcatctgcagacacaggaagcatcttttgatgcagcgtggaacttgcattagcgagggcgcatacatgccgagtatgtttgtgctactgtttctgatgaagaagagatagctaaggtacgcaagctggctttacgtaaatcacatgaccaatgttcttgtgacgcacttcaattcccatgttgcaaaataagactcaaaattattttgacgtgatttagatgctgcccaagatttcaagtcaaatatgaaatatatgttgcattcataccatacatagcggaaataccaaaagtgtttgaaagatatatcattgtggctttcttttcatcatttttttttccgagaaccgaagttatacagggtcgtcatgattagaataacgtgctattcttga

SEQ ID NO: 36612 - DNA, 1452 bp, Oryza sativa
aaaaaaattttttaccttttgcaagaaaaaaaaatgaaattattgatccatgacaggaaagaaatttatttcatctgatttcaagcaccttttccttgattggtcagggttcccaactaccattttaccagcagacaccagctagttttgctgccatgattatcactgttcactcatatataaatggccaacaaatgtcttctcaattttcttttttggagatgaagtctgcttatttcatacagtaacacagagtaactaggttaagatgcagtagtacagtgcagacactgcaaacattcccagcttctccagttaattgtactcagagcatttgaatttacaacatcaaccactgccactgcatttaacattacttccaagttacttgtactgccattgatcagaaacagtttgtagtgccttaaagagaggtcaaaagcttatggatggataaactgattacatcctagtattaggttctactaatagtgagcactacaagcatctgtgctcaaccattatcttgatgtgaacatcaacaaccaaagatgatgtgcacggtaatacataatcatgggaggtttaattaaaattgtctgctgaactcaaaggtgaaagtgatgtactgttttgttcaacatctgaagattctctctctctctctctcactcacacacacacattacagtaaagtcagatactcacatgatgtaatgtagtaagttgtacccaccgatggaaggacaaaatctctgaaatgtgacaatagtacgaacaaaaataggccttttatgattaaatgtaaactgcaagccaagcaaaggttaattcctagtccaagcctacttatctttcttgctctaaattttccccccaccttaacaacctaatttggtacgaactgctacgtatttaaagggttaacactggacagagtaaagcactgatatagattttcaatataaaatgaagcgtatatctagattaaaagtaaaagaaatggagctgctgttcataaatccggatcaaccaaagaaacaaattttctttgcaattacaaactcccatactaaatctgtagatcgatgtaaacatggtaacaactgacaatgacatgcctattcctaattgcttttgacacacagctggtagcattgattcaaagaatgatcttttgtcaaaaaaggtatcccaagaatgaaatggtcctaatattatgtttgcataggaaaataaaaaagattagaacagcaaaagagtctcaaaagttgctcaaatttttgaaccatttcccctccactggatggatcaaacagcaagatcaaggcagtagtagaggtaaaactgaacaaaagccccagaaattatactacagtggtcacagctttttacaccctcccttttcccaacctcccaaacgcggaggcacccgaattcaaatcccccaca

SEQ ID NO: 36613 - DNA, 570 bp, Oryza sativa
aggcatttatagacgaaggctgtgtttagttccacaccaaaattagaagtttgaagaaaaaggttggaagtttatgtgtgtaggaaagttttgatatgatggaaaagttagaagttcgaagaaaaagttgggaactaaacaagcccgaagagagtaacatagtagtagcaattactccttctgttcagtattggtcaaagtcttgtaccagtgaaacaaaatacatcttgtatttgtggatgcagggagtaacatagttaaaaaaatatgtacacctaactagtaaattattactgggttggtttaaacctcatatgatagtagtaatacagttaaatgaagggagagtacagggattacctcaaaaaaatagaggaggaactcatagattgagagtgattcctgaaaaccaggacaaccagtgaccctgccgactttcttcagtttgggggaaaggactcaacgccagttacagaaaccaaagcaaaactgattcacctttgagtacgatgccattttacagcacgatcctgcaaaacaagtgtaggtgcccatcgaatggtggtaact

SEQ ID NO: 36614 - DNA, 2316 bp, Oryza sativa
tttgagcatgcatgatgtgatcgtcatgctcatgcatgcatgctgtacatgcagacgatccagcagtgttgtgcatggattgatcgtataaaattgccgatcgatgacgatgagagagggcgtttcgtgtcatctaaatttgtgtgaaatcaagactcaagcaaaggcatgaattattcagtactcagtcccatgcattgcatgcatgcatggccgcgagaggtgaatgatcgagcatcttcaggccatgatcttttttttggggaaaaaaggagcatcttcaggtcatgcttgtgactgagatcgagttcatgggataacgcagaacatgttatgcatcgatatgatccatattgctgcaggagattcatgtggagatgcaaaagcttattgatacaccccccttcgatatatctgataatctgaaaggagttcttttttttttcataaagaaagtctgaaagaaattaaaacaccagtactctaaaaaaagtcttaagagaaaactactccagcatgcagggcgtgatgaactctcgcaactaatttcatgcgattttgagtcatatatattggacagtgccagcgttggcgatcggttatttctccattagttatccagctgcgtgaactgtgttgatacacaggatttcaatagaaaatcaagagtgcagcaaaatactatgtggaaacacaagtgcatgcgtgctagctccggccttagttttttttttttggagatcagtacataccaccagctagcgatatgatcattcagcgacgtgcatgtcatgactaactgaattttttgcttctgaattcggttcatctgttgccggcctccctgctagtcagctcatcaaaaagactacaatttttttcagagatgctgaattcccgtacgtaattctcttctcctccagccctttccattggacaattgcagctactagtagcttaccagcaattttttggggttttcaaacaagttgctttgtactctctccatatcaaaatatatataaacatttttagactctgacacgatctccaagatgctattttgaccaacagtatctataaaaattaagatgttttaaataaaaaaagttatatattatgatagtttatttaatgataaatctagtaacatcaattttacatgagtaatattttttattttgttgctattaatagtcaatgttgaaatagtttgacttgtcactatgttaaaaatatttatattttgggacggatggagtatttcttaggtaatctgatttttttttcgattacatggaagacgcgtacgcacacataacacactcacacactggaaaatatatgtgtttcttaattaaaacatgcccaaattagagacgatggaggtccaactatagttcccctagcttcataaaaaatatgttaaaagcgcacaagtatacataatattcctcagcgtcaatagttaaattctgatggatggagtcatacacccataactttcaagcacactatactagtgcttcccttaggtcgccaacttttctcttatcaaaattttcattttgtctgaatattaatgtgatgaccttttctattcgacctaacggatgaaaaagtcaccaactttataaaatccggggcctctgctgccccgttgtccctctgaaatctgaatccgatccccacccaagattaatccggccagttttgcccgatgccattggttgccgtcgttggcgaagaagctgccggagagagctagctggaggtcgaagaagcacaggcaataaactgtgatttcttttgttctcagccttccagtatcagcttgtcccatatatccaaaatctcttactccctttgtcacaaaatgttgctatttaagatgggatttgaaatcccatcctaagacaacgagaaccggatttgactcatcctaagataatgaatctggacagaggttctgtctaaattcgttgttctaaaatgtgtcaaatctcatcctagatagtaacattttgtgatggaggtagtatattttaggacggggagtagctagaagtaccaattagttccatgaataaaaaaagatcgttcttctcggtgaaaaagatgcctaatttaattcttacaaagggatgttttttctactatgtattatatcatcatccatatcatatactcatattcggagtatatatgtactgtatgtctgtatatatcttttgtctgaatttttcttacgtgcacgacgaacagccggccggccggcagagtagcgaggctggagagattttggtcgtctcggat

SEQ ID NO: 36615 - DNA, 1303 bp, Oryza sativa
tgaatccgccgcttgatctccttagattcagtgtgttttttttgggtccattaaagcaaacatgtgttcaactagctgagatgcttccaccttttcgatactgcgattcaatcggtttgctgaatctcctcgcatttttttggatttgctttgtttgatgactttttgcgtttacttgactccttgcttggatgcaagtgtgattcggaacgtgtgcacaaccctgaaactgtagtgatgcgctccaattggtggttggatcatagtatcatcttggaagctgtagctgtagtggcagagctatcgtttgtttaattcagattagggaggcattttcctcgacgagggcacaaatcgcgggtctaggagctctagttgtgctgggaccatacgttcctcgtcctgttgcatcgtgttaatcatgatggccgtgcaccccttgcaccaaaccgccacctacttttccaatttgcactgcaaatctaacacaaacgctgaaccttctgaagaacgcctgctggtagatgtgtatataaacaattgggctctggagtgattagtgaatcttatattgggattaccatttagaatgggatgcagtttggttccttcatcttggaaattaccagaaaccagcagtccatatgacttcatctaggaaatttccaccaatactaacatatgacccatcttagttggttaagtatatattggacctatcttaaccaaaaatataatacagaatatatattggccctatcttagttgcttaagtatatattggacctatcttaagtatatatatatatattctagaaatttccaccaatactatgacccaccaattctgtattattttacattttggttaagtatatattggacctatcttagttgccatttagaaccaacaccaagtattctgctggggtttcgtacctgcatttttctcgggagactttgattttgcatacaggattcttgttgaaacattttcatgttgagctattattgtatagtcgaacttgcattactctcatgggaggccaagtagacatctcactttccatgcctcccatgctacacattattttagcatatttgtacatatatgttgtctggcacgatcattccgtattcatgatttaattgacagacctcatgccttattttaaaaattgaaggattcatcgtgttgttttttggtgtgtaaatattgatttgacctgtatctctatttctatcaactgatgtatcttcattctcccctgttatcctagcagtttctagtagagttagagtt

SEQ ID NO: 36616 - DNA, 524 bp, Oryza sativa
cgtgcggcggtgaacgatcgctatgccagtagtttatcaaaattctaaaagagttgttatattttgggacggagggagtattatacagtacaccgacaaccatttgaagacaaaaaaaaatactggtgtggaaatggtttgaacatatttttttcagacttttttttcccgctggacatagaggagcaagttcgccgcacatatcctaaccagaaagagaaaaaaaaaagatcggacggtcgctccagcagcaagatagattgtgcgtcgacatgcatgattcatggcaatgatagtgaaccccagaatttagtacagccggagatcgatgagctcacaaccttatctcatctaatcatgatttgattttttgattagttagttttagtggccaccgcgtcggctcgcaggacaggacaaggacggacagtgctgagcaaaatggcagctgcctataaaccaactgcggcagattgtttacgacgcattacatttgttagcccatccatttaattatactatta

SEQ ID NO: 36617 - DNA, 763 bp, Oryza sativa
  unsure (1)..(763): unsure at all n locations
agctccccagattagaactccatgtcagnaccncaccatcctaaaagaaggccacacagcaggaaaaactgaagccgtcccatactcagagttggattcaaaaactgataacttgtaatacatccatgctgttcagaaatttccatagacatcacttacgttattatccaactatgttaactgattaagcaaaagcatacacaactctgtccagaaagaagcagcccagtagcagcacgggccgaacgaaacactcagccagccaaaacgaagaaaccacgtcagaggtaaatagcatatacaagggcaagaccactaagttcagagaacactaataaagttaggagaaattgataaaatagaattcagagaaagaaattctgatacctgagccttcatggcctcatcagcgtgttgatgcttattccgatagttggcccattcctgtaaggctggaatcaaagcaaacatcaccggagccatcatgggcgtcttgatgctcaatataatcacagaaaccatattacccaaagcgcaaaccatgctctcaaaacgaacaataaagaatagggagccagctattcagcttagcacgacttgctgatctctgaatggaagcaacataagtcaacataattttagtttcatgtacctgagctcaacataaaacaaacagtaactgaaatgtgccagacatgttagactgcttacagttcatggtcggtaggatgaatttgacacaacaaccacattttgacatcag

SEQ ID NO: 36618 - DNA, 730 bp, Oryza sativa
  unsure (1)..(730): unsure at all n locations
cgcggnnattgannttcgaagtannnnnnnnnnnnnnnnnnnnnnnnnnnnnncttgcctaccaacggtgcacataacgaacactgtgtctgaacatacaagtgcgggacaagaaagcagagggtgttttcgaacgagctaaagagtactcaatcagctttaagcatgcggccacctatttggttttctgctgtacatcttttgagtctatagagcttacgtggaatcattgttgtggcgttgtttcacaaaacaaatcaagaatcagttgggctgacttgatttcttttgcaaaacttatttttagagagagaaaaaaacagttgcaaggtctatatgtacttagtgtgtaacaatatgagttaaggtatatatatatactatctcctttttcaatgtatggcaacattaacttttagacatgatatttggtcatttatcgngatatgtattattgctttgattttttttttaccaaatgtactttaaacctgatcaatatatatttgtatttttaatttgaccaatgatcaaatgttatgtcaaaaattccatcttgtaccttgccaatcgtccagtctttttttcatcccgttagctaattaattctctttttttttttgcctctttaagggatgtggaggtatataccacccacgaattcaatgaaatggcattctcatacttaaggtttacaaggaccatgacattcaataaccgcattttacca

SEQ ID NO: 36619 - DNA, 741 bp, Oryza sativa
  unsure (1)..(741): unsure at all n locations
gtgtccattgatggctgtcgttcagtacnncaccacaaatttgaatttgaattcaaatatttttttatatatagtatttctatacatctaaagtttatacacgttaagtttatagacctaaattttatatatccgattcaaatttgaatttgaattatatccgattcaaatttgaatttgaattcaaatatttttcatatatagtaattctatacatctaaagtttacacacctaaagtttatagacctaaagtttatagacccgattcaaatttaaattatatccgattcaaatttgaatttgaattcaaatattttctatatatagtatttctatacatctaaagtttatacacctaaagtttatagacccaaagtttataagtcaaaagtttacatacccgattcaaatttgaatttgaattcaagttttttatacataaatttttttaactttttgtttttttaaaaattttttgtggtgtactgtaataggaagagaagaaggggaggaggaagggggagaagagagagaggagcacagggggaggcgaggggtgatcgccagggcagcgcgggggcgatcacccgcgcgttaggatttccgcatcagaagaccatatcaattccataatgcgagccatgcagccattatatccgaccatacttaacattctttaatccacgtatccacagttcgttaccctaggtgtgaaaacgaagtagatagatcaaaacaaa

SEQ ID NO: 36620 - DNA, 732 bp, Oryza sativa
  unsure (1)..(732): unsure at all n locations
atgggcctttgattgatttgatcnccgnttgactgcaagtagttcatcatcgggaatctctgaccgaaattatttgaaaatttgacccaatttataaaaaaatgcaaaaaaccaaaaatttcgggcaagaattgagcatgccggcgagggtgaaattaccgcaattttagaaatttcgaatcaaaatttcaaaccgtgcgtatgagtttgtaatttactcattcggcttcatattataagttactttaacttttttttcttagttaaacatttttaagtttgactaaatttgtgaaaaaatatatagtaatattgttaacccaaaataaacatattatcaaaatatatttaatattacaacttacaaaactaatatatttacaggttttcttgttagtatgaacgagctttttgaagatgtcgatgatgaacaagtactccgcccatggaggatggggtgtactaagttgccagttgtctcttcggcaatttgaacatatagatcttgtacaacgaatttggatggagggttgtccaaattagatatactatccctctcgggtgtctttttgttttttttaacggagggagtacgtcttttaaaagaaatactcctccgtttcataatgtaagactttctagcattggtcatattcattgtaatggtaatgaatcttaacacacacacacatntatatatatatatatatatatatatatatatataggaaa

SEQ ID NO: 36621 - DNA, 689 bp, Oryza sativa
  unsure (1)..(689): unsure at all n locations
tctggttattttaaaaaaatctaaagagatggttattttgggacggagggagtattatacagtacaccgaccaccatttgaagacaaaaaaaaatactggtgtggaaatggtttgaacatatttttttcagacttttttttcccgctggacatagaggagcaagttcgccgcacatatcctaaccagaaagagaaaaaaaaaagatcgggccggcgctccaacagcaagatagattgtgcgtcgacatgcatgattcatggcaatgatagtgaaccccagaatttagtacagccggagatcgatgagctcacaaccttatcttcatctaatcatgatttgattttttgattagttagttttagtggccaacgcgtcggctcgcaggacaagacaaggacggacagtgctgagcaaaatgccagctgcctataaaccaactgccgcagattgtttacgacgcattacatttgttagcccatccatttaattatactattattatcgaacgcacacactgcacgcacccatccttttgctgcgatncgncaatggccaccancaaaatttgcaagattctgcagatcttgtcgctaccagggccacgatgtatgnttcttttaagaaggtattatttnctcgacactaacattccacttgatatatacaatcatttaaatttgagactttg

SEQ ID NO: 36622 - DNA, 734 bp, Oryza sativa
  unsure (1)..(734): unsure at all n locations
acgggcccttggatttgcgttctgactgatgcaagtcagttctcaatcttcaacatattgggcactaaactattgggaacgcaattttgtgtgtttaatcttatggaaatcgatttgaatcctttaaaggacactcataagtgtataatatactcatagatataatttaaactatagtgctttaattctcaacattttgacaaattaagctgaatatgaatctttccttgtccttacccagaatgcaacaaatcaaatgaatccaccagtccatcaccatatcactattatcatcctctctcgtttttttaggacggtttttgatttaataagcaattaacgaaaatggtaaatatccctaaactattaagcgcaaaatattggcattgagacccaatataatggccccgccgtgtcgctgtcccgtccacgtgccccccgagagctgagcgataaaaatccaactgctcagctcagctcagctcagcctccgttgtacatcactctcctctcctctctctctccagaggccacggcagccgccaccgcccggagaaacaatggaggccggcgagggcagccgggccgntctttttcttctcngcgncgacgtnttncttnctcgncgncgtnntccacggngccctcgacttcacctacctcggtacaaggttccaagatttcttttcatttttaatttcncattccaggtattaggctccttgcttcagggg

SEQ ID NO: 36623 - DNA, 753 bp, Oryza sativa
  unsure (1)..(753): unsure at all n locations
gcgtccgtgatgacnatctgttaggacnncatcattatctcctgattttggcatgtgctatgtgaatttcataatatgatctttaacaatcatattttgcttgttcaaatttgaggatatgtattgatcagtaaaggggatatttgttgcttctgaacctgtacatgcaattgttgtcaatctttgagttatgataatttattaaatatttagtcacgtggatttcacgtgcatgcttactagtatgtaaaatgtagaaaaaataggagggggcccaataaaaaacctacctacatggtttattttcgtagtcccgctccctctccttttctctcctcccatgcgttaattccttttccatcctccctattacttcacctatcctcctttcggcctctcctccctttatctccttttctcgacggttggtaaccggatccgatagcggcgaangggtgggatgagtggtggtggaagcgttaaatttgcctcgtgcgggaaggggcgatgccgtgatggttgctacggtgactactaccacagttgtgaggggcgaaacatcggcttaggtggaacactacaatgacggtagactctaggtatgtggaatcctctgtagcaacaggagaaggggattccatcgtgacctctgcctttcatcgttttctcccatacttagcgcatggatcctcaatattcctggcggtgggagcacaggttcttattttactctctacaagaatcggtctttcg

SEQ ID NO: 36624 - DNA, 774 bp, Oryza sativa
cgatgcttgatttgcgcgctggaacagcacatcatcaattaactggcaggactcgcatggacgatttgaaacctcaagaactaaactgagcccaaagcgaaactttatggtccatgtcagctattcacccctaaaaaaaagggactagttcacttggctgggtgtgttgatgatgacaacaggtggcgtggtttggttgtatctgaatgttgggagaagacattcagtgtggctccatggatgggttaggttggattagagctgagtaagagacaatccctcagatcatgggaaagaaaaagagatgaagacgctaaaggaataggagaaagacggaaggaatgccagaaaggacagaaaaggaagagaaagaatgggaggtcaggagttgctggagatcacgatatggttagatctcacttccccaggccccactcctccaaggacccaaggagtttttactttgggggccccccagggcattgggggaatttgtggatggaatcagaggagagagctggagccttggtcctcttgggagtgtctcaagcctctttagtcaccatggagataggttgcctctggcctcagagactcccccagggcctgaggccccttagccacgatttagcctttcttcaactcacgcccaatcccccacagggcagacccacgacaccaccgaatgacagatgcacagagagagaccccagcaagccaaccacggcggcccgacccggaatggaaactgcgaccgaccgtggatactagggg

SEQ ID NO: 36625 - DNA, 773 bp, Oryza sativa
  unsure (1)..(773): unsure at all n locations
ttgggggccgcttcactttttttagaaaagacctggttgagggctccccccgccccacgagaacatccttaccggcgtgggtggcatttaaaaaaaatatttccttgcttccaaaaccctgaaagattaacaccgggggccaacctatcttctgttcaaccaattggaaggacccgaagggggataaccccctcttttttacccacacatggggaaccaattaaaattaccctaattgttggggaaccgggcctttttttaatcttttcccaacacaaaagagggcccccccctaacccctggacaatgtaaaaacgtgtgccaagcatttaattgggaaaaattattttttttattctgttccccacaataacaatatttggggggcaaaaagtgtaaaccccttttccctcccccttccccgggttggtttttgttaataaatataaccaaaaacgggggtcccgcttattaaaacacccgcgcgcgggagggcccctcctcctccaattttttctctccccggtcccgccaattgtgtgtaaaaaaacaaaacaccccaagagggcgcgctctttaacaaagttattgtgaacccacaactcaccaaccatcctttcgggggagggagaaaaaaaagaacaatncatcactccgttcttcttgtttttcatctaatcactcaccacaaaccaacaaaacttctcatccgttgtgccgtctgtctgcctgctcatccgacaacaacacactacatctttcctcctctatca

SEQ ID NO: 36626 - DNA, 623 bp, Oryza sativa
ttggctaaactaagaaattgtgatatatattttggtgaaaatgtttttattaaaattattgacttcataattaatactttaattaaaacacttattctacataattcttagttttaaaattcctaaaatatttcattattttcttcgtgtatgatttatttaaacaaaatgtgtcatttcccaataaaatacgaaaaataattaacaagtgtagaattggtaaaaaaggtaaagatccttaaaaggagtagaaggaaggactcaaaccagggtcttcaggatgagagcaccagacccagtagcaactcacgtgtgtattacatatacaagcatgtatttatatattttcttataacttagtaccgagcaccagatccagtagcaactcacatgtgcattacatatacaagcatgcatttatatattttcttataacttagtaccaaacaccatgaagctaattctatatgactagttaaatttttgtcttctcgaataggatgtgagtgtcaatattcttgacactaaagcattatatatcaccactaatcttaatagcgttgagctgacgatttatttatgcaaataagtttttagcacggtcgttgcaaaaaagtttctgg

SEQ ID NO: 36627 - DNA, 1195 bp, Oryza sativa
  unsure (1)..(1195): unsure at all n locations
cgcgcgcccttgaatagactcggcnnnnnnnnnnnnnnnnnnnnnncttcatttcacacctctcttcattacagggttccttacttataaagatcatacatgccagcctggccgcttggccgaattacacaacacacatgcgcacacacccacccgacacgttactgtaaacgtcatcctggcattgtagctcgtcacgcgtgtggcacaagcgtgacatcccgccaccgccgctgtcgctgccgccaccccctcctctttctcatccctatccccaacacaaccaccttctatcaaggctggattcggcaattgtggggataatctggattcgagaggcatggctcgacccgacagcgacgcactggtggatcgctgccacctcatcttgcgcatttttccacctgagcgcctttggttccccaggacctcctttgtagcgcctcttctcatcgtcctccaatgacgatggccaagggaaatacaaaaggtccgaggaactgcaccattatgtaagtatctaaaaacctctagcttctcacggtgtttatgttggtgaagcctgtacgatgtgtcctaccacggctttactaacggtaagaagtggaatcatgcatgccttactgctaaatggaaatacagacatatcattaagtttggaatattatggaagtgtaaattaactaaagtgaacattaagttatatgaagtttaataacctttatggaatttagttttgaggggcaatttcaattagagcctttaaaaagatggctctattaaaggttgtatgaaagtcaggtcattttatattattattcccacccattggttaaaagtttcaagaattggggatacctaggttttaacctccgaaaaggtttccaatggttggaaagtttttgttccgagcccagggccccttttgaataagccccggcgggctcacggagggaactaaattattatccccccccaaaaaaaagaagtaactggtaaccatggccaatcgataggccagggaaagtgttctgggagaaattttccctccaatcccaacatataccgaaacaaaagaaaccggggccaaaaggaccacccataagggtgccactccccttcagggaaatcttgccctattttataccacccggaagggtttttggcctttcttcctcaaatatggcgggggggg

SEQ ID NO: 36628 - DNA, 751 bp, Oryza sativa
  unsure (1)..(751): unsure at all n locations
gacggttgattgacatccgcgntggtacgtagttcatcaaaagcaaaagatgtgaagaagcaaacggcacagcattaaacaagcaagaagttaaccaaacaatctgaattggaagcggttttgatatgttttttcagttgggactggaggcgagcggcgccacaaaccaaattctgcctcaccaaatgagctgagatcagcgtgcaacggcgcaaccagttccgtgcaacagtcgaagatgcattcagagatcagtgcgcccaccagttccagtcgagcagagggcatccgccatgccggcaacaacaccgaaccatcgcatcacgaaccgccgtgaagaccgaagaagaaacagggagacagggtagagataggagaacatggctacatttgctacggcccatttgtcttctgtcatgggccctgataattgagaaacaaagccgagtctgaattccaacccgtccaatttacccacaaggcgaatttttttcatttttcattttaattttttaatatttacataaatattataccatctaaaatatttacacaaatagcccctgccgcccaagtggagagaggcaaggtgtgcgtattttgcatttaggtcccttgccgcactctacaaggctgaaaggggtaaatgcaatttttgctctgccaaaaatgcatttttctattttttttcaaccggtccgtccttcaagtcacccttgccgcccttccagggtctacttctgtaatattt

SEQ ID NO: 36629 - DNA, 722 bp, Oryza sativa
  unsure (1)..(722): unsure at all n locations
gcgcgatagattnccggtcgtattccagttctactgcaagtcgctcatcaagagaggaggaaaaatggtgcaagcgggcgatagattagtcgccagctccgcactggctccaagacaccacttgtgatactttttttgaaacaggtgatactttgtcagtgttgcagcagaagagagagaaaagagcaccaaagcaccgcagagaaagtcattgatgtggttaaaaaaataataaagcttttggttgtttaacgtgactattatactctccaactattaggttgcttttagatgacatggtacacaattatcgctagcaatcgacgataatattaaacctgccctaatgccgacgtagtctgtcttcacggaacaaaggtcgcagccatgtccccgaggtcagtttttggctcaaatttcggaatcatgataaacatgctgtccttcctgttgttttttttcgcgaactgtccttcctgttgtttccaaggagatgatgataagatactctttttacatgagctgagacataagcgtgctctttgtgttggcgcttagatggttgcagatgatttcaacttatatatacagaagaactttgtgttggccattagataatagcagggtatttcaacttatactagaattgtatcgagcggcgacacgccgcgcaccgcatgcaaaaggggattaaccacagaattacttcctttggctaaaaa

SEQ ID NO: 36630 - DNA, 536 bp, Oryza sativa
  unsure (1)..(536): unsure at all n locations
cctcccctaattgtgaagcatgcaagaaaatcgttggaaaatggtaatcctcctaagatgtttgaggtgttatattgtcaatgttctgcaagctagtaagagtcaagatggccgagttggtctaaggcgccagtttcaggtactggtccgaaagggcatgggttcgaatcccattcttgacaatttattttttatttttacatccagagtttaactgccattctgataatttgtttttttgggtttatacggagttttaagtggtgtaaggtatttctgccaacatcggtggacaaccttattaacacacacaatttcggttcacttttgttgacaaattattagatccctttttcatgaatttagtgaggaatgttcttcccttttaatttggaaattttatctaagcatagaactagccaataatatgcaaacatttccctcttgcagcgatctggacaaccttataagcacacaatttcggttcactttgttggcaaattatnnnnnnnnnnnnnnnnnncgaactcgaatca

SEQ ID NO: 36631 - DNA, 887 bp, Oryza sativa
  unsure (1)..(887): unsure at all n locations
aacttcactattgtgcgcgcgtgctccataaagacttattttctacctcgtgtaagttagtctttagcacgaccgggagtataaaatatttcanccccccccncgtgtanattgcatcnatngctggtacagacgnncatcactntactgggtatgccttatataccgcgtttgggcaaccctctcaacaattaagagatccattcgaagatcacggggactaattgaagtaagaaggttcggtactatctctcacgcactctttctacgcattttggataatctatttttaactttttctgccttctgtccagtgcatggcatttccttcttgcgattgatgttattttctaagaaatcatagctgccatttcgtttttcctctcttctattttatattttttctgtattcacacctcgttactaacgttttcgctacttacttcattattcatgatcagactctagccacctttctttggcatgtttttctgcttgttttgcacatcttgccaatatatattccttgcactagaacattttcgggttctttctcgcatctgctaatttttacgcggatccccttccagtattatctgtactatgttcatctggttcatcttcttcttttccagcgttttattccgttttaattttgcaataatgtactgttccaattctttctaggataactcctttttcctggtttacaggccgttgtcgcttttgaacatttggagtaattttattcccttcgctcattttatcacctagtgtcacttaaggtattaatacggcaaggttcctttgtctctctcttaactatcttccttctccaggattaaacctctcctgttgcggtagtatgtactccgtctcccgaatcg

SEQ ID NO: 36632 - DNA, 756 bp, Oryza sativa
ccgtccagtagcacctactgttgcagcagttcatcatttccataccatttttccgtaacaaaactaattaactattaactaggtaaactattgcaatgaaaagaaagttttttggtggttatagaattctcgtatttcttcgactccaataccaaaagaaagaaaaaaatgaagtaaaaaaaacgcattttctgtaaagtaacattaaggactctgcttttacttattttttcttttacctaaaagaagcagctccaaatcaaaactgaatccattctatctaacgagcagcacttatcttatctttaccggtatggatcattccggatacttaaaaagtcgcgtatcgagatcgattttgcttagccagcagaacgtaaaggatgacgggaccttccttactaataaacatactactaaagaaatgtatcgctatcataaatctatgtttaccataaaggaacatgtctcgatccttatacaacgatctacgtcgagtgcaaaaccgtttcatgaagataagagtttcaatttgactggacttgacactggatgatgcgatctgagacagagagcgaacgcattaggactgcatcgaatctaagagtttataccaagagcaagcctctctttaataaacgtcatgtctggcgcaggaatcaatacgatgtcagcgtttcgttcatcagaaatgatctgtgacggcaggattatggcctaacagtaacggcaccaaaaaccggtgacttacacttg

SEQ ID NO: 36633 - DNA, 585 bp, Oryza sativa
aaacaagacaaaaataagggaagaagcaatcactttccagatctactctgaacagtaaaagaagctcgtgttattgatcaatgatgttaaaattcgaaaatccatgaacataacatccataacatcagatgggggcaccacagcataatcaaaaactggagtagagcatggtaaaatttcacataatcgagttaaatttatcaaaactacatgctgagattacgcaaaaaattcaacctgtcaactttctggttcaatctcgcaatggcatatctgaaccaaatgctaaatgtgcaagaatgcagcatactggtaatcttataccacacttctaaatgatatcaacaactcgctcgtctatttcttgtacaaatcgatcagctaaacaatcgcactaatagatcaaacgggtcaaaaattccacaaaatctgtagcgaactgacctccgcagctccatttcctcagaacgaccacagcctgcacaacccaaaaaaaaaggggtcaaaccacagcaccaactaacctacttcagcgggggtaactaagcaactcaccggaaccacggtggagagcgcggcgatctc

SEQ ID NO: 36634 - DNA, 540 bp, Oryza sativa
gcccagacaatggaagatttctgagcaagtggtttcagaagaggtaacagagtaaatctgggtaggttcatgtactatgcaatttcttaaaaattaagctaacatcgcaacacatgatgttgcatacctttcaaaaggacaagagaatgacgcatcccaagtgcaagcctcacaacatgctttgtggtaaagtatgccacttcaaaaggtaagtttcttgggtggttatcaccagcaccgagctgtccaaatgaaccatctccacacatgaaaagctgtccagaatctgaaaataagaactagaaacatcacagctaagctcatcagtaatggttttatttttgaaacaaaataaacacctgaaatgcacagactatatgtgatatagagtataaagtagattttttgaacataaagcataaaggatcaaaagaaagtacaaggaaataaggtggtttcagaattggacacctgtagcaaatccagaatggttccatccagcagacacacaggttatcatgtagttctcaaagaacttta

SEQ ID NO: 36635 - DNA, 684 bp, Oryza sativa
cgatgtgaatacactacccatggtacagagcacattattttcaccgcgctaactctctactcatgccaacggaaatcaaatacagcctctacagttcatgaaacaacgtttttatcctcataaaaaaaactgattaatggggacaaattaatgctataatctgaaaatctccacaacgcataaattaaactctatcctgtttaggagtccatctgacaacaaaaccgccacctaaatttcaaatcgtaaaacacaccttttaaattttggttttccatatatgctcaaaaatacatcaaaccttggggatgctctactagctaaagtaagtaatcatgaatctcggctcttaattcgctatagctagcacacacatagctagagagatcacgaacataatcacatgccaacaaacccaagtgaaaaagatctcacgaacataaaaactggattgccaacccagagatcgagagaattaatttgccccccggaatataatcgacacgggattttgtttccttactatagccgcatgcatatctcgacagtatccatggcggcgcccccccctgccgaatttgggatcccgttcgttcgttcgcaggagacaacaagaagttaatgacggaaatgcaagctcaccacacgcgtatctgatcattcatgtttgccgatcaatgccga

SEQ ID NO: 36636 - DNA, 606 bp, Oryza sativa
  unsure (1)..(606): unsure at all n locations
cgctgggngtgatttccgctctgcagtacgccatagttctcgcctgtcacgatagggtttaaccatcaaatcagtatgaaaatggcacctcccttgattgttactttctgcaattgctgtcttaagatttttaaactcgatcgatgtcataattttaacctgctacagctaagaataaataaacatgatatataaactcgattcttttagatcgtccctctcaaaataataataataggtggggtcgctatctgtatctggacggtgatttctatgagactgaccaaatattaatctccctgtaattaggtcaacttaagtcaaatatttgctattttactgattcccggtgtaatatcaatttacgccatctttattttgtttcccttttagttaaaagtacatataatttcccagagccgtccccaaaaatcttggggaacaagaccttatgtacttggtgaaaccccgtgcattgttgcgggaatttagtatgataaaaaaaaataaagtgtaatatagctagataacatcagattaagtaaattaacgtggtttatgataatttaaacttgaattgtagaatggcgattcaaacgtaaaaag

SEQ ID NO: 36637 - DNA, 746 bp, Oryza sativa
  unsure (1)..(746): unsure at all n locations
agccaggtgatcccntgtacaaagctcatcacatgttttctcgatatgtctcgcgaactccatatatagtacctaacaagcacagaaaattgcgcaccaccaaaaacatattatcagtacaccaacaacatgcgactgacgcatggataaattctcctattacatactagcgtgatgctactatatttatggttctgaggtatttagccataatttacgtgtattgagcgtggaaataatatagtgcccttatttgtatggcactgacaaagcggatggtgtaaaatggtaagaaatttatatcgggccattgatgagataagcaatgctctaataataattattgtgcaacaaaatttacaattccgctggacaactgatctaagacggggaatatattacattagtgctggctggattacgtgagtctgacatattacatgcatcgcnctactaacaacatactattgcaatacagtggaattgctacgtggcaatcgaacctaatgattgatcgatcgatggagatccacttaataagtggcaaggggtatgcaataagtggcaaggggtatgcgatttcaatctgaagtttaagggatgtctcttcctcgaaatcttgtttttttatccgcctttttaaggacaacatacttatggntctaggcgcgcttctatacgaccaagtctctcatctgtctttctcagtgaaccggccttccggggaaagtcttgccggacaccca

SEQ ID NO: 36638 - DNA, 736 bp, Oryza sativa
ccgcgcctgagaccccgtgtgatgccctcgttcatcaagttaagttttctgaaagggctaatttggcaaattttcgggctttagtgaaaagcttgagataaaaggcggtgtacacgggtgtctcccccttggccgcttccctaggcttggcgtaaaagaaaatctccccgtctcgtcgtctcctccgctccttgcgccatctcgcggctgaacaggggaggggcggcgatctccatccggcgagcggagcaagggaggggaggggatcttggtgagcatccatctgcattctctttctgattcatctatctctctcttccaccgggattgcacctccgtggaatttgcttgcgttaaccctagcttctcttatagatctggaagaggttcttctatttgatttcagagccttaaccttaatacaagtaacagcttgtttgttccccccaatagtttgggggttcaactgaacccccacgtcccaagttggatccgcccctgattcgcgtggttggagtgttttggttagaattttttttttgtcgggatatctttggtagttcttgcacctagatagtaactgcaccggtaaaaaagaagccgagagggtatcattgatagaccaaaccaattttgttcttgctcggtagatcctttactggcatctaggtgggatgaaccaaagaagacctcccgtcattgtggatgggaatggattcgtccatttggatccgtt

SEQ ID NO: 36639 - DNA, 753 bp, Oryza sativa
  unsure (1)..(753): unsure at all n locations
agaggtagactcctcgttgcaagnagcncatcacaaaataacaacaaaaaggaaatattacctcaaaacatcaagataatattacctctgccacttggaactatctgcttagcgacagagagcaatgtaatatctgttctcttgatcggacactagaaaacgacgtttcattgcaagaacaaatggatcagaagcatgcctgctaggaacaattattcttctaggaccatgagcaggtaattttccgcctgaagagctcatcccatgtgtataccgtgatagattattggttgcattgtatatctcttcggttttaacacaagattctttaacagtttgtggaaatttattttcacccaagaaaacaacatctggagagttctacagaaaacaacaaaataaaaacacaactaaatttaatttgaaaaataaaatggcaaaataaattaaaaaaacacatttctatacttacagtcacatcttgaaataccctgttggaaaaaattgaagaaatttgattaatcccagctgagttctcattacttcttatattgttgtgatcaatgacatcaatagaatcagggacagatcgaaaagatttgcacagctacaacagaaaaatgaatataaatatatagaaacatcttctaaaagaactataaaatacagtattaaaaaacaaaactagtaccaatgatgaggaggagtaaatatctccatgagcttgataaccctcttcatttaactgattat

SEQ ID NO: 36640 - DNA, 732 bp, Oryza sativa
  unsure (1)..(732): unsure at all n locations
cgtgttgtcctactagatggtacagtagttcatcaagaccaaagctggttcaaattttctagaaaatattcaaaaaaaaatcctttagaccaaagttggttcaaattttctagaaaatattcaaaaaaaaatttgtaataagtggatggaaatactagatttttagatgtatttttcgaaggcattatttcctttagaccaaagctggttcaaattttctagaaaatattcaaaaaaaattgtaataagtggatggaaatactagatttttagagatttagataatactagttttttggctgactacaattttacatatatatttatatatgtatatcaattccaaattttagttctttatcacgaaaactgatatttagactacaagaaaaatacaacgttgtatataacatttttttgacaggattgtatatattattttcgaaatttgaagaataaaatcaaaatagttatcactccacaacaaatacaacattctatttataaatttgttcccatataggacttactcattattagttttgatgaaaaggatggaacttattaattttgaaaaggagtaaaactttgtatttatgaatttcaaatctaagaactattaagctaataacataaaaggtaacggtacgaatacgcagntgcttctatatataactttgtaactactaaattcagattttgaaatttttggaaaaacttattactctcttt

SEQ ID NO: 36641 - DNA, 737 bp, Oryza sativa
  unsure (1)..(737): unsure at all n locations
cgcccccatgatgacattgcactgccacagnagttcatcagtacaatttctgattatatgtgatattattaattaagtcatgagatcactggttcaagttacctttgcagtctgtaatagtattgaaaagtgtagtgctatgaaaatggttggaaatggcagtggttcatttataataaacataattctaaagtatatccactgatttgatttttgacagtgctatcgtggaagcatctgtatccatgacatgcctattgtggatactgctataatacccttgatttattttgctacttgtgactgtgttgtcactatgtatgttgaattctctgacattgcagtcatagaagggggctagctggacaccatgttgagatagcttgacaccaagttaccccaacaatgtgggcagacagtaaacaagaaccacaacatggctgtcaacgatgagaccatatccccgacatagcaaccccaacaggaaatacccaagagctggctgttgacaaatggcatcctcgacaagtttgtaccttttaccaacagttctaggctggtgcggttgctatagtatggagttcatatcctccacatgaacctataatagtttctacatataaaacaccacatattcaacacgcactgcaccgcactaaggttagcaaatcacccgtttttacatcacatagtaatccaaatggaatataaataaggatatttttagcatattaccc

SEQ ID NO: 36642 - DNA, 748 bp, Oryza sativa
  unsure (1)..(748): unsure at all n locations
gcgcgcatgacatcacgatcgcacatggcntcatcaccggggtcggcgacctggcggcggtgcaggagagaggagctggcggctatcgagaggagaggaaaactcggcggcggcgtcgtcttggctcgagcggaaacgggcggcggcgatggaagggagaggccggcacgggggagctcggggcagcggcgtctgcgcgggctgtcgcgtgcgaggcagccggcacgcgacgacgcggctgaggcgacagcggtgtgtcggcgcggcgcagcttggcacaacgccgggagaggggcaccggtgggataaaggaatggagtctcctgcgttacaggagcctacccgggtcacgagagccctgtccaacctgaccttacatatgggagcccttaaactgtcggtttaaccggccttagaccaggtttaatatattgtccactactagctccaattcatgtatggctaatctaatagctcatttcatacaataggtgttatcctacactttttaatacattgacccacctgtaatacacacacttgcgtctgaagggtgctacagctggctccaaacctggaccccaatgcttttgcgattctcgaattnaatcccccttaaatataattaccgcttggcttataaccctgcttttgggccccgctctttacgcccaaacatttggtcacaccttagttcacccacccgtgtttgccaatgacccaattattacggaaacgtttttaattt

SEQ ID NO: 36643 - DNA, 716 bp, Oryza sativa
  unsure (1)..(716): unsure at all n locations
ccgcgcgatgagacgccctactgcaagtagntcatcaactgtagcaaaatactggcctttggtgggggcaggtaccggtggtagggggctaaggaaaaggccccactaccccactagtgctagctaatttgtctaaaccagctactactccctcgtttgaagacactatccacctatacttaaatacatttttttttaaactacttatctgatctacgcttcgaatggaccgttgggttttgaacaattaaatctttatgacaagatctcacacgactttactttgatgaaaccatgcaacttgcttttcatatagatgtaaagtactggtagatgtgactaagttacttgttagacatatgaaagtgcattgaataaaacctaaaagtaatttacatatattatagaagtaacttagatcaaaacgaaggtaactttaattaatgccttttttcattgaacaaattatcatatatataagttacttttagattttattaaaaatacttcctatacattcataatgctctgagttgattacttttattattgtttttagttaattctataatttgtgctgattaatttaatttctagatagagtcatatttttatctttacaacgaacttacttcaaatgacatgccaaagttacattcgttttgttttaagttacttctataatatatgtaaattacttttagactttacttaat

SEQ ID NO: 36644 - DNA, 2971 bp, Oryza sativa
tgctgaaacattatttttatataaagtgaaacaacacccgatttaaacgagtgaaacattttcaatctacttagtaaaacaattccaatatatcatgcaacatttaaaaataattcaataataagctatttttttcgtcggaatatatccatgtgtggtcttgttttgaagatttaattacaacgaaattaatggtgcaatcggatcatgatttggataagtaatttaagagaaaaaacagtttaaagtagtttttgcacataaatcagggactgatgtcagcgcccgatttttctcaaattcgatcgggcgaccaatccgaatgagcgtccagtaaagatatatacgaccatggatcaattacgatgaatagtatgtctttttttgcaatgcagccgtttgtaaccgttaattaaattaagtcgtacggtgagtcagacagctgggttgtatgcatagcaatttccttttatttttatattcctctagttttactttggttctccactttgttagatatgagaggttattgatggattgaaataatctacctacaaagtaagtgtgcctttgtcactgatatgtgagttcatggatcaccaagctcacatgttggtaacaaagtcacatgacttgtagaggagcatcatccgacaccatacgatacgttgatatgggacactacgtttttagaaaacatggatatggtaaaaaaagaaaatcagtattacttcgaattggaaaaactactgctagtagtgcccaaggagggaactggatttctttctacgatcaaagtaaagtccttggcaagctaacatttttcaattacaattggcaagactaaagatgtgttttaagcccgagtaattaaatcccatcgagaaccttgcaaacatcacccgacactcttgctatcaatgttatggaagacagaatatggctatcgggcaaaaaggatatacatctttctcgaatagagcattgatggttaatcgaaaatatacggaatttggcgtgacagattttatttatttgaaactcagacaaaacaattggattatactccacatcttgttttccagagactagacagaatgtttatgttgttcttaggtgaaagccaaatcagcactgctatacatacgatatttttttacgatggcataacgcttctctcctatcgaacattaacggttagaaggtatggatccacatggaaaaagattactctcccatagtgagcccatgtccaaggcccaaactcatcatgtctaggcctgccatctcgtaagcatcctgatacagcgaaccgaagtaattttcttcataaccaatctatatacatcatatctttatcatatctttctggtttcatataattattaacgtttaaattagaacatgttctttaaaatatatctttgactatatttttatataacatttaccataaagacaaatctatatatgttgtaaactaaatatttttttaagttattgatagttaaagttataaatatttaaccttaaccttatctaaaacgtaaagaatcatataatcagaaggagttgttgtacttcggcactcaacatttaatttatcatgtggcgaattgatcaactaagaaaatggcatgttttgcaaagcaaaaatttatattaaaatattataagagggcattttgtatatgtttggcaactgttttttctcttttataccagcattatatggtcttggacattaaataggaaagaaaataaaatggaaagtcatatttacgacataagctaagaggcaaagaaagaagatgagtctagatatgagatatgggcttgagggtccatgagctctacgctcctgacccctgtcgtacattttgttcgtactaagattgtacgtaaaatatcgtattcatagcatttcctgaaccaaattgctcgtgtaccactgccacatgccgttgctctagacctacacttgcattaacattacattcaataagctgattaatcgaagaagacccatcttaaaagaatgcattattctgccttccacgtccttccttcaagtgtagcaaagctgtaaaccaccgatgtcttggctcaaataacaacactcaatggtttaacagtgagtttttttatggcgtctttttatttcctttggtccaatatgatgggcatttgactacaaagttttggcacgggctgaatgttaccattgccaaaatacaggaaatactccgtacaatatagctatggagcattgtatacaagcaatcacatccaatttttacgctatcaatctgtttaacaaaatttaactgtggtaaccaaaaatccaaaccataccatactggaggccttcatttggaaaggagagaaaatgaagccattaggatcaatggaaatttctggagtcctacatttcctttgtcacggacacaatgctacaaattttcagcatacatccacttacggtcagaatactcaccacaaatcgcatggacatctacaagcggcaacctcatgcgggagccaataaccaagcgtagttcagcatcatatgatatcaagccccagcatcctttcacccttgcaatggagattgggctttgttctcattgaatccatacatcccatacccatagtgatctatgtcagcaatagcaaggctcaaaccgtaataaaactactggtataatgcatcccaacggtatgcaaagcaacttctctgttccgactaccaacaggacaacaggcaagcaaaagtacacaacacaacggtggattttcagcatttcaaaaataattctgaacatagccattttgagaggaaaaaacagagacacaaacttaattggaactaaagactagataatgggaactaatgaagaaacttattcgcaattctcagctggaatatcaaagttctccacgtgatgcagaggcaaagggctgcaggaat

SEQ ID NO: 36645 - DNA, 4887 bp, Oryza sativa
  unsure (1)..(4887): unsure at all n locations
tcataaaacagtgtgcgattgaggtcaaaagaatcatctctgcagttagtacgatcaagcttcgaagcaaccacctcaagcgacttgaattaggagcccaacactatatccacatatgtgttccactccaactccccattcaaatctagcatgtacttgtgtgaaatgggtcttgctccaacatcatatctaccttgtatagctatagactgattgctccaccccagcacatcctttgtacgacaaactaactcctcaaaactaggttttccaccaaatataagttgcttaacactcatcccttcgaaattgctaccactgttactttgctctaccaccgaaccaccatagtgcaatcgtactaatctatccatctacaacattaaccgacatattagcatattgcatttcttaaaaacttgaatttgcaataagaaaaaatctaacctacaactatgtcccccaacgaaattgtccataaatatctaaacatacacaatcttccatttgtaacgatccattctaaatttgaactctcgccttgtgataaaaattttaaaaaaaagaagtgttcttcactaatttgggggaaaaattagggttcttccctaagggccaaaaatctccactaaaaattagggttctatgagcatctaaccattgcatcaccaataacaactacaaccacagagtagagaaccaactaatttgggaaaataacctcaaatcacgattctagggttcatccatcaatgagcaaatccaagcaaaaaattgcgaaatgacgagaggattcggaggagaataccttgccactatgtcctccaacaatttcccctccaaaatgcgacgatttagtggagattttttcgattttttggaggggaggagagagatggttcggcgccgctgcgcctcagccgagagccactgaggaggaagaaagaagggccgggctgctgggcgcggctcggccaagggatgtaggacctcagcgccagacccgatggcgctgaggtcctgaaacacagcgccaatgcggtcggcgctgacattgtgccgttccgtccatcctcgtcttagggccgttacgtactcagcgctgatgcggtcggtgctgaggtgttcaagctcagcgccatcgaccatggcgctgaggtcggggtacgtccaaatctagtgatagtttttgccagggaccaaatttgcaaatagttttcaaaaagggccaaattgtcaaattttcggcaaattagtcgcctgctttcatctctctctcctcaattctctttttttcacgtaagaaaagaatgttgtggatctttttggagcctgccgagtcatcttattgtacctgctctaaactggttcattaattcactactgaatacgtggacagatttactcggtacacaccactgaattcacacgttcatcggacgatgaactttaaatcaaatcaagtattgagaaaggattcaaggaattagacaacaattttagagtaaggataatccctccgctgacgttgcctttgtcgccctacgtcgctccgtcatcttctgccggcgttgcctccgtcgttcgcaacagcgattcgtacaaggtacaaactgattgataaagcattcgtccgtcattgaaccctaaaaatcctcaccatcgctttgagaatactacgttttaccatcctgcatgtcaactctgcagggtatccgtgcagaaaaagaactaaaaaatttcggcaactagcacagacacccatctggcacaaactcactagcaaaaaaattagaatgttttggccaaagtgtgtatttcctcctgccttcatattccacttttgaagtagatccgatctaaccttcaatttctcggttgaggattctctaccataatgtcactatcattacagtcactggtacgtgggtctcacccttttattgccccacatatttatgtctatagtgatagtgccattatgatagagaatgtgaaaccccaatttctcatacccttcggcccggaattgcttccattattcagattgttgaattcttgctttgcttggatacttggagttggaggttgtctgaagattccttctgatgctcatcatcagttcgtcactttgtcatcagaagcctcgatcccatcgtacgttcctaacatgaagaattctattgtttgaagagtgataagacaacgcaaccaaatcggagattgagatagataggatggtttatctggaagcgttcccacgaatcgatcgagtgctcgccggagcttggcggcttcctcgatcgtcgtcatgctgtcatctggcaaaggaccccggaggtcgacgacaggagaggcgacgcgggacgacgaaggcaacggcggcgacggacgatgggtgcggttgagccgactccggtccgcctgggagccgagccgagaacgctcaagccgttggattatttgggtgaacacgtgccgcgtatcgggcacaggtatgcacaagagcccatttggagccgatcgatcggggccctctccattggactccgacgcgtccgtgtcgtttcgtgtaatccgactccgacgctgtctcgtcatccggccgccctatatcttgcgccgcgtgtagtgcatctctcccgcctggtcgatctcctcttctagctcgctcggcaatcagcctcaaatccatcacccaagcccaccttaataagataagccttcgtatttacttaatgataaatcaagctacaataaaaaaaacatatttactttatttttttaataaaacaaatggtcaaacatgaataaaaatcaacaacatcatatattaaaaaattaaggtacaatatatactctcatttaatttgttttcgacagtacaacaaacttgcatagttgcatgagacatgaatagttgaatactccatccgtttcatattataaattatttgactttttttctagtcaaccaaatttatagaaaaacttagcaacatgtaaaatatgaaattagtttcattaaatctaatattgaatatatattttaataatatgtttgttttctattgaaaatactattatattttttctataaacttggacaaactgaaataagtttgattaggaaaagagacaaacaacttataatataaaacggaggggaatactttacatatataaattgttactccctccgtccctaaatatttgacaccgttgattttttttaaacatgtttgaccgttcttcttattcaaaaacttttgtaaaacatgtaaaactatatgtatacataaaagtatatttaataataaatcaaatgatagaaaaataattaataattacttaaattttttaaataagacaaacggtcaaacatgtttaaaaaagtctacggtgtcaaatatttagggacgaatggagtattacgttgtaatagttcataacacaaatatgtcacattcaataccacctgtcaaatttgcctaaccttagacatggcaaactgtggcaaagtgtggcttgcaaccaaacacacccctagtatgcctgtagttcacaacaacgaagaagtggagacatcgtaggagtatttgttgcacatgtgatgcgtggggtgaggatgacacattgagaccggcaattcttcatggcacagtttaatttgaataatggtcatcgatcaatgtcgtcgttgatgctcccgacggcagcctcctccttttcggcgccgccgtcgtcactgtacctcgatgcatgacatcaccatcaatgtcttcgtcatcatcacctcatcagtttcgtcgtcgccgacctccttgtcatgcgggtgggcgcgggcgcggaagacaacgcgtcgaacaggtcaccagcgcccgcgctggtgatcatcttcatcaggctgcactgcagcatgtccagagccgacatggccgagtgcgcggcgatgtcgccgtacgtctgctgccagctgacgtgacattattttgactgataaataagatccatttaatattttttcttttcctttttcttcttttcttctcgtattttattttttttcttttcttattctttctctgtgaactaagcagaagaaaggaaaaaaaaaaaagaatgagtcgttgtgcttccggcgcgttcgtgggtgacgcgcgcgtgcggacgacgaatcctgtttgatctcggcacggcacattttactcatcgaggactctggttggtatcgtcccttgaactactacgagacgaacgatacataaagcgcagccatggaaggaaacaaccgaagaagtacgcgacatgcacacgtcgagatgatcaccgccgccgccgccgcggagcagcatctgccggacgacctgctccgggacatcctgctccgcctgccgccgcgcagcgccacccgctgcctcgccgtgtgcaagggctggcgctccctcgtctccgacccgagcttccgccgcgcccacgccgagcgccccgccggcatcgccgaggccgaccacacgttttgcctccgacaagacggcgactggaccttccagcaaaggctccgcgaggtcgtgctcttcgactcgttccgcagcagatggtgccgcggcgacgtccgcaaggcgccgccgctcgacctcacgctgatcccctcgccctacgccccggcggcgaccatggtcctcggctcctgagacggcgtgctctgagtcgagcgcggcgctcctccgctccggagactccgctggcgcttgttcggctggccagacgacgaaagcgggcgcaggggctacgtgctgtggcatccgttcgacatggcgtgcgccacagtatatccaccgaccggccgcggcggggtaccagctngaatatcaacaattttttctt

SEQ ID NO: 36646 - DNA, 1664 bp, Oryza sativa
gggggatccaaggggtgtgggtggcgctcgtgtgacctttcgaaatgcggtgcgggcttatttgtagtggggtgggtgagaggcctccgtggctaggtgcacccgagggggagaacggattttttttttcaactctgagcatgagcaggaccctatcccgtcgaagtcacgtgactttgtcactgacatgtggtgtggccctgatgaagacaccatgcatttgactgcaaaggatctcaagtcatgtcagctacgttcggtgttaaggtaactttgggcctattcggctgccctagctgcggctgcggcgcagccggcacgaacagtttcgcactcactgtacgcagctgcagccgcagcagttggcctaccgaacaggccctttgttacttttagatttcaacgtttaactgcctactactccatataaaaaaagttgattatcatatctaagagcggaaaatagttacatgttccttcgacatcagcggagcgagagaaacactattgtttaccgtgcaggtgtttcctaagcctgctaaacggtgtgttataagttgtttttaaaaattatattgatccatttttcacatttaaaatagttaatactaaattaatcatacgctaatgactaatctcattttgtgtatcttctcttttcctctcctctcaaacacatctatgtttggttactgctataatttgccaaacatttcaggttttttagagcttaggttctgacaatgcatggtttgtaactctgaatatcacatggcttactccttctttttccaaacctagtagtaagaacttgtggacacacctgaccttagctgaacatctgatgtgttggcgattggtgttgcgaaatgtagtattgaacccaatttaagctaaataatacttaagtgggttgttagttgttacttgttagttatacacatctacccatttaaccaaacattgctgaacaattttgagtccattgctggttgccacatttttttgacatggcacaaccttcccacaattcacctaatcttttgcaaaattgtaccttacgataaattattggccatgtcttaatcaaggtttggcaaagacttacatgatagtatttgatagtgagagatttaagaccgaccgagactcaagggagctagatggtagctatacacatccatagattttataaactaagttaggatcaataatatgatgtatgcacacagttacactgtaaagttgcaaccgccgcacatgacatttttttttatagaagggtttttttttaccgctcacatatgtataggcaataaaataattgtgatcttttatgttgtgtgagtttttcttagtttgtgtgtgcttttatttattcaggtgtgagtttttgttgaattggtgttataattggatgtagctatttgagcaaaggccgggattatattccattattaaaaaaatatgtataggcagtaaaatgtgaagttgatgttgaaaatgagaatgataaaatctgaactattggttctaaattctggtcttacatttctttgttagtattgaggtagtcgcaatttggcagtattataaacaaaattagtttattctactttcatatcttattttcagtttatgacgataatctacacatggcacta

SEQ ID NO: 36647 - DNA, 1437 bp, Oryza sativa
gcggaaggaggcgatgcgaaagcgggaggaggaccggggcgacgacggcggcggaccgaagcttggcggcgacggcggagagagaggacgacggcgcgagctcgattccgacggggagagcgagcggcgaacggcggaaacggaggagggaggcacggggagcgattatatagtgttgggagtgagagagggcggccggaggggaaggaaaccggcgcggcgatctcgggctccatcaatgacgctggcgaagtttgcgggagtgattccaaacgaatccgagggagagagagagggaaaaatagggggaaagggagaggggatcacggggaataattccccccactttaatgcgcgcggggacggcgggaggtggcgggattcgcggcggcggcggcgctagggcacgggcgaggcagcgggagcggcgggaggacagggatgacaggtgggccccacccgtcagcgagggtggcaggcgggcccgcccgtcagcggcgcgcgcgcggggagaaggccgatgggccgcgggggagaggagagggagggagggagctgggccgagtcggcccaagagggggaaggggggaaaaaggactttttagggcttttctttttataaaacctttttaactttgtttatttcttaataattattatttgtgctctgaaaattccactaaaatttgagggctctttttagaccaaggagaatttaacaaaaattctccgggccacatttgaatttttcttgtacgtattttagtgtttgccaatttcttttcgaattttaattaattctattattccttttggaaaatgatttttaattcgggatgaatttatcaggacgtgacacatgcgcgccgcgccgtcgcgcgccatggccgccgggccggtttgcgccgtgcccgcgcgcaccggccgcgagctcccgccgccgtccgatctacccttgggtagatcggggccatcggttcggccgtcgcgtggccgccgcgtggtgcgccgctcctccccggtccgtggacccgatccgccgtggaccgccctccccgagtcactgccatgcgggtcccgcttgccggcgccgcgccccgccttgatgacgtcagccctggaatatattgcgcaataaatgatttaaggtttttcttgtatagtaataaacacagtgaatcttctaaaattcataactaattcatccgagctccgtttaagcccattcaagtctcagtaaatctagaaaaatgtgtagaatccattaaaaatggttttgttctctgtttcagtagtcttatagcctttttgcaatgtttgccttgtatgtcgctagattccggttcctccgacgctccggtgtacttcgaaatagtcgtcaaggttcctccagcagcagagcaaggcaagtcatgcttgtcacttgaacatgttgat

SEQ ID NO: 36648 - DNA, 1449 bp, Oryza sativa
gtttagatctagggatgtaaagttttggcgtgacacgtcgggtattatataggatgtcgcatgaggcgttagggcactaataaaaaaaaactaattacagaatccgtcagtaaaccatgaggtgaatttattaagcctaattaatctgtccttagcaaatgtttactgtagcaccacattgtcaaatcatggatcaattaggcttaaaagattcgtctcgtaaattagtcataatatgtataattagttatttttcagactatatttaatacttcatacaggtgttcaaacgttcgatgtgatagggtgtaaaatttttgtgtgggatctaaacagggccatagtcattcaagtgcttgttgttggtgcatatcacacaccattctctagatcactatatattcaaacaacataataaactattatcacgatatactaagtactttttaggcatgttttttctgctgaatggaatgtaaatgatatattaagataacataatgtttaatacaaatatttaagtacaaatgcaacactttagtaattaatcaaataatttatttttgcaagtgtgtactctttctggattttaacgtacaacaccgctaatttttagacatacttttgactattcatcttatttaaaagttgtgtaaatatgaaatatacataaaaatacctctaataaaataaatactaacaaaataaatgataaataataaaataaatactaacaaaataaatgataattatgtgattttgttaaatacatctttaaaaatcaagagcatcatgtattaaaaaccaaaaccgaagacaacatatcgaagttccttgttttagtaaatacattttgtatttttacttgaactatgctattgatttttttctctatcattgacagtgtgcattgtagttttgaggctttttgttttgttcatttgaatagaactaagaatccaacggttcattttgcttgctgcctacatctgatggtggtcgttttgtagcctacgtggctcaatgaggatgagagaaagattaattctttcactactttagatattttccctatagtgcaggaaataccataaataggctaattgtagtcggccacaccaggacttcacaaagcaccaataggggttttcagaagacagaaattggtgttgtaggcttgtagtggcaacagcttaggatgcgttcgttcgttagagctaggaaagttcacctctagcaccgaaaaaagagcagttcattagcatatgattaattaattagtattagtcaaaaaaaaaacttgaaaatgcatcgatatgattttttttaaagcaacttttctatagaatttttttttaaaaaaatataccgtttacctgtttaaaaaacgtgcgcgcggaaaatgaggaagcggagttgggaacactcggtgccgaactcagccttaat

SEQ ID NO: 36649 - DNA, 640 bp, Oryza sativa
cgctccatgtttgtactccagctcggtacccatacgcctccttgttcagcagtatcatccccttctggtacatcatcagtgctcctggcacatctgcagtttggtaataagctcataaacatcccactacttgaactcacattatgttcatatcaatttgaaacatctttggggatacaataactgacgggtctgcactttaaagttctgaaagaaaacttgatccaagacagaagacatggagatatgtcagtgttaacctgttggtaagatctgtgtagggaagagacctgaaagatggaaaaagacctgaaaggaagtgaattgaagtggcctgtatacaattcgctggtgttttttgcagggataatgcttaccaggctgtgcaaaggcagacgatggtgcaggtccaatggaaggcatgagcgtgggtcagttattgtatccccaaagatgtttcaaattgatatataaacacattgatcccttaaccacttcatcattaatcaccaaaaaccactagggggataaatgcactttcaattctggaagagaaatatttgtgaacaaacaaaaagtaacaaagaataaagtatgaaactatagtgacagcattttggatgtaaatatataatccaat

SEQ ID NO: 36650 - DNA, 2314 bp, Oryza sativa
tgaggattcttttggaagatgctgatatgggattatgtgtataattgtttgctggcaaaggagacctagggtctcatttcagaggaactatgttccaacctcgagttaataaccaacctgttgatggaaaagaaaaccaattaaaactgtgttgggttaaaaagccaatgagacagtagttggggataggagtttggatacgccttttacagatcaagataaggattgttggatgaaacccataagggtacccgccatgcctctacattgataagttcggatatacctgcaaacagttaagaagatccaggagacatcaatatttgagaacatagtagtcgatggttggtaattagtctatcaggtatcagaaaagggtcaaaggtgatatggcagaagaacaatttggatgctccccatctcgaggaagcactaaagatgatcatcggcaattaaaccctagtggcatagatacagatagcaagcaatgtatttccttgaaggtagtcagtgcagctttttgacgaaccacatcaaggtttcactgaaaggcagcaagccaaaggacctcatcgtccccagaagcgtccgcaatccacattaaagaataccacctgttagagataagccgaaagatgattgataaaagagattggcaaagatgttctctagcaggaaagaagtaggccgaaaggtgattgataaaggataaacagaaacatgctctgcatcgctcaaggaagacccctgatagtaattgccccgcaacagtcacctggtcattgagcatgatgaagtaagcaagacgacctaggtaaaagtgtttctttgaaggcaaggaatgaaatctttaactcggtatcagatgctacacggagtgaaaagtgcaagcaccggttaccaggcaatgccatgtcttgggagatgatccaataggaaagaacacatcaaggataaaggtgtaaaggaatacgttgaatgctaactgaggacaacctgaagataatagtgggaaataaactgaatgtaaagaaagtgaatccgagctgcttgttcgtgggagctattcccagttatgaaccaagtgatatgttcgaagatagtctactgaggtcagacaacgaagcttcagatttggcaggataacgatcaaacaataagaagtccagcagtaaagccgtttgggaagacgtcaaagcatgtcaagtgggataagttggttcggttgagaaacataattcaaaggcaaagttatcgaccctcgcatggaatagcagaagtagctagcacccggagagcaggaaagctaatatgatgcagttagtgacaagttgtcaaacatggtatgctggataagcgtgatatcatagtccaaagcattcagtggtaagttagaagtaaatgacaagcatgatattctcatgatgacaagcatggtatcctagtaatgacgagctgatctcgacgcatgacatgaagtgggtaatttgtatgaggttgactccgaagatatgaatcatgagaagttctggaacggaagcatcattaaactaccgcaacctagtctgagtcagctaaaaggtgcaccctggttcaagtcaggtgaatagaagattccatccgcaacaggaggtcaagccaagcagttccgagtcgtgaagttttgctgaaagtttgtgaagacggagcggaagaagtcaaacaagaagagaagaccacccaacctatcttcttgctagcctcctcgaatctcggggacgagattcttgtaaggggggtggatttgtcacgtcctgataaattcatcccgaattaaaaatcattttccaaaaggaataatagaattaattaaaattcgaaaagaaattggcaaacactaaaatacgtacaagaaaaattcaaatgtggcccggagaatttttgtaaaagtcttcttgggctaaaaagagccctcaaatttagtggaatttttagagcccaaataataattatttaataaacaccaagttaaaaagggtttattaaaagaaaagccctaaaaagtcctttttcccccctttccgctcttgggacgggtcggtccaaatctctccctaactctgctgtaacacaggggccatatgacttgttctcgaacaccggcccataaaggcgggccctaatagcgccctgttatgcgggtggggacaacctggtattctgacatcccggaattaacggcggcttatctggctctaccgatcacgccgtcggaaaatacaccactttcttcagtcccctcgcgataagatggcggtaaatatcccgcaacccg

SEQ ID NO: 36651 - DNA, 701 bp, Oryza sativa
tgataagagtagttagaggaaaagtagtactatataatttgaatttttcccacaaaatttgaatgatagagttgcattttttttacggacagagtatatatatattaatctagagagaaatttcatttgttctcatggaataaaagtaagatggcttttaagaaatcaatagagattatttaacttatacaccatggatctatatatcataaacttaatttgcttaaaaagatccttcaatgagatgatgtagtgattaatttgatgcatctgagcatatctatattttcgttcctatccttttttaggggtagctataatggctatgcatatcttttcaattctatccttttttatgggtagctatattggctatgcttcttttttggatgcattaattttgctcaacctattcataaaactaaaataaagtttcaagacgcgcctagaaatttttttctatgggcgtggtgtgtctagaagttgcctacttgccttcaaatgaaatgggggaaaaacgcctagacatgataccaatcaacgagtaactcgttttacctactcagtgtaaaatcccattgagagagagggggggggggggggggggaagaaggaagggaaccgtaaagcccatttaagcggcttccctcctgccatgacacaagtgggcctttggccttatggccttctccatcatgggt

SEQ ID NO: 36652 - DNA, 732 bp, Oryza sativa
aaataatttgtgaaatgttgtttcatttattaaaaatacttcccttgctcaaacaattcccagaaaattctagaaaatagaggaacaagcaaagtatttaataaaattttatctagctcaattttatgttgaaaattttcctagataattagggtttagcttgtaggcttttaaaataatttctaaaaatgatttaaacaatgtatttttaatttagttgatttttagggcgtgacaaccaacaaaaccatgcacccacagcccaccatgtgatttattttaattgacccacaccgaagcggtggcattaatccaacattaccattagaacctacagtctatacattaataggattttccccattgtgtgctagttgaactaagcatggctaagcaatccctagtccaatatctagtcatgttatatcccaagctaacaaaggagcatggtaccaaaatagcatggctgtaacagtaggtaaacatctcatagtattactgtaaaacaatgcagtatttgatggaaaacattagaacatttgcaatataggatcaacatgttcaagtgacaagcatgacttgccttgctctgctgctggaggaacctcggcgactatctcaaagtacaccggagcgtcaggagagccggaatctaagcgacatacaaggcaaaccattcaaacaggctataagactactgaaacaaagaacaaaaccatgttaatggattct

SEQ ID NO: 36653 - DNA, 695 bp, Oryza sativa
atgcatatttccttctactggtggtggagggctttttaattaaactgatagtttacataatatttgcaggatatcatgcatcggtcgatcgatagcactgcaaaagcctatatatctacttgatgcctaactcgcagtgagctggctgatgtttatcgggtaaaccaacggcggggatccatcaaacgcaaccttggagagtctcttggccgtgaactacgtcggatggaccatgtgccacaacatgtatcttgttcgggtggcgcaataccagcttgcccgagtgcactggaacatggcgctgttgtaccctaagccatagcttgctgctttcacctcagtattacctaataaaaataaaagaaacaaccccacgatggcattggattaattcataagagatgtatttttaatatgaaatataaaatattaaatgtagaccctaattcaccaaattacatagttaaaaccttggctcgcactcaaatggaccgattatttagtgacgagattatcagaaaatgcccaattttagcccaaatattacaaactacatttttactattaaagagactacaaaactactgattccaatctttcaatccttaccactaccgttatatatgttggagctctaagttgccgctttgatattgtattggtacatgcaggtctaatgcaaatctactagttag

SEQ ID NO: 36654 - DNA, 726 bp, Oryza sativa
atagtctgactgctagcacaagaccgctcgaacttagggttggggcaatagtctggaacgacggacccactggtaaactcggaaacgatataaagctggagccaaaagagaacgtggttaagagaacgatgataaaactgactgacaccacgctctctgttagataccaacactgattaatatacgcgcaacgtggacggagtacgctcagatgacggggcacaaaactggaaccggcgcgactctcatgtcaaaatgagtgaagggattagcgtgaaccactatccccacatttgtccgcgaccttgggatacgactgcgatcactggaaaaattatagttgattgactgattactaatgagactccacaataatactgtaagtgcgcttgtcagtagcgcgatgcaaccaatgcactgcttgtttttgattatgacactattgctgcgtgacatcgatgagcatgcatgtctgactaggggacatgacgacatgtgactgtgaggagaatactggcataacctggatattcggttgtgtgcactgcaccgattgaaactatgatctgcggatgcacaggatagagaaatcatgtgtgatgtcaaaattactcgttgacctatatgtgagcgctactatatctggtctgtatctatgcaagcgtgtctctgtcacatatcacatgagatcgaccacgacggtaggtcaggatctagtgtcgttgt

SEQ ID NO: 36655 - DNA, 759 bp, Oryza sativa
caggtttgatgactcaccgggatggtacatagttcatcaagttctcatttgctttgtgcaactaaatagtataccttatttacggcctcttctttttttccccctcttttcatgtcattatcaaagagagaggagattaggagggagtgagagagtggcgatcggtgatggactgacacgtatgatcaatggccgaaggagaagcggtcggcgatggtgatggattggtggaagttgcacctttgaccttaggggcaaacaccgtctgggaagactatgcggtacacctgagtattgtaacgagggctgcggatgatggagcgtaacttcgtgacagattaagcaaacttgttctgttttttgcaagggcaagacaaccactaaatctagttgttgagagagagataatagaacatcatgtgtgtgtcacgattgttctacagcccaaccatgggcggctactccgtagtcagatctaactttgtgctaggcatcatgatgaaccgcgaagaaccacaggctcgcactgatgttaggctttaaatatttggaccatccgactcggtaagattgagattggggatctatctccagtttccatcgccgtctatgagtccgagctcattactactcaatggtctacaagatggatgtgagttatcacgattctattatcaactgatcatggacgcgacgaatgtcgtaccagtccatcttggtgtttggcgtcagcacgttatcaatgttcatttgaagaaa

SEQ ID NO: 36656 - DNA, 760 bp, Oryza sativa
cacggattgattgactagacggtacagtagttcatcattaggggtataaaccttagatgtatctaaatactatatataaaaaatatttgaattcaaattcaaaatagaatcgtatatatttcaaattcaaatctgaagggcggatataaacttttgattcataaactatgggtctataaattttagatgtataaactttaaacgtattgaaatactatctatatcaaaaatatttgcattcaaatttaaatctaaatcggatatataaacttttgatttataaactttgggactctaaactttagatgtgtaaacttgaggtgtacaaactttaagtgcataaatgtactaaaataggaaagtaatgcggtgccaaaaaaggaaactaggtggggggagggaattgtatcagatcgcccctagcactcaatcgctaggtagcattcccggtgtttaggaagtgggctcatcatgttttgaagaatacagacacacatttgcaggattaaacgtcaactaattacaaaacaaattacaggttccgcatggaaactggtagacgaatttatttagcctaattaatgcgccattagcaaatatttaccggaccatcgcattggcaaatcatcgcggaattaggctcaaaaggttcgtcttgtgatttacatgcagactgcgcaatcgatgttttgttactttcacatatactggtctatgcatgtgatcaaacatttgacgtgacggaaaaggtgaaaggttg

SEQ ID NO: 36657 - DNA, 556 bp, Oryza sativa
agcgttcattggattaccagctggtacaggtggttcatcaggccgcctctacctaccctctatgggggggaaccccactccacttttttgggcttcaaactgtgtcttctcccggaagctaagcaatagccgtttcttgagcagaattcggcgtcgtcccccgtctgacacgggggacagccctgtcattccctcataaatgaacggtgacatgcaacagcccttcctcaagtgacgcccggatgtgacgggtcatacccacccccactccgccggggacaagggcgacgtgaggacacgactgccctatccatcggatgtgacggagacgggccgatcacagaccggtcacatccgatggacaggggttagctaggcgcgccgcacgtctgccctgaccgcattaaatgcggtgagggacagttggggcgttgcacatttatggctgttcagcctgcactccccttttgctctctccctctgccgcgtggcggccgggtgagggcctcggggcgaagccgtgagagagcccgagggggtgacgtcatgccctgag

SEQ ID NO: 36658 - DNA, 788 bp, Oryza sativa
  unsure (1)..(788): unsure at all n locations
tggggacttgaaacccnttgagtaaccnnctgaaancccntttnannnncgntnnnnntnnnnnnnnannnnccaccannannnncagtaggcgacttcagaacggccttttatgtttgtttttatctttcacgactaacacaactgccctcatctaatcaacaatcttgacaggtgaccacagcataccttgatatgtgcaataatttggactcatggagcttgaagatgggctctgaaaattgcagaaactaagttagagaaattaatcaagtcagaaccaccagtgattcacccctgctctgaaaaaaagaagagccgacaaggcagcgaaaagaacaaatcttacaagtaaacgtcgaaatgcctcatcgatttcatccacggtgagccctttcttctcaaggaaagaacgcctctggacatcaaaagaggccactacctttgggtgtttcagaaaaacgaacgggctctgaaccagctccttccttaccggttcaacggccgcaacaaccttcgaacgtcactaatactttgaacaccaattctagatgtcatccagttctgataatgcacgcccaaaccatccaggtaatatcaaatgtgataacacaagacttttcaaagtagtttcagctgaccattagtcacaaacaaagtgaaattaaacaagcaagagaatctttccaacggtcaaactaccactaatttaagctactgcgttctaattttttagacgttaaacgacaccacataccttttccgttaacttggtccatgccagaagc

SEQ ID NO: 36659 - DNA, 615 bp, Oryza sativa
tcttcggtgtcaccgccgccgctcgctgaatgtggaacaacgcctgatgccctgaccctagctacctttcacacgatgccaagtggatacgcgaatgcgaggtgaagcggggaacttgcacgatgcaaagcgcacaacacatcacacaggcatctatgatgggctggctcatgcgttcatactcatcaacttttgccccaaactaatacatgctatatactataagtttttcgtttttttgggtgtgccggtgcatacccggcacaccccctgggtccggccctgtgctaaatgttccaaaaaataatcatacataatacaaatagatatgaaccgacacaatttttctcatcaatttaaggttatatggtttcaagtaattttacttttagtatagagtttatacgtttcaaggtaattagaaaaaaatcataacccatgtccaaatcagttcttaagcaaaacatgtttaaaatgaagtcagggaatatttcaacaaatttattctaacataagcatttacaattaaaattaaagcaaaatttaacaaggtgtcccggcatttctagttcgtattaataattgaaaccactcaatgctagaaaaataatgcag

SEQ ID NO: 36660 - DNA, 1579 bp, Oryza sativa
ttctgggtagcagtttccacattttatgcgaccaatgttaatacactagtagtatacttgtgaagtgagttttactctaattcttgcactttcagatttctctataaaactattccaggcctgttctagctgatagacaacagatgaaactaagtttatgacaattatttgaggatacaaatgaatgagttgactatcagaaatttgataagttgattttatttttttctaagaaatgttgatgaagaatgtttttttttgaaaaaaaaactgtttaggagattaggaaacgtgtccacgataatccataatatgtattgtcattagaatgcccgtaatacttgcattttgacaatatgttggttggcactaggtagtcagcttgtatctggcaaatccgaccaacagtatgttatgcaaaagttttttttgtttgttattatcaacatttgtttgtaaatccaactggtgtgtgccagtgttaaaacgttatagtcatgcgtggtattttgaagaggaatgaactgacgaagttccactgttattttatcgagaaaccgtttttttttcttgcaattatcaggcatctgcagctgtatggctcttgaattttgacttatctgcaacttaacgaatctaattgcagcaactggtttataaatgtctcgttgctggtcagaataatcaggcagctgacgtatctgtatggctgtatcagaggtgttagtccacttgacgcttgctcattttgcaagtactagtaggggctgtaggacaagtcaaagaaagcctggtagataaaagaggttaccgccaaatatttcaactcaaatcgaaagcaacttgatggaagcactgcatgaagattttcaacgagatgtctaaattattgcaaaatgacgaaggcatcaacaacgacagattcacagttaaaacataagtacatgtcacagcgttaacataggttgaaatggagctgtaacaagctgattagacccattaggtttgcgttattatgcagcatcaagttactttaggaactttgctataatttcgtaagaaatactaattccccctgttaaaaaaacatcttttttttactatgaatatggatgctttgggatgatactttgcttgcatgctgcagcattcaacgaaaagtctgaacatgcaggcagcaatgtttctacatgcctttctttctctgaaatattcggcaaagataatatatctgctaagaaatataaaagagtcacaatatttttaggccatgtttaagctactcctaaaatgtcctcactagctgaagacactcgtagggaaactcagctcgcaatgtaggatacccctagatgggctcctcaaaatctgaagtaacttaatagagacactccaacccataataggtattccaatacacaaagccccatatttatttttactaccctacccctaatctctctctctcccaccccctcttctctttttcttcgccaccatcctcgcctttccctctcgctgccgccgctcgcctctcccgtcgccggcggccgcgaggatgacgaggagggccgcctct

SEQ ID NO: 36661 - DNA, 611 bp, Oryza sativa
tttcattggccgaaagtaattgatgattgtttcaaatgttatagagggagtgaagcttgttaacggatcggcaatgttcaattagcgcctatcgctgtattgaatcctattatcaaatcatagccgttcggaggttgggctttagatttcattggtcaatcttatgatattaagttgttaagttcttactctcaggctaatggataagccaagtcgagtaataaaacattgttgaaattgccgtttcgccagttgaggtaaatcttggctctcttcggtatttcaagtaagacgagttgtcggttgaagattatacgaccttgatgggaagcaatttttgaagatgtcatcacgagcgtttgaagactttgaacgagatgaagacacttcaagacggtgttttcagagatcaattaatgggaaatacttgaagaaatacttcccgagcatttgacaagatgattaggaagttctatggcccggaaattggattatcaccctgagacaacatattctatgcgtttaagggtcacatatgatcacaaaaaaggcggggggcacgtgtttacacccaaattttgcaactatggacgaaataagggaaaaatggt

SEQ ID NO: 36662 - DNA, 606 bp, Oryza sativa
gtggcccttttgtatttcgactcggtacccctaacgacgtcaggatgcatagttaagagggtttgagggagttctgtgctttgagattgtgacgggacacgtgttgcacaagggattaagtcttttgcaggagcgtaagacttcagtcttaccaaattttcttcccagtctgtgacacacaaaagctttccaacgccaagcttgccaaggcacttgcattttgtttgttctatgtgtagatcctgaggaggctgacttgctcggacctggccgagggagcacattgggaggtggtgctcatggcgctctccgcggcagcaacggcactgctcgtgctcgcagctgcagcagcgatcgatgaccactactcagcgaggcacctcacgtcgtcgtccaattcaaacaaatcagaggctgacttcgactagatttacgccaaaaaggaaaccgcgagttgttctccgaattgatagggatcgggcatgacctccacggaccgattgagaaatccaagaatcaatcgcgaaggttgagcggagtggagaggagccacagaccaggtgaccacggaagaggaaagcatgatcggcggccgaacgtcgacat

SEQ ID NO: 36663 - DNA, 507 bp, Oryza sativa
aacatgtttgaccgttcgtcttattcaaaaaatttaagtaattattaattcttttcctatcatttgattcattgttaaatatatttttatgtaggcatataattttacatctttcacaaaagtttttgaataagacgaacggtcaaacatgtgctaaaaagtcaacagtgtcaaacatttcgaaacggagggagtatatatataattgagtaaatttcatgaaacaaaatatattttgagaaattccgtacagatttaacaccaaattacatattgaacatgttattggttggggctctagccccagctctctggttggcaggaatctaatcccatatatctgttgcgtagtgagttcatagtgccagcaaaatttgcacagcaaccagcatacggccaagcagtgatggctagttggctggagacgttcagggtgaaagaaatgatgtgcatgaaaaaacattaggctgtttattactagctggatcatttgtgaattgtgatcat

SEQ ID NO: 36664 - DNA, 2362 bp, Oryza sativa
  unsure (1)..(2362): unsure at all n locations
cgcgaacttgannccctttgatatcgaccctgatatggcgaattcgagctcggtaccccttctctctcatccccatttgatgcaaataatcattttttattcaggcttacccctattaaatgttcatgacacaccagtgaaacccccattgtgactggccttaggctgagtttttcgcacgcaccttaaggtgaggttgttattgcaactcgttaaaggtgtatgatattattggttacgacagctgatctgatacagataagttttttacattattgatcattcatgaatgactagacccttcactatcacaaatgacggtttaagtacgacatagatgacatgttccgcaccagcatgatattgaattagcatgttataatatttcaaaaattcaaaaacatggattttatcatcgtttccttagtaggaatattccaaatatatatttttctgttttttctgacttttctatatatgacaaatatgaagcatttggaatcctctcactggccccatctacaatactccctccgtttcgaaatgtttgatactgttgactttttagcacatgtttgaccgttcgtcttattcaaaaacttttgtaaaatatgtaaaattatatgcctacataaaaatatatttaacaatgaatcaaatgataggaaaagaattaataattacttaaattttttgaataagacgaacggttaaacatatactaaaaagtcaatggcgtcaaacattttgaaacggatggagtattttactaaattcgcattttacttcttatcaagatctccctgccatcgatgggaatcatactacagcaggcgcttgacctcactatgaccaccaagacaatagttcggtcgtttactccaatggtaataaaaacacatcaaaataagttaatgtgttaactttatttttcgaaattcgatgcagcaatctgataaaaaaattgttaccattaatattaatgcagctaattaattactttttaattaaattgaagtattttccatgataccaggcccatgataccacattgctgatcacagagctagtagctgtggcaagagaagagcatgctctgttgcaagagtgtctcgagttgctgggccgagtgtctgcattgcaggtagctttgagtcaatatgttccatgaaagaaaacagcatatattcttttcccttatttttatttaacgcgatgcttatgctaatcttcattgatcgtgcaaatccgcaggttgaagaagagagcttgcgttgccatatgcttcagtcatagttactgaatcttatgtccgttgatacagtatgatgacagtagctaaatgttggcttgttcgctctgttatcatttttaaccttaccaaactaaaataggttgaataacagcagtaaattaatatttttaagctgattgcatcaatcagctgtagacatcacatttttgtcagtatacgtaggggctacctaatgcaatacaggaaaaaaaattgaaaatatactgtttattttttctaaaaaatactataagcaaactttattatatgaatagaccatcgtcgcgcttgaaataaacgaacttgttaacgatatcatcgtgtcctatcgccgcggncacttccgcctagccctnnccgccgcaccagacctaacctaccgcggtcgtcgctgacatgtgagatgtgagagagaagaggaggggatagagagagaagagagatgggagagctgacatataggtccaagggtatttttgacattccacatgatttctctctcctattcaaccgaaaattattatttaaattggtgcagtgtccaccagcaaatatccaacttttgggagtattttccccaaagtcatttcgtgtcatgtcctacagttaaaaccgcaaactcacgatgtcatgtagcaaaatttgcctaataaaaaacaaacagtggatccgctgcatcgcgctcccgacaagcgaacttacacgattaataattagtatcattagtaattgattaatgaactattatttttctaataattgttgtcgtgacccaaggtcacggacaaatagggggatagacgggagctaatccctttactcattttggcatttgagtcgtgccttttcgttttttgtgccccctcatctgcgagtgctccctccacctcgcgcctatataaaacattgttggtcactatcagagagcctcacgtgctccagttttatctcgttctttgaccactttctctttctactcgaactttctatagttttcgagtttaaccatgggtaaaactgtcaagaaaatcgccacaagcctaagttcaaacagtcttcttcaagctt

SEQ ID NO: 36665 - DNA, 647 bp, Oryza sativa
tagtggtaggcccacggcgcccaagactgtcattgcaagatggtctaactactgcgggctgtcggcacgtaagaactttgggatcctccataaagatatcggcacggtcacaaaatcctagaaagagcgagcttggacagctccggagaaatggttcacatttccggctgaagcaaaggataggctcaagtggaaggcattccataagatgggtaaagcttggaagaattagaagtcgaagctcttctccgagtttgtcaacccgcccggcaatcatatgtcgttcgatgaataccctcaaataaccgagtcggtgtgggaggaattttgctctctcaaaaacacccaagagtttagggaatcaagcgagacacatcgccaactgcaacaacgaaatgagcacccacatcggttgggcaccgcagggtacatcggcaaggaggcaatatgggcccaagaagatgcagccgctgcagcagcgaatgtccctgccccgttttcagacatccctgaacaaggagctcgcaactggtcgcgggcaaggggtaaggtcaacccggacggctctgtcacatttgagaacaaaagtgatgccatcgtctatcaggaactggtgagttcactacttaacctaactaatttccatt

SEQ ID NO: 36666 - DNA, 558 bp, Oryza sativa
cgaattcgagctcggtacccgacttcaataaatgtgttctccttatctttgtttggtctttttattttattggatgtgtttaatttcgtttgaactacatcttttgttagagtgatactttgtaataattggctgtagctctgatgagcaaaggccgggatgtttattccattatctaaaaaaatgtatagcggtcctctcaatgctagacacttaattacactcgctcacttattatattgctggagtccaaaatactcgctgatgtatccctctgcatttagagtttgtttggttcttggccacgttttgccaaacctaagcttaggcatgcaacaagtgcttaggttggtgtttgcttttctactaaccataggcttgccttaacttgataggcatgtttctgcttgctcgctgtgtcttgttttgccaaatctgtggcgttctttttctctgccacaagtgcggcaactagcttaccttaggcgtggcaattttagtcccaaaccaaacaggcccttagtccgtccccctaggctcctagctatctctcctaat

SEQ ID NO: 36667 - DNA, 608 bp, Oryza sativa
ctccctccgtttcgaaatgtttaacaccattgactttttatcatatgtttgaccgttcgtcttattcaaaaaatttaagtaattattaatttttttcctatcatttgattcattgttaaatatatttctatgtaggcatataattttacatatctcacaaaagtttttgaataagacgaacggtcaaacatgtgctaaaaagtcaacggtgtcaaacatttcgaaacggagggagtaggaagcaaatatgtaaaataaacatttgagaccaccgattgtttatgcgtgcaagtatgtcagtataatagaataacaaaatagagatattgtttctcatgtcatttgatagtttagtcctctttgaatagtgtaacaatgcccgtgctgacttgccatgctgacgacgacagacggagggagattttctatttgaaaccacacagtgattaccagtatgataaattaacaagcatcggaactcggctagtaggctgccaacatatgcattttatttcaaaccggaaaatgcatttttttttttttggtatggatcagctacaaccacagaacctcaatttcagcctacaaacgggaacagtgcaatatcc

SEQ ID NO: 36668 - DNA, 704 bp, Oryza sativa
aaaacaaagttgtagaactcattgaatatatcctttttttttgttatttctccatccgagtattattgaactatataaaatttgaattttaaaatacaaaaaattgaaataatttttcgggtagtagttgtataatgcatcaatatctataacttttgttttggtcatttttctatatgactttgtttgaacaatttgaatttgaatttcaaaatataacaacttgagacaatattttcaaatactaaatgattttaactgaaaaagacatcaacaacaaagttatataactcttcaaaatctacaaaaaatctacaaactgatcgtaacattgtaaatttggttttataaagtataagagagatatgctaattttgtgtactgttactatcactttgtcggatgaaaaaatgaccaaaataaatgagttctacaacttatattttcatgactttttcagcggaaattgtttattgcttcaaaatattatttgaagttttgaaattcaaaatttcaatttataaaacaaagtcagaagaaaaaatgccaaaataatagcagtaagaacataataacatgatagaagcatggttttataaacatttagaaaaaagaatcatccaatttgaagtgtatatgaatgagataaactagttctaaattttcaaattttattttcaaattttgaaaattttatttttaaa

SEQ ID NO: 36669 - DNA, 704 bp, Oryza sativa
atataatgattagtgtgtgacacactataaaagttaataattaggcttttaggcgtataattagagctgaaaaaagtttttaccccttcccatttcgaatacacaagttcaaagtccttggcccgcgcccctggctacatcgtagaccgtgctgaccatgtttgccaataagaagataacatgcatgtccatgagaaacgaggagatgagatttacgatggagctcgccggagaagggaagctcaagatggtggccaactcatggcatccattcgaggaggcggcggagccgtgggagaagagcaccggtggtcatgcaacacggaaggtcattgtggagatgtgaaagtaatatattagtttgtcctaaaaaaatgatgggaaagattgagaaaattatattttggtctgaatgtataatttttgtcccaaaatggagtaacaaaacgagatcgtcccaaaaatatttttttgtctgttttttttgtacaccctctatcccaaaatataaaggatttgagttagatgtgacacatcttagattcatactatgatgtgttacattgaaccaaaatctcattcatattttggaacggacggagtacttatttgctagatgtgaaatcgatagattgtactgaactatgcctgggaagtttatggctggttggtgcgcggtttatgcctgagatacctagctactt

SEQ ID NO: 36670 - DNA, 2486 bp, Oryza sativa
acgggtatatgggcccatcaggactatgatttcatgatgtgcgctcacaaccgggagtatgaggcctgtaccctatgcgtataccattattgaagttaaggttcttagtactaatgctacataaccactgcgcaggcgacattggattctcctagtcattgtacctaagtggagtagggttacctaccttaactccaataagtccaaagattatgatttcactgaaatcaccaagggcttaaatatggcttggggcccatatgtggaaaagggtggtaggcacaaggagggcaaggacgaactttaccatgacaccaagttcgcatgcgcacaacagatcggagaccaatgtggttttcacgtgtgccacagcatgtcaacacttctaagagaggtgaaagattttgaccctgaggttgttgctaatggcgaataagctcatttcaataccaacattgctattcaaaacgtgctaacatcttgtttattaaacagaaaggtagagctggcctcaagatctcatccatcaaccccccgctatcagaggcgaagtgtgcaccttcattctggcaataataatgaacaagaaaggacgttttcacgtcaaatagactcatgaacttggctagataatttattgtgatgtaaaaaagatgttttcataatttcttgtgatgtaaaaaaatttgtttttatggagtgcaatgtaatttactttcatatgtgcaatatttatggtagtttactaaagtgtcatcaaatttgatcaactgctatttatgttgtactattcatctattttctcctttttttttccttattgacaggttgtggaggttcacaacgaacagaatacaagaaattttggtaatcatttgaggactttcatggggtatgaattgtttcatagggtatgaattgtgtgctataataaattaaattgttgcatatgtgatgttgcaaattgttgctttgtgatggatctgtgatatgtgatgcatctgttatgttgggcagttggggaatatatgatatggagggggaggggtgactggcacctgtgatgtttctgtttttcagagggcatggctagcaattcctgaggctagccaatatttagcatttatttttttttctgtcagtgatggtttggaagaaaaatccatcacaggtaacctcacctgtgatggactcgcaaacgtcggaccgtcacaggtgacccacctgtgacgggcctttattttcgggcccgtcacaggtgggtcaccctgtgatggctactatataccggagatcatcacctctgacgggcctttatttaggggcccgtcagagatgagacacctgtgatgagtcctaacttgccctaggctagctgagaccaacacctctgacggccttctattaacttgcccgtcagaggtggatgtcaccactgacggccggccacccgtcaaaggtgactggactcaccagtgaccactgatcactgaccaagcccaaagccgtcaaaggtgagggtttgggcccgtaacaggtgaccttgaccagtgtagtgatattataagagcattcctcatattcatacagatgttaatgaatctagactttctagcgacatgtgtttagattcattaacatctatatgtatgtgggcaatgctaaagtcttataatatgattcgaacgaagtacgcacgtggtaaaaaaggtaaatccacattttactgagattctaatcaaaacagtttttgctagttgctctacatttagttcggcgtagattttgctccttaattccaaactaagcaccttaaagtcaacgcactatttatacaattgtctatgagtaagactacagactataacataagaaaacacaatgttcaaaacataatttatttacataatatgataatccagcctacctcctattttcagtaggttaagctattcgtgtcggtatgtagtacacgtaatctttacatcagcccctgagaccattatagtcgaaaaaataatcttcttccgaacgcttcacaaaaagccgagtgctccaggccgagtttagttccaaactttttcttcaaacttccaacttttccatcacatcaaaactttcctatgcatataaacttccaacttttccatcacatcattccaatttcaatcacacttccaattttgacgtgaactaaacacaccctcaatatatatgacatagtctcccgagtgcttttatcgactagatgcacctaattgggtgtagcccctaactatgtggttagttaaaaaaactaaacatataatcaaagagtaaataattcaaccaaccgagtggatttaatgacatataatcaagagataataaaaaaaataccattgacaatcgtccaagtcccagaaataccatcgacaaatgtgagttccaagaaatgccagacaagtgtgagttccaacaaatgccagacaagtgtgagttccaag

SEQ ID NO: 36671 - DNA, 558 bp, Oryza sativa
tatgctccctgcaatctaaacactacagattgaaattttctgaccgttagaaatgttcaattgcacatcatgcgagcaactgatttgtttgcaatgtgcatgtgtcgccatttatgaacagactaaattctgacgcggttgttctctttgaccataaatctgttctgtgaacaagaaatatgaattggttgatgagctcattaaatctctgtagattccagctcaggatcggaggacccatcggctgtggttcagaagtgggctcgacctgctttgggatggaaagaaaataaggcggattacgggagtgtgcgacttgaattattgatttagccttgcagatagagagttggatccgctttccattggtcatctagtctaataggcaaccctcgcctcagtgaggaacttttgtccgagcattcttgttctacaattaatcggagtgaggaaacttaaaatactgtactatgaaaaagagtaatagtcgacagtgaataaatgagatgggcacatcaggttacacgcctgccccggctagctaagaggtcttttgct

SEQ ID NO: 36672 - DNA, 577 bp, Oryza sativa
atttaataaaaattaaatccatccatgctttatatttaggaaattttatttcccacatttaacttcacatgaaaattaaagaacatttaatataaattctaataataatttattaaataatttataaatcctgaaacaaaaatcaggatgtgacatccccccttcgacagaaggatttggaaggggcgaaggccctagttgcattctcctcgggcaaggcggcgaaaggaggtccggtgcaagggccgaacgtggccgacgtggcgaaagcggctgcggctgcaagggcactccaaattagggcggagatcctttcgacaagccaactggtggtgccccaagccactccatcgcatgcggcagcagccccaactgcgctcgccggtgtgcaggcccaagttagccctgaccccgaaacacaagccgaagccgacatggaagccatgcgacagaacatgacatggctccaagacatgcttcggcaaatgcaagaacaaccaccagcatacgaggcggcaagggggaccaaaggcacgtcggcttcaatcttcagtattccgcaggttatgtcacacct

SEQ ID NO: 36673 - DNA, 538 bp, Oryza sativa
gggataactcatctttaatggttcaaaaaaaaatcccttttaagatatgactatcagggatgacccatcatcgatacaaggttatctttctcgggtcgtagttgtaatatgtcacggatgacccataacgggtcacaatcatatcccatcacggatgatatatcgaccatgatggtgtaataagatgtcccgtgcatgagtgcatatcctcaagggcatgagaagaaactttcacaatagaaattgtaaccgcatctccttaagggcaagtggctcgtgcctgagtgcatcgctagggtttcgtgacaaaaagtaccgcataagtgtttcttgccatgaacaaaaatactgcaaactgaaattttgacgaaactgagattatgaacaaaattttaaaaactaacaaagataaagacaaataagacaaacactgagaaagtacaaaatttaaaattcctaaacaatgtttgttgaaaaccaaaccaaaacgtaccaaactaaatcatgtttagtagctaatgaaactatgaaattcaca

SEQ ID NO: 36674 - DNA, 584 bp, Oryza sativa
catgatacaaatgctattaatggtttccttttacattctctatcttgaggaaaacaactgtacgaacgaaaattgccatatggaaataaaaccaacaagatgttgaagaatctgaaggaactttggtacgcgatgttgatcattctttaaccaaagcccttaataagaggacatgcaagcggctggacttctcgctataccctctccatttcttgttatatgtcactttaacttttttttctagttagatattttcaagtttgattaaatttataggaaaaatagcaatactttaaacacaaaacaaacatattatcaaaatataattaatatgaagataatttggtgttacagatgttgctagatttttctataatcttgatcaaactaaaaaaacaacctataaaatgaaacggattggagttagtatttgatatttctggtggactagcatggtatatctgccaaccttaaggtcactagcccaacagtagcactgtatgggcttgtgatatagacaatgagcacagcatcgaattactctgaatctgtctcgctctaaaatcaatacataatgaatcact

SEQ ID NO: 36675 - DNA, 656 bp, Oryza sativa
  unsure (1)..(656): unsure at all n locations
cgcgtgagtagacaccttctagnagcncaccatatttccgctgttgtcctgagattgacatttgaagtgaaatgatgaaatggacattcacagtcacatgctcaggtggttaatttgtaagcatcgcaatgctttagtgctacataaaacaagctttgggcatgaatattggcactgggagttgacaattgatcttgcatgatgttagggtggtaaaaccccaataatccagataagaaggattttacaggatgggaggatactacaaactacctttgattctgcaaccctgatggatagcatgcctattcccctttgggatctttgacttattcttcctttacattacattggtttgcatgagattgatgtaatatgtatgatggcttttgctaattcagttatttttggtcatacagtgatgcattggctggttctttgaggattcattatgcataatgggattctactgcagctatgcttttgaacttgcctaaagccggaaaaccaattggagaatggttcctttcaggtgcaagggcagcatgcattggtgtagatgtttatcctagtcactttgcatccctattgaaggaatgcaagtcttgcaatacagntcattaaattcaccaacagataattgcttctggtcttct

SEQ ID NO: 36676 - DNA, 562 bp, Oryza sativa
tgttccaaatccccaattacagtcctcgcacgcgtcgttggtggcctatgctatcaccaagttgctgtcggtgaggaatggagccaatttgccgtcatcgagggagggatgaggaaggatagattcggcgagggaggccgtggctggctggcggtggacctgaaccccctctaggacaccccaccgtgcccgtaaccctgttttggcctcttggccattatccgtgctccactgggctgccgaatccacgccttcaagccttcccgccacccacaagcctcttcgtcacaagatctgctgcccatgcgcctcctgcagccagatctgctacccaccaacctcgccaccgcccacaccactctcctcccacagacggatccgctgttcaccagcctcggcccttcccgccgccagatccgctgcccgcaatcctctttatcgctggacccactgcccatgtgcctcccaccaccggatctgccactgaccagcctcggcattgcctgtgcaccacccaccaaccttgctgctcccgcacactgcgtggtcgtcgccgtcttgg

SEQ ID NO: 36677 - DNA, 513 bp, Oryza sativa
cacaccgaaggtacctgtactattcacaccacgacctgcacaaagaccgggtagacaccattgacgaccagctctgccacctagccggactagcagagctgcaccgagttgtgaagccataccgttggcatcattggacttccaagctctgccgaacgacctcgcaccggagttttggccttgcccgaccccaactgggacgcgccagatatgactagaaggggccaaatctggtcgtccctcttgctaccatcatgaccatcgccagccaccaccgcaataggggatttggcctctcacgttggagagatgcctggatcttgccggagaggggggagggagggaggcaccaccaccgttggccaccaccacagggggccgcatttccgttggaggcgaggcaggcgagacgcgccttcgcctccgtattcgccaacagaggtgacacatgagtctgatttttcgttaatcctctattactataaagttagaacccactaaatcctaaagctt

SEQ ID NO: 36678 - DNA, 4818 bp, Oryza sativa
tgtggatttcttgctctgtcctgcaaaaggaccacatttatttcctccttcaatctatagcatcagttgcttgcttgcttggccaatgaaatgaggtgggttggtgatggggacattgagttttgttagtgcaatgtattatggggacatcagattggtgttgcaaagtagccctatcattcaaaaactaatatcgtatctgtagattgtttcttgttgtttctctagcgcataaaaaaataatctaacacatggtattgtactatcaggttgctgggctcaaacatatgcgaactttgatggagtggccaaaatgctttggtggctgttgggtactgtcatgtgcttttgaacaggttttaattatgttgtatgagatatgctaaaaaattatgttgtatgagatgtgaaggttgtaatgtgtttttataatatttatgtgctgatctataactattttgttactgatgatgagagaatgtcaactgatgatcagtaattaattttgctaaaattatggacgaaatatttgtatttgctaaatttagcagcagctgaatttttgttgggctaaaatctagctgtagcccaatttgagctgggctgaatgatgactaaaaggccgaaaaaacactaaaaaaaatcagcccaaaacaaaaaaaaaaccattaggtcataaatgggccgaaagctcttggaaaagaattgggccacaaaacacgtgggctaaatcctacatggcatcgatgacacatcagcgtccaccttggcgaacacatggcacatacgtggtgattcaatttcgtgacggaaaaatatcctacgtggcagctaatctgtgacagagaaatatcctacgtggcagctatccgtgacggttatttttcatcacaggaaatgggcttggctggactaactagaccacgggcttcatcgtgacggtttaaaaccgtcaccgattctgttaatctgtgatggttttcgacaaaccgtcacacaggtcaatccatgacgctcaatccgtgatgatttctgaaaccatcacagatgttgtttggtgacggtttttcagtgatccgtgacggaaatttttcatcatggattaacaggattcttgtagtgtgtggacagagaaagctttagtgaaacttagatggaagccagcctgtctgttcatatcgttatcttgttagggttggttcagagcatcagatttttctctttgtagctgctaatgggtaaagcttaaacagccatagattcgtatgatctgttcgagaagattgctgttgtaagtaagctgtgaagatgacaactgcacaatccatttgtttgctggccatgcggcacatcggcccataaaacatgcatgatgcccgtgccaaacataactgtagaacttgttgcatttgtattgaagttattagttatttgtttgattgctgggtctatgtctatgtctaaaaatctaggttggcttcgtctctttaatttaagtggatcagaagattttggctgtttcgtgcaaaaaaaaaatttgttgagatgcactatctcttccaacattttgcaaaatatgtatgttccttattatcagaaggaaatattctagaagtgactatctttaaatatgcgtgcattgtactgaaatgtaaactcttgaaaaagcgccgctcggggatggtactacctccgttttttaatagatgacgccgttgactttttctcaaatatttgaccactcatcttattcaaaaattttatgcaaatatataagatataaatcacacttaaagtactataaatgataaaacaactcataacaaaataattataattacgtaaattttttgaataagacgaatagtcaaacatgtgagaaaaagtcaacggcattatctattaaaaaatggaggtagtactatttataaccgagttacgcaaatattgcataaataaataacgtgaattgaacaggaggagcacaacatatcagcatgtttgcacgtaaaatatttgtagtgagaaagacatggttgaggatagggaagacaacttactccctccatcacacaaaaaacaaacttagatctagatatgatatattctagtacaatgaatatagatagacccctttttcatattcatagtactggaatgtgtctcaacatataaaatcttttatttttgggacggatgtagtagtacactactacaagttcatgcctccgctagtttgggtatgttgtcttattacattgtggctatgagaagttcttctcatgtttcatattaattactacacctgtttttgatattgagacggtaagagaatctcctttgtcatgacacattgtggtgctactgtgctaattgctataccaacgacaaaaatgaatatatagagcaactcgtatatatgtacactagtaggtcctccatagaaaacagttggctgcaggtagttgagaagtgttcaataacaatgagagatgttaggtatgtctgcttggtactatatatgcatatgtagaatgcaaacaattatgcatggacagtgcgtgcagcagcacatgttttccttgtaagagtagctaggaatgaagattggaggggatatatatcaatgagaaattgcatgcttgttctgtgcagatgacatatgctagcgatttcttggaatgtggggcgttaggaattctaattgcagcgtctacagctttagctgggttactcaagaacagaacttcatagattgcgctgagacttggcaccaagaatgcaaggggtctaaagacgtgaaagctttgagacgtcgaacctgagagataattagtcagactctgtgaagccgatcagttgatacgaaggagattacggcaagactattcagcagaacacaaagagattattgggctgcatttttgcagagtattgggcttcatttttgcattcttgttgggtagtattgtacagcgcttatttgtaggccgatagtgaggttctgtaattgtatggctgatcgattaaaaatggcatgtttaggtttgaataaacatattgactgcccaattcggttgcttctttgattcatcctgttggtactcaacctgtggtttcaaatataaaatctcccaccatatgtcatcagcttggcaagttggcagcggcattgtcacgctgttcatgtttctttctgattgctttgatgtatacagagaggactaaatgttgaatgacattaggaaaaactatatttctgttttttatccacttgtataaatggacatacgattagcggccagaaatattcattttacaaaagagtttcctagaagttccacgaagctctggcttcttgctctcgttgttacacgctggaacacgagagcaagcagtcaaacaaaaaaccttgaaagatcgtactactaaaatagagcaattctacggtacttgagaaggtaccataagataccaaaaatttagcgtaaaatttggtacttcatggtatcttatagtacctaggtacaaagaggtactaaatttacaatagaaaaaatggtacctcgtggtacctcctcaaggaccataaagttgctcactaaaatatacctgggaagttgatgggtggttgcctagttcgtgtgcggtttatggctgatatggctggttactaagcttttttgtataaatgccatgcccttgtttctatttgagaaatattgatcaatgaaagaccacacatgatttttttcttgtgaaattattggaattacaattttgctttttcactactgctagtctcaaacagttgtggatccttggaatggaaagcactaggaatttctgctgttccatggaatctatataatgtgggaatgtaacatcagctagaacgtattttttcccacacctataggattgatggagtcgtggtaaaagttacaggccttttgcgactacgcagacagaaatcttgagagaaatttaaattattttggatagaaggtgcctgccggttagctcatgtcatctattatatattaaaattttactaaacatgtcacaaatgctcttaagctaccatacaacgctttacaaatgctcctatgttaccacatgatgctctaataaattcgaaaaaaatagaaaatatgataattttaactattagatgatccaataaatagatgatcctttaaatagatgatccagtaattttaacaattagattaaaaaaacacccatatgccgccacccccaccataccatatgtacgcatgcacgtatactccctccaccctctgactctcctctcctctcctctcttattttctaagaaaacttctcctattttctagctaacaataaaaaaataataatcagatagttaaatgatcacaactcctgagttacatgtcgttttctcaatttgtttgaattgttgtgttatatataactaaatacataattcaagatacatattgcccatatttacaatatataaaatagacaataccataattctaactacaaatatttgggcaaaatttgcatttcagaagtgatgaatgaatcatcacgaattcaagtatatgggtccacaatccaggttcaaccaccaccaagcactactacagaaatgattttcctggacagggaccattttagattgcatgtgggcggtaactcgatccgcatgggaaaattggctcattttcctgtgcggtttatataagaggaccacacggaaaaattaattttcgcagacggacgtattaagtgaaccgcacgcaaaaatgagactgttttcgcagg

SEQ ID NO: 36679 - DNA, 1047 bp, Oryza sativa
tggatcaaagctcttttgtctccttggtataaaaaatggttgtgactatgtctctaatattttagtaaatgttttctttattatcagaaggacagataatggaatgatttcttggtcctgacataaagggctatcttcaaatatgtgcgtgctgtttgatatgaattgaacatatggtactctcctacagtagtaaacccatggagaaacactcctgggttgatggtactgtttataagagagttcatatataaataaagcacatctctgcacgccaaattgaacagaagctgcacagcagatcagtctgtttgaatgtaaaattttagtactgatgacaataggacaggaaagggaacttgcttaggttgctgaggagactgttgttcatcggaatgagagacagtgggaatatcaattgtacgctgaacctggtcccgacttagcctttaattacagttgaagtttagctcaaacagatatgatcggctaggtgtcaaatatggtgacatcactaggagagttttctttcattctccgttctagctaatgtcttcacattaaagagaaatgagaaacattattggtcttaccaagcttgaatgtcacgggtttctctttattaatgcatgtatagaaacattatgcaatgtgctcattgcaatcttgacactacccattcacaagtgacatgagccctatttgtagcaataaactatcatggagatagatttagccgtgtggatttcgctagccatgcaatggcatctttttattaaaaaaatctcacaaccatgtgttttcttgtagaactttagtattgacaatggtgagcattttgtagagcagatgcaagatgaccgtggctcatccgaatgggaaaccgtatgaacttctgaactgttgccataattcgttcaacacatttgatgctacttgcatgcctctaaaagaaaaaaaaaacaaggttctctacgtttcaactgatcatacacatgcgatctcttgtttcaactgacgaaaaggtgtcatcacgttaatcaaagt

SEQ ID NO: 36680 - DNA, 900 bp, Oryza sativa
tattcgctgccacttcgccgacgccgctcaatcctgctctgcgagacggtgccgcacgcgccaatgcgacgccgtcctccggtcgtccgcccgtccccgcgacctccgaccatccccgcggcggcgccacacgcacggccaggccagcaggcagcagcttgccatcgcacaagccgcctaggcgcctgcactaccccagtggcccagcctgtcggtggctagccggctaggcagccaacctcatcttcatcagttaggccatgaacgaatagaattgtctaagcctcctagattccttagaaaggctcagtgatttatcagcggtatgtcttctcatatatttattattatttaaagattttatccaccatgctttatgaattgactcatatttacaaattgacatgtttattgttatcttttggtgtataatgaattatgtatggcgcaattttttttgtctgcctgaatttattgattatactatttttttatacgattacaatataaatatggtatttgttgtgtttagttgtccttatgaagcgagcatttccgccccaactcttttttaatcctgcgtctgccactgaatagtgcacatgtggtttgtcacctgaaaccaacacgatgcaaagaaagataggaaaaacatgtctgcctcgttaggacaacaaatatcgtgggaaaagattcatcttctggcatgagatcctgtgggaaaattaaagttttactatgtttcatgcttcaactatttcatatggtactgtaggctgaatcgacaaaaaacccattttccttgcacttaagatttttctttttcttgtgttgaacatagatcttttttcaattgatccactcagatcttgtttttctagtagctcattttctagatag

SEQ ID NO: 36681 - DNA, 733 bp, Oryza sativa
atagcactcccaaatcaacatggagcaggtaggtatagtgtgcgttcgattccctgtgtaatctatggggtcaaaacatggctcctattatttcctaagcaaaagttgaaagaaggaaaactaaagaaaccgagtctaggtactttattgtctaacagatcatttccagatgaagcttccgtttcagcttccaacgaatgcaccaaagtctatctactatcccactggaatccaatgcgtaaccctaatatatttccaatgatcttggtgggttcagaacttacgattttgctggtgcagatcaagcatatgtgcaaacaaaagacgagactgtgtttgggttgtgcgagactttcggatggagacaagacaaccgcatctctgcctttgcggcatttctccgaacacctctgcggcgcttgtctcatctttggactcctcatctcgcatatcaggcgcatcctcaaactggtaagcagagcggtgggaaaacgagacggagttggcggcgagcttgatctcgcgccgaccgttgtcgcacccgccattgctgcgccagcggctgcggcaggtgatggggtggcaaggcctcagggagatcctcaactgccgaggtgctccgcttcatagaccgagcaccaccagcgtccaggccgccaccgcggttcccgtctgccatatggttcccctcgtcgtcgtcgtcgccggcgacggcgacggcacgcacccgccg

SEQ ID NO: 36682 - DNA, 648 bp, Oryza sativa
ctactttgtttatgatcccacgcttactaattacatcgtacttacactaaaattacatataattacatatgtaattttgtgacttacatcataaatatactaaaattacatatgtaattttattacttacatcataaatacactaaaattacatatgtaatttttggaacttacaatgtaaatacatgccgacttttttttttttgaatattatgacatcatatcatagttactccctaaatttaaatagatgagattaaatttagctgttagatgtttatcctatggctcgaaaaatctgcacaataggaggctagaaaatatgtcacaggcagtcccattaaacataccaatttggtgtgatcaacgaacacaattaaacataacaatttcagttatttataaattgtatttctatatttttagaaatcccgtcaaacgctgccactatacattctctatgacccatctgccggctactttttattgtcattgggactctaaaaatcgaatataactatcggtggaatttaatttttacttatagaagtcccaccaaccatcgacgggtctggcattgtacttctgtaccaaccggccgctggctcttaattttggtggcattgagaatttaaaaaataaatatga

SEQ ID NO: 36683 - DNA, 573 bp, Oryza sativa
tcattttcaccggatatgtcctcggatagaaatgtctaaaacaaaattgcaaaccctggtattttaggactttataaaaagtacaagttatatatgaaacaagttttcgtccaaacagtactcactaattagtggacatgttaatttgtggttgatatatactctagtaacggtcactaggcagtcagcacatcattggtccatgtccatccatccgtagggatggggtggtggtggtgtggaaattatggatatcccatatctacacggcgatgatatttggactgaatataggataccgaatatagatagaatatcttatttgtatctcgggtttgtttctcaacttgtacatcaaggaaataccttgagacttagtcggttacgactgtattttatctgtatctacatattccgttagggatatagattatcttttgtaatacggactccttcctatatataaggggggtccgggtgcctctaggggcatatgttggctttctccaaatcatacaatcaacaagacactcggcggattcatccccggacaggagtagggtattacttctt

SEQ ID NO: 36684 - DNA, 642 bp, Oryza sativa
gggggccccccacagtacaacattgccctagcggaggccggcaagggggccgcctgcaaaattccatgccccccctcgccgcccatttgcaggcggccccccgcacagtagaaaaccgccctagcggagggcggcaagggggccgcctgctaatttcgttgacggccgtcgcccgagagcgaacggccggctgccacgtcatttacgccgccctctgggagggcgatttttaaaaatcgccctcccagagggcggtaggcgactatttccgtcaattttcaaattggaaaattatttttgtaaaacttttaataaaaaaaattataaataaaaaaaattccagaaacagatgtacgatgcgaaattccagatttgcccttccacttaatcagcacaacgcggatggaggggaggtacgcccatcggcattacggtacctggcggtaccgacgttcgttagccgtcggatgggttccaatggacgtacatgattttggtacctcctctcctgctggaccataaaattctttttaattttaaggagctcgcaaaggcaagcaacaactttgcccctgatagaaagatcggtgaaggtggcttcggctcggtgtacatgggatgtcttcccgatgggcgggtggt

SEQ ID NO: 36685 - DNA, 606 bp, Oryza sativa
ccatgattgtttacggtcgttagcgatcagttccgaccgtcgatatcaccaaaatagagaactagttatgcttgcaatgcatatccatgttagaataataatattgcactagtgtttggttcactaaccttttgcagagaataaccataaagtggaggagaattgacatcaactcagacgataaatcaatcggacgatgttgagaatcagacttgtgcatgaatgggccaagaactcagaattgacacgatgaattgggcgaaaattcacaagtctacgaagaaaagcagcagaggaggccgccagccaaaacttgggctggttgggccgacccctggttcgaccgaatcccccagcgccgttggatgcagggttgcgactggacgctgtggattagctcccaatgacggttggagggtattttcgaccattccaaccgtcattgggaggctatataaacccctccctctcttcacttcaacacacacctcaagcaaagctctctcctattctctcaagtttagtttagtgttcccaagctagtggaatgggaatagagtagaaatcagagggtttggctctagtagctcttctcttctcttgtgt

SEQ ID NO: 36686 - DNA, 1055 bp, Oryza sativa
  unsure (1)..(1055): unsure at all n locations
aagaacgtgtggaaaaagaaaaaaaaaaaaaatggtgaccaaaaggggaaaaccacaaaaaagggcaaggagagtgaacaaaaaaaagatgggaagacaaaagaagaatggcatgaatggcgaaagcgggaaatgtttatcgtcgccacaacttggtgtccttcgcgctgccactgatcgaggcgggggaggtgtggaaggtgctggacaagcggccggcagcggagccaacgccgaggcagctggaggcagcggaactggtggcgcagatggcagtacgctgcctgctgctgcagtgggaggagcggccgcccatttcggaagtcgtggccaacctcgagaacgcgctcgagctcgcccattgcgacggttagcatagcctgngctcccgagacatcctatgtgaattgggcaatgtatttctcatgtaaaaattaatgctgtttgcttctgtttctcttttgtgagcatacacaattaaacatcggaactgctaatggtctgttgacagaaaatagggtgctaaatctgtcacttttttaccattcatctttgtttaaaattcatgctgcatttggattcaatggattgagcaaagtcaggcacggttgtggactttgagatggattgggtttttgctagactttgttgttgtgttctgtgggtcccacatttacggttcaatttcgaaacacacgcctgcttttttgctttttttcctcacatttgaacagtgttttctattgctactttgtttatgatcccacgcttactaattacatcgtacttacactaaaattacatataattacatatgtaattttgtgacttacatcataaatatactaaaattacatatgtaattttattacttacatcataaatacactaaaattacatatgtaatttttggaacttacaatgtaaatacatgccgacttttttttttttgaatattatgacatcatatcataggtactccctaaatttaaatagatgagaataaaatttacctggtaagatgttaatcctatggctcgaaaaatctgcacaat

SEQ ID NO: 36687 - DNA, 615 bp, Oryza sativa
tatgcctgtaacgttcttctcttcttcagggagcagggttgcagcttaattggaatcttctgcacatcagcacatccacctcattgtcaaattaaattcgacttcaggtttctcaaagaaacgtagatggaccttagaatatcattacagggcatacgcatatactttattcaagcttattaattattactccctcgctcatgcagatcgtatgaagagcatactgagatacaagatggaggaaacatgaaggactacagtacatagacatgcagaaaagagaaagacaatacagactcgatggtgatcacactacactacaactgaatgattgaatccaatgaagcttaggaacggtaagatatacatgtccaaatctgaatttgatgaagaaactaaactaattaaacgatcacatcaaggagtagtaggggacgagggattaattgttccgtccagcgtatcttgcggggctgtggcgaacgccagaagcgagccggtcgatcgtgtatatatatactaatataaaatatgatagtcataagaaaatttggaagtttaaaatacccctgaagataaaaatctttctctggctcatgctaaagggtaaaatct

SEQ ID NO: 36688 - DNA, 592 bp, Oryza sativa
ccaggcgactaaacgcagtccaggagaggtcctggtacgcgatctggtgagtgggcctgaccactgcgaagaggtgtggcgaaggccagctacgtgtatacctccacgggggtaaaggtatacagagagctcacagtgagggggaacacggtccacggagtaccccgtgtactcgggacaagagaagccaaggaaacgggcgaggtcactaagctgggcgacgtggtgaccctcaccaaaaccgtgggaactgaagctggcgttcactgccatctacaattttgaaggagggagaaagatcagtaaccattttagaaacaaactattgaaaataaagaaaacaaaagaaaccttagcttttcgcaagtagttttgaacttagtatacttagggtcgtcctaagcgtcgggtttcgccctagggccaagcttgtgctctgataccatctcttgtcatgccccgaactagttccgaccggaactagcccgtgacgctccaaataaacctgttaatcgataccagtcccagaagacagtgctggtatcacagggagacagaatatcacagcaacagaggtctctttattatagag

SEQ ID NO: 36689 - DNA, 697 bp, Oryza sativa
cgctaacatatgtgtgtataaaatagaagttaatgcattaaataatgcattttcattatttaaagtacaaagattaatgataattacttcgaaaaattatttttgtctgtaataaattaagtggataaatcgtaataagcaaatatatgacttataattaataaaaattccaatatatatatatacttagcatatatatgaatgatattattatattggtaaaaactctaattaagatatgtatgtacatactgcatgatttaaaattaataaaattgtaatcatcatatgtacttagcgtaggaattatattaaattaaatgctaaaaactctaattaacatatgtaaatgccacatgcatgatttaaaccttttaaaaattcgaatagtcatatataagtagcatatgaaagatagtaaattaaattgtgaaaaactctaatatatgaatgatagttttaaaaatatattaaatttaatacttttaaaaattctccagtcaattataattagcatatgaatgatagtaaattaaatgttaaaaactctaattaacatatgaaattgccacttgcgtgatttaaaacttttaaaaatcctctagtcaattataattagcatatgaatgctagtaaattaaatgttaaaaactctaattaacatacatatgaaattgccacctgtgtgatttaaaac

SEQ ID NO: 36690 - DNA, 615 bp, Oryza sativa
aatcgtttctggacgtggctggtgctggctttggcagaaaattcaaaccttcaacactgggtcaccggccccaaaattggcgcttaagaacccttatagttttttttaaaaaaagggacccaaagccttgctttggatattaacctaaaaaaattccccggcccttgcatggggggatggtaatttaaatcctataatggtaagggggataagctacgatgaaatttcgctgggggaattcgctttggatatttttttataaaaatcatgagctacaattaggagtccgacttccatctcaagttagcatgggagtttttttaaagaaatttcttatgcgactccgttttatatttccaaaagcaaacgaacttaaaatccgactcaaacatggatttgtatttccacaaacgaccgagctttaaaaccgacttaaatactgatgacgtaccaaaattccggcaaaaacatcttcaatttttataactagctgggtggcccgcgcaattgcgcggctagcacccatacacaattatatatttttttaatatgattttacttaaaatttattaaatatttatctcattgtcctaagactatgaaagaccaaacctt

SEQ ID NO: 36691 - DNA, 604 bp, Oryza sativa
aattctgtaccggcctggggttgaataaacccctgttagctaaatatctacacggttatatggatggttatcaaataatcaattgcatgtggtgcccatgttccaacaacgaacaatcatgccaatgattttaattggcccccaatcagattaattaactcctccgtacgtatctaggagtagctagctatctccatcgatatatgatgtttaagtttatatatagtacgtgtacactgcatttcgagttgagaacttacacattaatttgtgcttacagaaatctgaatgattctaccatgcaattatgctttaatttgtttattttatggacatattagaatgattctacggttttattttgaatattctaccagcgctgctaagaatgatctgtgctgagttgtatcaatcagagcaaggtttagtgcattctagctagcatggtaatggatgagcttgctagacagggtcaagatcaagcttgccaattgtatttcggaggccggttttgctcttgaaacagctctattaggcttggagatatacattaagatttgagaaatccaatcccaagcgagaaaacacacacacaaacaaaagg

SEQ ID NO: 36692 - DNA, 2198 bp, Oryza sativa
tgcatataaaattcatctcaactcattttagggtaaattcacattccacagaatcaccaatttgttttctactgtaaagtgaaataaaataatatacttactttgtacctaatgcctctaaaactattatctttaaaatgaatagttttagataagttgaactttagaagtttatataaaattcatcttagatcctttttgagtaaacccaagttctatagagtcatcaaaacatatacttccaagttgtaaaataaaatcatatacttactgtataataaaagcctcaaatatttatgtaaggaataaccaacattgagcagcctttaatttgtaaaatttgtagaaaattcatctttagtccaaatagagtgaaccaagtttctatagaaccagaaaatggtaagcttcaacatagtaaataaaatatggcactttttgtacaggttatagctctaatctttaattagataccctaggagttaatcacctagtattggttaagcaaaatatatgtgtagaagtatttaagatgaactctagctatgaataaaccaaaaataaaacttgttagaccagagaggtcatagttccaaccttaattcccaaagacttagcaaacttaactcataacaatttctaggttggtaggttaagtaactaacatagaccatccctatttataaaatatgtagtaaaataatataaactctaaaattatgaactaagattagattagctaactaaaatactcattttatacatcactagcaagttagagcaagttctggacctaaatctccaaaaccatgtacacatagagactatatgcctagaacacgttataacttgtaaaatacataaagaattcatgttaactctagaaattgtgaaaccaaatttgttagtcttagaaaacacatatcttcacctcagcaaacataaacttaataagaatcaccttacaacagcatttcacaatagtacctaagtaaatactaccctataccgagcaaacttataaaattcataactctcaaataaaaagagataaaatagaaattctttcacctaaattcatattatactagtacctatccattatgcacaaatcaagcattttagagcattctggatttttcgcatatttcggtgtttaattgcataacgtgtactttgtatagatgattgcttaaacggtgaagaagtgaattaggtgctgacattttccagttgcaaggcaagtcccacctccctctctttgatcactttgaacctatgttttgaaggttattgaaaatatttgcaaatcttgcatgtcgattggacactaataaattaaaattttgttaaacttgttagacaaactcctattacttgcattatcaccctaaccccacatatatccatatcccacattcctacccttaggaacaatatgactatgccacttatatatgagtttagatgtcactagattgctataatgcttagccatgcttagtatgtgtagtacttgtcatttgggctcttattaacttgaaaaaatgattttattcaagttttggacagaaatgaataaatgaggaatttgacaaacaaagcatatggccatcaaagtaggcattaatcatatataaatatgcacctcattgccatccatagtagcaaggagatcattcttaaatctcatcacattttgaagttaaatttcagcatttagaagattaaacataagtctatactcaacacatatccacataccgctcataaccgtgagcacggctaatcgattagtttttagactctgctgagcttgtacagctttacccacataatgtgaatcgctctagtttgtccgatacccgtcggtaccaccacactctacacattaagcgagtctagaggtcacaacgaggcttttacattaagtcttgtctaatccttgcatgagcacaatgagtgttgttccacactaattctagaatcttaatgtcattatattggggggtctttaccaatataacgccataggcaagccggtacaatcgcttcctatgtggcactcaacgttgtacgtgaggcggaacattacagtcgtcccctcacgcggaacagtacagtcgttccctaccaaaccataaatacaagtgaggcggaacgttacagtcgtcccctcataatcatgaactactgta

SEQ ID NO: 36693 - DNA, 856 bp, Oryza sativa
acccttcccaagcatgggcattgccagttttttccaaccaaagccatcaaatgcgcatagctcaactcttatattccaaattgtggattctcaaaccaccgtacataagggaccaacaaacctgctcccaagcaaccaaacaatttgccaccgttagccttttcatgacctgcccaaagaaagcctcttcgtatcttgtcaatagccttgattactgttagggttggaattgtgttccaccgaagggggaaggatgcggaacgacggggaacacaagcgcgcgaaggcgatgggaacgcaaagccagtgggcgcgagttgcgcgtgccagattgctacaggactttagcttcatctcaattagttaggattcactctcaagttatttagcaaatattatccattttcttcagctaaattagttacaaatgtttgttcttgtaagggcagactcaaggaataaagcaagccgaattaatctcatctactattttccatttcctcgtctccttccgattgcattcatcagcgccctgggtcgccgatctaccaagctccctaagcgtcggctgcctacatctcattcatatcctattcgatcattgccaggagctcgtgacaactttgtatcagaccatggaagaaacctccactgccaaacaaccgcttctggaaccctggtcccctcgacaagctgcaggacaatggtggatgtcctcgccagcatttcgctgctcgcgtccaagattgatatggttgatctcagtcgatcggtcgccgttgcgacttctcgcatcactgcacttgagcagttccaggttgcgtcgtctacatctacgtccaacaacgcgccctgg

SEQ ID NO: 36694 - DNA, 531 bp, Oryza sativa
agaaatagaatataatcttcagtccttggagtcttcgaaagagttcgggtgtggctcttatagctttttcttcttttgtcagacttgtactatttatagaatattcttctcaatatatttacggtactttacttcactctgatcatttgagtaccgactttatgaaatattattcgagttataatttcatagttagcttactcgagagatgcaatggtgtgggtataatgttcatttgtatgaatgctctaagtcaggacggtgattgtagagtagtatttggtagcataagtgaggtgcttaacctattgaatatcattatttggggttatatgctgtggatacgtcgagttgggccgctgatggtgacatctcagtatgggtattcctccgcgcatgtattaatcctaagtacaatttcctaggaagggtactcctccgtatttagccccggttggatggccaagacgggttgtcgtaagaaactctaggggtggtctctcaaaacaccaggagggcatcataaggggg

SEQ ID NO: 36695 - DNA, 560 bp, Oryza sativa
aaccaaaccctggcagctaaggcaaatccaccataaaatcgataaaatcaatccttgaagccatcaactgactgattctctctggaatatactatagctgcttctccaaaggacatgcttcttctagtgcttatatgttcattatcggcataatcagttggcaaagccgatagagctagtgatggactgtcaagtgccaagatggtatgcatattgatccaaagttgcaagaaccaccaaggacctccataattgatcacttcatctttcacaatgttacaagcggcagagtgaagcatctgataaactgagcaagcagatactttcccaaaggaatgtgcttcttctggaccaggaactgagcgaaatgttgatagttgactgttggcccacaagttgaaccgcagaatacatctctctccaaccacttggccaagaatgcaacatgttccctttcagaaacagatcctgtgcctttatgttttgctatgtatcctttccaacctccatggatctgttttgtcttaagagtatgatcacacttgatgtctagctgaaag

SEQ ID NO: 36696 - DNA, 533 bp, Oryza sativa
cagtagtccatcatgatgccttcttggataatgaagttatgggcgaagaggttgatgttgtgtcaccactcgaagtttcccattttccgtagtttctagttcaccaataaatcatctatagaaattgctttcgttaaccaggagaaaacccaaattaacaatgtatttaataaccggaaatgtcaatgagaatattttttgaattctctttgctctaaaatcattaacaggacataaagtggatattcagagcatcggatttaatcttgttaatttaaattgttaatatttgagttaataataatttttctctcccgcctttggccgtgaatcgttcccgattcactcctctctctgtccgcggtttcgttttgcatgatgagccgtgtccgttttcgttcgcaggttccgttttcgttctttgcctaaaatggcaccacatttattttccaatttgggaaagtcctaatcctattctccctatccctatttttcctcccgctctccccctcgcactcggccaccgctccact

SEQ ID NO: 36697 - DNA, 594 bp, Oryza sativa
gactttgaacaattattcaactttgcattatctgatttgagcatttgctattcctttgctacgtatttaagcctacccagagctccacatatttgattacagccgtaccgcaagtgtttgccaaggcatcgatacatccaaccttcattggggtgcttggttgagtcggtgtatgtcaccattccacttgcattggtaagatcttgtaagagcttggttaaaagcttgagtgtgtgcgatttttgagctgccactacctagtagttaataggaacgcgcatatttttgtgtatgtttcttgttttctactaacaatggcagggatacgcaagataattggggatagctgtgctcaacatcgacatcttcgtcgagacatgaggagggatcaacatgaccattatgaggtaagtgatgatgttctaggtaagatcaaatctgcactgccttatttcgagggaaactatgatcctcgtgcttacattaattgggagctagcggttgatagtgaatttcaaaagcatgtcttgtcggagaaacaaaaggttatgtgtgcctctagtgttttaattaaacatgcttctaatgattgga

SEQ ID NO: 36698 - DNA, 503 bp, Oryza sativa
ttctcaacggcccgaacctgtataaaccgctattgtctcatctccctaggggggcccgaccccctcttattcacactccaccacagaatcctcgaataccaatcactacccccggccgaaccaaaaaaggggggcctcatggttccctggtggaggagttcacccgccgacatctattctcttaaatctttctctcgtcaccacttcaaattattttttcatctgtggagaaatggggggccagattggtataaagaatattctcaatggatcattaagcaagatcgtgagtggacttaagtgaaaccgaagtctaaggatctgagatcttcagtcgtagtatagcctagtatttcttttgcaaatgttgttcaatctgagcgttcagttccctcatctatgatccctgtctaaaaggtttttgattctttgaaaaagagtatactggataagaattctagatctgtcaaagatcagcttgatttcaatgtgccaaatcattc

SEQ ID NO: 36699 - DNA, 787 bp, Oryza sativa
  unsure (1)..(787): unsure at all n locations
acagtagttcatcaataatcacatagccaaaacccccttacgatgccctcctggtgtttcgagagaccacccctgggtgccgagttccttacgacaacccgccatgaccatccaaccggggctaaatatggaggagtaccctccccaggaaattgtaattaggattatatacacgcgcgaaggaatacccgtactgagctgtcacatcagcggcccacctctacgtatccgcagcatataaccccaaataatgatattcaatagcctaagcacatcgcttatgttaaatgattcacttgatctctcaaagtgtatgaatatgaattcctcaccaaattttcctttttgattcctactctaaagttgatatgtggagcttggtactctaaagtccaaggccaatcgtttcatgaggaggttgttgatgcgaaaaacacgaggcctgggagatctgcttaactccagtgtaggtccaaaaatcttgcctttaggttcgtgagcgtgccagttgattagatcctgcaatcaacaagaaataaagacaggaaaatagcagttaaatccataaatgatagccgatcagccaatcgccgatgacatatcatttatctttgagccgatgtcatatttgaatcgatcgacggatataaataagtaagaaagaactaaatctattcgatcggctgtagatattaacagtatgtaatccatatgtcgatatatacttaaatcaagtgattgggatagatcggtcgccatgccgagacagtatanatcacttacatcg

SEQ ID NO: 36700 - DNA, 673 bp, Oryza sativa
ggttctggtcccatgtccaaattctttccgagtcatcgggaatcgaccgaacaaatggacgtccagaatctgtttcggtgctgcgtcgccgtattttgccctttgggccgtgcatcgtgttggagcccattaggttgcgtcaaggggtgttgcacgaccctaagactctatatattagtagccgccacaatctttaaggtttgggttttgcttaaattaatctgtcaataacagttttgccgatccttcggtttgtgagaccccaacttgtgagcttaatcattcatatgcaatttggttgtattctttcttgttcttgtttgtgttcttcgactcgcaagcagtgattagccttctcgacgaggtcaaccgggtttcgacacagttgataacaggaggagacatggtgctgcgatcgcagggctcaagagcgtgtttgttcataagtcggatcgacttgtgtcgcgactccaccaaatcgaccgtttatcataacaaaagatagggaactcttatccacatcatatggtcgggttgataaggatgaaagaagatagaactaaagagaagatggtatcaacttacattaatcctgatcttttcgtccacaatggtaaggcagaagtttgatgacatggaaaaaaaggtgtttcttccattctacccaccattg

SEQ ID NO: 36701 - DNA, 789 bp, Oryza sativa
ttcattcttctaagatagttttagtcgattctcaatgttgggttcactgcaacctactattgtgcttcctgtgcatggtatacttggcatcctcccttttttgtttaaaatatctcatgaacatagctcatttttttaatgtggatatgctggaacccagggatctctgttgcacatcaatgtattagtaagtcggcatctaattttgaaaggttctaaagcagtaaccattgtttgtgctgccaccaaccttatatcgcttacatggcccaaccagccgcttgtgctacctacctaagcagtacatggttggacgctgattccccttgtttgtgacctagtagatcaccaaatttcagccaatttgccattttcattattttctgacaccattgctggttcctcatatacatagttattggagatgtaagtagggttgcttagttacctggagtatgattcttgcttcttaggaattctggtagcttcaccttttccagcggatgtttttggcaacgattgactattttgtttcatgtgcagtgcctcttttgattcgactatcaagctatgggaagttgagcaaggacgccttctgtacagcttggctggccacaggtatttgataccaggagaaaaaaaatacaccttttcaaaatacaaggcatattttgagtattaaatcaagggaaagatgggttgacttataaaagaaacggatggagttctttcttttggttgcttgcaatggctgaactcaacttattcgtgattgcaggcaacctgtgt

SEQ ID NO: 36702 - DNA, 692 bp, Oryza sativa
acaacaacaggcagcgctatagctatcagcaactggacagtatgtgcagtcatcattgaacccaccaaatcaagtagcctcaccataacagataaacaatacaatactagcaggaggattgagcaatcgtgctagagggagatcgaggggtacaccgggaatgtatttcatgagcacaccaccagatcagaggggagcaaacagatggacccaactaccacaatccctctatagagcacctctcctgtaggacgtggcaaaaatactgccgcactctttaagggcatagctgtgccacaatttggtcctcgtcactgaccagaggatgtctttggcctgcaaggatgatgagggatgatgatggaagaaatgcaattaggagagtctgagagtgacacatgcttgcagtttgcagtttggggagggagagtttggcgaggcagccccataggcccataattcgccatgatggtgtgtgcgggcaaggacatggggtgcacagcgcaattccttggaaggggaagtccatgcagcccgcttggttttctttcggtatccggttttctcaaggggttggatggttttcaagcagtgtccaccaggtttttcttgtggtattcgttttttaggtggggtggttttcatgctggatctccttggaagcccaatgtttccaagaggctgcagtttcc

SEQ ID NO: 36703 - DNA, 584 bp, Oryza sativa
acacatccacaaatagcatcacacaaggcaacccatgaccaaaaaccaccctacgacagcctagtgcccttgagttattgacctacaaaggaaaacttggagcacaagagctccagccgggcaccaaagcctagcttctgttgacactgcccgcagaatctccatgatgtttggatgttacattgaaacacatgatatttgcatgggcaaacagaaagcatgactcaatgtttgaacacaaataatatcacagcattcaactgaacagtgttcacattcattcaatacatcctgcagcatcaacaattttgcagccaaccaacgtatgactggataatggaagacagtcaactgaatcaaatagaataaatagaaggaactagatagactgaatgcaaggaacttcttgtttgctaactctataataaatttgagttgttgggctaattgggcccagctccaactagagctaaagatctcagccatgaaaagtacagtttactaccttctctctactaatggctggttgatctgatgtgtattatacttagaacttctatgcaagaggatttgttttgtatttt

SEQ ID NO: 36704 - DNA, 779 bp, Oryza sativa
catcaatagactaacttatacatctacaaagggaaaggcgtcgtcacgtcagctatggatatagactaggctcaggaacggagtcttaaagtatttactgagagtatactaaggaagaagtcagtggaagtgagctcgtaactaagacttccataatagaaggcaaagaagtcgacgaacgagcagcttttctaaaacccagttgaataggagggtgaaggctctcagatttcctgttgtctgtaagagtttttaaccctaccaatattttggcagcgataagatttatcaggattgtttggcttggcgttaaatttttgctagtgctcttgtttatgtttcttaccaatacttttgcaataccatttcttctctagcaaacggaatgccatccaattctattggcattgccaatttttttggcatggattcaaatcaaacaggttcgaatcttcggctattgttccgagcgtggcatccaacacggctgccgtctcctctacccgatgaagacgagaacatcaacattggggtttcgtggtacaagtcaaacgcgtccagtagaactggccaactgggtctgtttagaaacattttgacaaaacaaccaaaatttataacttctatactactccctcatctacttttgactgtcatatttcatattggcacacagaccaataataagcaattctacttatcatggatttaaacaagttactagacattcctcgtaaacaagcaattcattaatatttacatttcttgatacccatgta

SEQ ID NO: 36705 - DNA, 1096 bp, Oryza sativa
agtgaacacgctatcaggcattgacggagctagcaccatgaggcttccggttacaatagccgacatacgtgttgtgggcttgtggcactcgtcgactccggctcgacgcacaggtggtgcatcacctcctccatcttgagccggtgtgctagggacttcgctttgtcatggccaatggtgatcgccttgtcagccgggcctgtgtcgcaacctcgcgctcaacatcgatggcgaggccttctcggtcgactgcttcgcccttgacttgtgtgctgtcgacatcatcctaggcatgcaatggttgcaaacgttggggccaatactgtgggatttcaagaacatgcgcatggccatatggcgcagcacacgcgaggtcatgttctacagcctcgctgatcagggcccgatgtgatgagtggcgatcgacatcgacgatattttgcagcatctcctggcggaattagaggacctcttcgccgaaccccaaggcttgctgtcggcacgggctatcgactaccgcatccacctcaagcctggggccacatcagtcgccgttcgtccctaccgctaccgctatccctcaaggcataccatggtacataatatggctcatggttgtgttcttcctattccggccaaggcaatatagggtcgtttggcttgcggtgttcctgaaacccttgttcagtgggaaggtaaggcaccggcagatgcaacttgggaaattgaatcggattttcgtcaccgtttccctgcattctggctcgaggatgagctgtttctgaaggatgggagagatgttagggtcggaattgtgttccaccgaaggggcaaacgcgcaaaagcgatgggagcgtgaagccggcaggcatgagttgagctacgcatcccggattgctgcaggtcttcggcttcatctcaattagttaggatttactctcaagtttgttagcaaatattatcccttttcttcagctaaattagttacaattgtaagctcttagggagaagaattcgagagtggacgaaccggactcctggagataccggaagatgaggaagttgagctcggccgaggtgattgcccccataggcg

SEQ ID NO: 36706 - DNA, 575 bp, Oryza sativa
tggaggacgtggaggggatcgtgcccacgtcgttggatgcgagctcgggtgcgggagggcgccggattttgcggcgacgtggacggcaatggcggttggggtcggccggcgagaggtaggaggaggagctgacgggtgggaccgtcggtcccacctgtcggcgaagggagagaaggagggacgcaaaacagacttttgcgagcgggccaagtgagaggggagcccgcccgagagagggagaaggcgcgcgggccgcgggagaagaaggaagacttgggccgaaaatggcccaaagagaggaagggggattttaattgttttctttttattttaattgatgcaatgatctttgtgctattaaaactatttctcgagctccgaaaattcacggaaaattccggagagtacattagggcacaaagaatattacaaaatattcccggccaataatttttaaaggaaatttttaattccctcaataattcacttgattaagttgatttaacttttatttaatttctagaaaatgtattattaattgatttttattcccgaacgaaaatcggggcgttaca

SEQ ID NO: 36707 - DNA, 1251 bp, Oryza sativa
attgaattgcttccatacaatcaaatccctactgtgacaatatattggattttaactaagaaaatttataagctgaaaatgatacttagtactttgtccacatttctcaagtcgcaattgtcattctccgacttccaaaatacaccaaatgcatgttcaattgtcattctggtgtctgcattctttgcaagcacaagtgttatattaaattgagcaatctcacgcttttagatgcaataagataattctttgatggtcctgtttggtttcgggctaatattggctattacacaaagaaaaccaagtcaaaaaacttgacattaccaaaaaaaaaggtaaccagtttggtaagtatgtcttcataaatgaactggagagctaatgtggcatgttacccaaaactttcgcgaaccaagtgaaagataaatgtggtaactcttgcataattcgtcaaatcatcatattaatttgcatgttgctttgactgtaatatttatagtaaaacatacagaaaaccgatggacataattacataaggacattttcaagcattatcttgcaaatgctctgctgatccgcaacaaatgaaaacttgtcaacattgtaaaataatcagtaattaacatatttatcgcaaagaaaagacacgcacatatcaaacaactgtcacaaaaacatttctcaagttaacaaataaagttatcaagattcaatcatctgtagactgtagctactaaagtttactcacagtatgctgaaaactgtaagatggaatcgtaagggaaatgcagcaaacagatattagttaattacctccaccagcaagagaatcttcttcagccttaaccttatcaatacgctctgtgtgcagcttttctttctctttatcttgatccctgtctctttcagctctgtctttctccttctctaactctttttcttggtcatggcgctccctctcccgttcacccccagggcgtcgttcatgctcctccatacgttccttttcttttcccttgtccttgtcacggtcactttgagtcttctcccttttccttttcttaacaatctgttgcaactcttcaacattttttgtgattatttcaagaggttcaagaagggcaaaatccttcgcaagatcttcatcattctgcaacaagataaagagcatgatgtagcatgcatcagaaaaggtaatgaacactagaagacaaacaaacttacttcatccgtatttgcttctagttctat

SEQ ID NO: 36708 - DNA, 593 bp, Oryza sativa
ttttatgtagattccttatagataaatgtgggcaaaagtctgccgcaaagacttatggtatcttagagtttgttagagataatggtcgtgtccggtatgggcaatcttgtaattctcgggtataaatagaccctgagccctatgtaaatgataacacacacgttcaatacaattttggcgcatcgccaccctttttactttagttttgtttcgacgagttcttgctttcaggttgagctgcatagatttcgatcttcaacaagaggtaaaattcgttatgacggcttgtattcataggattagtgcttccatctttatgatactctaatcttgtttatgtaattcgtcgagttatcacatatcttatataatctctagcaataccgccatctaacctactatcggctaacatctgttagcagagggcagccgattaggttagattttgacgtcgatctagattatataagatatataccactctatgagacttctagcggcttgattgtctagatattgttcttcttttcatacttaatgctgcatcagctgagtttgatctattaagtcgtgcttagaatatcaatctctag

SEQ ID NO: 36709 - DNA, 552 bp, Oryza sativa
aggtagagagtgaggggaagctttggaggactgcccgaaagtttggcgctccatccgacttctatctcaacgagtgtagctttctaggaggaattctggaggagtaccggagttgtcggcacatgtcacgcccagaaatttagcccaaatttccagactattttgtgtattaaatccttgtccaggaccagccagggtacacaaaatgacaagtaataaacagctccaaacgtaaataaagcataaaatacttatagaagaggcacttagtcctcacaccgaaacaaaagcagcagcagcggaaaaggcgatcctagcggggcttcagctccactccacaggcaaaactcaactggggtctgagccttggtcttctaacttcgtcttcagctcagaagcactacacttctgaaaagggggaataatagcaagactgagtacaaccaccgtactcagcaagccacaccaacgatgcagacgtgcaaggggatacaaggaggggtttgtggctatttgcataaatgcggttgtaaatcattttattgagcaaaa

SEQ ID NO: 36710 - DNA, 693 bp, Oryza sativa
ttcctgcagcccaaatcgattgtggtcaagggactatctgaagaattcgcgaacattgtatcaatgaaaaattattcacccttcgtcaaaaagaaagaaaagcccacgacaaacatgaaacaaacatcactggggttcagactttcagaacagaagctgtgattgtttcacgaccacacacaaccatcggtctcaagcacattacgctcctttctccatggctacacaaactacagaactcgtgagaagcaggccacggtagcatggctcattgctggccacacgcaagcccgaaaatatcatttgctacagtccaggtgaaaaaaagatctttgcttcaccatagcatccaggaaaggtgcaatttactgtagcaaaaaaaaaaaaaacagaaattttgatcacttcaattcaggattcagcaaacgggttcaccaaacggaattcgcataggagcatatcgatcatgaagttagtacagcaatgggatcgagtttttggtttcagttgaaagcgatccagccagtagtattgtagtacagcacattgaaatgattaagacagcgattacaaacaattgctgaaattgacaacacagttccgaacttctagtcgtaagtagctgtcgacattattatggagtaatgaaccgttgaacttgatcatcagatatatatacagaattttaacttt

SEQ ID NO: 36711 - DNA, 558 bp, Oryza sativa
ccgccgaagtggggccccaacgtggggtggtgaaggggttaaccggcgccgattttcgcgggaagagtggggcaaatggtgaagtacgtgaaggggatcgtgcccacgtcgttgaatgcgagctcgggtcgggaagggcgccggatttttcggcgacgtggacgccaatggcggttggggtcggccggcgaaaggtaggagaagaagctgacgggtgggaccgtcggtcccacctgtcggcgaaggaagagaaggagggacgcaaaacagacttttgcgagcgggccaagtgagaggggagccggcccgagagagggaaaaggcgcgcgggccgcggaagagaaaggaagacttgggccgaaaatggcccaaagagaggaagggggattttaattgttttctttttattttaattgatgcaatgatctttgtgctattaaaactatttctcgagctccgaaaattcacggaaaattccggagagtacattagggcacaaagaatattacaaaatattcccggccaataatttttaaaggaaatttttaattccctcaa

SEQ ID NO: 36712 - DNA, 526 bp, Oryza sativa
tttaagtcctcttattttattaattaatattcctcgattttttaccttatgaactatagaattccttatatgccactccaaattaactggttcccttatatgccacttcaaattggcttctcccttctatgccaccggttcaagtttgtcctcccttttatgccattgccgtcactccaccgccagttgaccgctaacttcatagtaaaaagacgcatttgcccttgagagttggtatacaaccaatggtaggtattttagtactaatatagctactggatacaacatatgaaaattgatttttttttcatcacatgcaattttagccatcaccatcacaaataaattttcaatataagcacaaaacatatagttttccaacaatacttatacaaagagcatttttcactggttctgacaaaattttgttcactcaaaaaagatttaaaataaattagttatgatttttttgaaatttacacatttttttagttgagagggcatattggtcatttaaaaaactaac

SEQ ID NO: 36713 - DNA, 599 bp, Oryza sativa
tgtaaccatctctagaatgaactgggtattatggtcactcattacgctccgcatccccttggtgttggcctttttgctgtcagatcaactcttattagagatacattagttgcagcctttggtttttattataatgggggtcatgtggttaggtttgtgaaccatgatagaggtactaactggagagctgctcatgctgacaaaggagtgtggattatgtttctagggtatcctctagacttccgctctacaagttacatctctagagctatgggtttgtttggaaagttagactacttgcaggaggttgatgctatccctggtcgtgttctgttgcaggcatattttgatggtgttgatttggtccaaggaagaattgttcttaaatagattcctaatcatggtggtcaaggggaatcgtggacctttggagtgcttaacttaaataataagtttgctaatccacaaccgcaagatgaagatttgccccctattggtgtcccgcaacccgcaccaggccccactcaacatcaaggtccagcttgggatgatattaatgagcagcaagaggatgtagggggatgggataactaggatca

SEQ ID NO: 36714 - DNA, 583 bp, Oryza sativa
ttcccatgcaccaacggttattaaaatcctcgggtccaactaaaaggaatgaaacggaagttagtaaaagaaacagacaacatcgaaccctattatatatatgggcatgtttggattgctaccctaccagtggtagtgccaaatcttgggcaagttttattactatcaacattttgttagagatttctagggagagatttctattgatttggcaagttatggaatcaatccaaacatcacacaagtactatttagactacctgttggtagtgcaagatttggcactaaaaccaaaacagccctatgtttccctggacacatcagatcccaagattgtgccctagcagaccctattttccccagggcggcacatctccaccacaatagcaccgaaccacactagagctactaaacatccagcagcggtaaatctcccacccacacgaaaatcctctcgacgtaaataaacacaaacaaaagaacctaatatccccaacgccccacatctccaccacaatagaaccgaaccacactagagctactaaacatacagcagcagtaaatctccaatccacacgaaaat

SEQ ID NO: 36715 - DNA, 1830 bp, Oryza sativa
ataaagtttgtcttcattaaagttcacatgaaaaagttataaattatttttaaatataaagtctttagatcgtcctatttgacccagatgatattcaaatccaagtttagggaccggggtgacacaactgaataagttggaggacctaaacgagtgatctgcaagtttagagaccgggatgacacaatcaaataagtttgaggacctgaacggtcgatttgcgagtttagggaccggatgacacaacggtacaagtttagagaccggtgatgaactttactcttaatctagatttgttcagctcttcagagacatcatctggcttgctggagctgtgctgatacgcgagcttatgggagaaactgaacttctttcaaggccgggctgcggacggcagagttcgaggagagtttgcccacgccgtgctcaccaacgaccgacgttcttgactcgccgtcaattccagccattgctgtccaggtgctttattttttttaagacagctaggaaggaaacccgcgcacatgcgcgggcacttatttaatgggtttgaaattttcttatgaatgttttatgggtaacctttttattgaaatgttttctactctattctaaacatgttttttttgtcaatgaattatttttcctaattatccttgcggcatataaattataaactaaaattacatggaactttttggtttttaatttatgagaaaatattgtgtcgtaataacctactcccttgagttttaaaattattgacgtcttaggctttgacattaaagttgccagttcttgacgttctaaacttagcctacttataagccattaaagagcatgtgctgcatgcatgttttctcattgctacagcacagctgctttgccttcctctattcgtgcttgcctgcttgcattctcgtgtgtttttctttttttttttgaatatttggcataccttgatatttttagtttctaaactaacatttttttctttgtatattatatatgtccttatggattttaggatatattaattgaagatttttctattcaaaatatggctagtaagactacttaggccccctttgaattggaggaaaaacaaaggaattgaaatcctacactattcatgcctttgattcgtaggaatgagaaaaagaaaaacgtaggaaactttcctattcctacaattctagagcaaaaacgtaggaaatttaacatccactctaacctcttggaaaactttcccagagtctatctctctcatctaattcctgcatttttcctgtggtctaatcaaacggtcattcctatatttttcctgtgttttgcaatcctctgtttttacacttgcattcctaccaaaatcctgtgtttttcctattcctccgttttttcaatcctacgattcaaaggggcccttaatgtcactaaagatagacttatatttatttcgattccctcctgcgcaacaaattcgagaatccaaatttttgtctcaagatgttaagggttgagtaccacatgtcacatctacaaacatatattgtttattacccaatcttattccaaccaccttacccaatcttattacggatatcatagtacttttccttcctccttagttgctcctaaaatcctagtatcccttatattatatgatatagatggtaattaccaagagcattatttataggcattgacatagccatttatgttggcaataatagacacttctttactaagtctactctcatcactccaaagtgatttccatggatcccaccatgcctgttaaaaagaagtcaaatgacaggtggcgtagtg

SEQ ID NO: 36716 - DNA, 2993 bp, Oryza sativa
atcaaacggtcattcctatatttttcctgtgttttgcaatcctctgtttttacacttgcattcctaccaaaatcctgtgtttttcctattcctccgttttttcaatcctacgattcaaaggggcccttaatgtcactaaagatagacttatatttatttcgattccctcctgcgcaacaaattcgagaatccaaatttttgtctcaagatgttaagggttgagtaccacatgtcacatctacaaacatatattgtttattacccaatcttattccaaccaccttacccaatcttattacggatatcatagtacttttccttcctccttagttgctcctaaaatcctagtatcccttatattatatgatatagatggtaattaccaagagcattatttataggcattgacatagccatttatgttggcaataatagacacttctttactaagtctactctcatcactccaaagtgatttccatggatcccaccatgcctgtttaaaagaagtcaaaatgacaggtggcgttagtgatcggaggtccctggagctgagatatatagatgatgcgagagagagagagaggatgatcgatcctatatgtctgatgcggtgtgattgtcacaataaaggtggacgatagacctcaaatttaggagtggtgggagttgatattggggcatactatagcaaaggagttgactacgtcagctcttcaattgtgccttttgaactttggatgtcatgtgctataataaattaaaattaaggatataaatatgtattttataaaattatagatttggataacacccatttgagaagaaaagagaggggaagaaacacatgatggtggaggcttgagggatagggcaatgactatactttggctttttaatggcccacaaacttaattatggttttagttgttagagagggaaaaaaaaaaggaaagatgtgtgtgtcgtggaagggcgcaagctgcatggaggagggtggggaggacagaaatcttcacttgttgaaataattggtccgccaatttgatttaatattaagggttagatgttgtttttcttcagaattttcagaatttgtacaatcttttctaatctttacagctcgatggcattacagggcgttcttgtttttatgaaagtccttttccagcaatgttgattaataattaaactaacaataaatgtggttagtgtcatgtatgtgatatccttatgttcatatttgaaaacaatccagcttatgttaatttggtactcaatacaggtctttaattgttcattcaattaatagaaatacagtggttgaaaccaattataaattgcatgtacaattaaaagttgtggtaaaagaatcaaatcatcaataccacataaaatcctcgtatgcatgccattaaatctttaatatcttaaaattaaatatttttaaagtcattaatagttaaatttataaaagtttgaccacaacattgttcaaaacgtcaagaattatggaaccgaaggtagtaaactttattgttgaacattgtaaagcaaattttgatagagtcatatgatatatatatatatatatatatatatatatatagtaaatttgtttggtgctccatggtgcccgggcaccattgttgaaattgagtatatacctaattcaaatgagtatgaaactttttcaattacttagatattaacattagctactttactaactagttcaaagcaagtttgaactgaatttgaacttgtttttgttagattttgattctaggtatatagcatccatacatataattagttaggtatgtaatcatggattgtgaaataaagttaaatttgagttgttttgttgttaggtataggtatgaatcgagttattataactaggtatatactcacaatttgaaaattttgaaaaatttgagtgattttgtgtatttgatatcatggtgcccgggcaccatggtgccccatatgagtaagaattagtataattatttaaaatttattatcactaatattaattgttatctcacctgtactcatggagaaaagaatgaaaaagagggaagaaaaagtatttatggttttcatggttttctcggctttatcctcatttaatttccaatcgtactttacgtttgtaaaagtagagtagtctgcatagatatgcatcggatccatattaaaaggaatgattctttttttttttgcgagtagtacgtacatacataccttgatcaccatccatatgcatcggatccatattagtaggaaatattttaatagatttaatctaatggtctaaaatatcgggtccaccaatttaagtgaaaatatgttttgcttttttcttagaatttatttgatttctctaatttattagagcgccaagtggcggcttaggagcgtttataggaagtttaatggacttttagtatataatagatagatagatagaagatagatagatagatagatagatagatagatagaagatagatagatagaagatagatatatcattctgttcatgtgaaattttggaattatcttgcgtagtagtaatcctgttgcttaaaatacagttcttgtatgagctttcaagtcttagtttgctatgccatgatgcttttatttgatctaataaagttgagaggttccactggattttctaggcaagtatttttgttctttttttttataatgttccataatactcttttatatgctctatatatgcaaatactgtaagttttttcatgctttacttatgttttttttttcaaccaggatgctttactcatgtataagataatcccttatatgctactgaaaattggtctgatcccttatatgccactgaaaattggctcttcccttatatgccattggttcaaatttatgcaccatctcatgccactaccgtcagttgaccgtgtgttgaccgttaactctcaagtaaaaaagacatt

SEQ ID NO: 36717 - DNA, 682 bp, Oryza sativa
ttcctttctttgaaattatattttttttatttaagtcacttgagatctctttccagagcatagagactaaatgaatcactgtaacaaacctaatacctagaaattccctatgtataacttgaggaccagtgatacgttgagaacactataggtgatactttgagggtaccggatgaaacctcgaggatactagatgtatcatggtacctccaacgtaccagatgataccttgaggtaccaggtgtatcatgatacatcgaggaccacgggtgataccttgaggataccgtaggtgatactttgagggtactggatgatacctcgacggtaccagatgtatcatggtatctcgagcgcaccagatgatttcttgaggtatcaggtgtatcatggtacctcgagaaccacgggaggtattgggtgtatcataatacctcgagaaccacgggtgataccaaataatacgttaatgatactgtaggtgatactttaaggttatggcatgatacctcgaaataccaggtgtatcatgatacctcgaggaccatgggtaataccttgagggtaccaaatggtacctcgagggtaccgtggtgatactttgagaggatcggatgatacctcgagggtatcagatgatactttgtgggtaccagatgtatcataaatattggctcgagga

SEQ ID NO: 36718 - DNA, 646 bp, Oryza sativa
tatagggcgaattcgagctcggtaccctaaaggattgtctcgggatcacaaaatggcctgtcaaaaacttatctacaaacgtatatatctacagagatatatatctgctcgtatataaatacaaacgaattttacctattatttgtacctatgatcatcgatctgaataaaaatataaaatattgaaatatacatattcataaataattcgtgtatttaaatgcttatagcaatttgaatagtttgaaatctgaatcatattttttgaccaaacaatctgaaacacattttagttttattctcttatttactagaacttgtaattttaaaacactacagtaatgttttgtaaaatgtgagacatcttgttttgtaaagtataagaattgaataacgcaattttgacatgtacaattatcgtgggaattagtacttttcttgtgttggctatgaaatttaactacccatcaagtttttttttaaattggggatgggaaacggttgggggttttgggaaaaactctttttttttttttttaaaaaatatattaactatttttctattaaaagaaattatataaataatacttattttgtgtgacatgttttatcattaaaaaaactttaagtacgacttatgctttag

SEQ ID NO: 36719 - DNA, 558 bp, Oryza sativa
tgaactacctcaccgtacgaatgctggtcaacgcaactacaagtcatcagtttcacctatggttgacctatctcaccgtgtagatgatggtcaacgcaactacaagttatcagctttacctgccactaatgaactacctcaccatacggatgctggtcaacgcaactacaagtcatcagtttcacctgtggctgaactacctcaccgtgtagatgatggtcaacgcaactacaagttatcagctttacctgccactaatgaactacctcaccgtacggatgctggtcaacgcaactacaagtcatcagtttcacctgtggctgaactacctcaccgtgtagatgatggccaacgcaactacaagttatcagctttacctgccactaatgaactacctcaccgtatagatgctggtcaacgcaactacaagtcatcagtttcacctatggctgaactacctcaccgtgcagatgatggtcaacgcaactacaagttatcagtttcacctgctgctgaactacctcaccgtgtagatgatggtcaacgcaattacaagtt

SEQ ID NO: 36720 - DNA, 862 bp, Oryza sativa
  unsure (1)..(862): unsure at all n locations
taagggattctctctatgttatatgaaatacctttcacgttatggccctaggaagaaataggggacctcaagcaacagttatatatgtaggtcttttttttttgcatccttagttaagggaaattgattggcagactggggcttattatacatctgaaatcagcaaacaaaaatataatgaagtaatagtggtattatttgggttaatagtttggtgtgaaagtttttttactaatataagatggatggtttttttcttcgaaattactaataaaagatggttgccacttaaataaggtactagatccaatcaatctggtgtttgatatttattcttgctgagcttggtagttttattttcatgtatttttttccctctaagatcgaatgatttgtgctaattgttcgatatatgccataaataatgtgtacatcattacggactaaagaattatcttctgtcatcataaatgcagtaaaagcagattaagtctaacggcgatcaggaatttctcagtttttaaaaaaaatctggggcatgtatgagtagcgtcgagcgagagatttctcggtatccacatcaaactctgggtgcatatattagtcttctctgtgcttttagtttttctatataggttgagaagttgtttgtatcctacttggtcatgtaattcctatgtttggacttcatgtaattcttgggttggactctatgtaattcatgagctgtgggccccaaaaaaaccttatgcgggaactggagatgggcaactcaaaaaaacaggaatactaaagaacggtgtaccgttcttcaacgggatagtctagcatggcatgcttncatccgcataggccgtcacct

SEQ ID NO: 36721 - DNA, 2044 bp, Oryza sativa
acaaacactgtacaacaaacattgcataatctttatgatcttctgcttaggtagtgtatcagatactgaaatatgcttacgcatattctttgttctgctaatgcattataataatactttttatataaaacaatatgttttctcaataaagttatattcatgtgtatgtggccaggtgctattttatacgcttagtgcatgacattgtagcataatggtggcatgtgcatcatcttcaaacggcgcagcgtagtgcgcatttctttctagtatctttggaatggcaagacaaacctatacccttttaggtgctaagctatacataattacttttatgttacttcaaagatgcaattcacaatattttaggttttgaaaattggacatactagagtgcttaggatgcaataacatacaaaaccttcgttagccgcatatgatatataatataattatgttttcagatgggccaaatgacatgcatctgtagctcatctcctgatgaaggtggtcatcccagagcttcagtattgtgcgagctattctgagatacactgccactggagtcgctcaaatgtaagtaattattttaaacagttatgttctacttgtttggttatttgtttaaacaagtactaactgcccattcactttatatttggggctcccatgtaatattatcccacctaccatggcaagaggctgtctcaaatatagcaatgctcacgcttcggccactctttgttttgtggtgggaagataagaccaaggatatgttcttctgtattggcctggggatcaaccaactgatgttctagctattgctagctcaccatgtctaataggcaaacactaaatgattcgtatcgccgattcataatattgagcttctaaaaattatccctacaaaggattgtgcatattcagtcaatggtgcttgccatttctgaaacctgcaggctactttcactaaatggcacaaaatgcccctttgtgttatttgctatagctgcaactgttgtgatcggagatgttttgcgatatagttactacatgtattgattcttccatgctatatatcccagcatggcacatcactctgtaaggatataatgcacctccaacagactgtatgtaatctaagcatgagaacatgcttacttactgagtgcctgaatctaacaggaggtgtacatccttaaatcatagcagtacgtctataagagcctaaatttaaacataaaaccaatcaagctcattacagcttgaaatgagctacttgttctgttgtcccacacaggctaaattgccagctaaatataacactttcagtaagctccaataacatgcgtcttaggctcttttagacacgtctattacacccgcgcggcgtagcgcgcgagacctttctagtgtagtcaaagtgtccaggcatttcaagtttgccatcattcgagttacaagcttctaattatgtacctaatacatttgatattaccttttcaaatcaaatgaacgaagggaaacactcaatcaataaaaactatttggaattaaattttttcttaaaccgtatttgttttgtatgcacagctgaccgcagcgttacgccgcacatccccttctagttggtattaatctagtagtaaatccaatcaccggtccctaaacttgtatacttgtactgttgtgttatctcggtccctaaactcgcaaatcgaccgttcaggttctcaaacttgttcgactgtgtcatctcggtccctaaacttgcagatcacttgtttaggtcctccaacttgttcagttgtgtcaccccggtccctaaacaggacggtctaaaaactttatatcaaaaaataattcataacttttttatgtgaactctaatgaaaataaactttatatcaaaattgtagccctcgacgcgaccgacaactttatagttgaaaagtttttgaattaaaactgtttagggtcccaaaatattgttgcatgtttatagattttgaaattttaattaaattacattttgggacaaaaa

SEQ ID NO: 36722 - DNA, 848 bp, Oryza sativa
aaattcggcccatcgaccctgggggagacaaaatagacttttgcgaaggaatttgatttgaaagcatttggattcggaattgaactcgacgatagatcggggatttgagatcttgagatggcacggacactagacaacaagcaaagaaccaaatttcgcaactagggtttttaagagataattttcccgctaggcgccacgacggaacgggcgctacacaacacgtcatcattaatatatgtcccatttctctctcacacataatccctctataaaaaaaatggggaagcaccggaagtatggtggagtccttggtgcctaactccacccaccagggttcaaatcgcacatgtagatgagcgtgtatcctctaagattgggtttttaggatagacgagtaatttattggacccgtgctcttatattttgaaatggaataatatattttataaaaactgcatatacttcatgtgtcccaaagaaaggcccctttggcatagctctagttcctaactctaatttacccggagccggagctgtgccaaacagttcagatcctccgtttttggaagtggagttagctaagctactcataaaaaataaaatacgggggtggagctaaatttttgctgcggcacagttccactccaatctaaaagacccactaccatttaatttttggggatatttagagtcgaactgcaggcatgcaaccccacctctcacctctctttccctgccataatcctcaccttttccacccggccaggcgcacaggcggcatagtcgacggcttggggtgcgcggtaggccacgggcggcgcacggttggtggggggacggcatgc

SEQ ID NO: 36723 - DNA, 631 bp, Oryza sativa
atatggaatgctaactgatgtaagaaagtacttaaccaccatccacttcaagaataagaatttatctttatcttatgtcaccccatatctgtatctcagtatcctgattttcttatagacattatattgaaccatagagactatatatagtgttgcctgtattatagaaatttataagttgactggcataaaacggtcttattttgagtagcgctggtaactaattatcccatgaaattgtgaatgcacccttaactgttacaagcacttcacttacagctcaattatcacacctcagccacaattacaagctaaattttgataatgttccgtacagtatgatgatgatgaaggtgatagggtgttgctcactacggatactgatcttaccggggctgtgctccatgctaaatcttctggattgaaggtttgtcttttctgtaatcctcaaatagattggtccctctgttttcacattgcgatctttttttgttcattggattatgactattgcttcaccggagtgaaattttcaatttcagtcattgaggttggacactgatgagtcaaaatccagttctgaggtgacaaaacacagttctgaagtaacaaagcacgcttcttgagtgac

SEQ ID NO: 36724 - DNA, 574 bp, Oryza sativa
ctcccaatctactagtaggtctcttgtgagaggtagcagctcatcctcacttctgtgagttctctcttcacctcataattcaaacttacataaacattcttatggctagcaattcaacgcgtattttacttgctctttaacccatataacactggcaaccctcctggaattaccactaatcccaactttaggctggcttatggaaatgtagcctcattatgagaaaaccaactacttgcgccgttaaattttgataaaaactacattgaatttatttttcttccaggagacgaatgattatgtcggcattagccatttattccgatttatgatagattcagctatcctgatgaaacatgatgtggctgataaagaaagaaagaagggaaaaaaaagaaaaaaaaagaaaaggagatcaacgaattattggtagttaaatctaagaaggaagatctaatgttgttttcagggattaaaaaagaggaaaaaatggtcaacacaccattaaagtgaccaaagaagaaatgctggcgagtgctacatagctttcagaacagatagaaataagtggcaa

SEQ ID NO: 36725 - DNA, 632 bp, Oryza sativa
agatgtcatgttgacaaaagacattctagttaaaaggaaatgaaaagggatcactgatattgtttatgtaatgctaatgagactatacagcatctcttttttgaatgtcaagtagccaaaaacatgtggagtgccgtatcttttttgggccaattccctatatgcccatgtaatttcacccaatcccttctacgcccctgaaatttgtttgatctcttatatacccctgagtttttatttggatcccttacatacccattccgttagttgaccattagtttgaccgttagttattgtagaaattactttattgtccttgttatattgttaaaagctagaaatgttttatgtgtaaattatttgagttgtgaaaaccaataaggaataaattactaaatatttgtgatgaatttttgaaaataaaacattatttcattaaaataaaaaaagatttattgtaaaaaaaagttctgcataagatttgaaaattacttttcaacaaatatttagtgaaaaaagattcgttgtgaaaaaacaaaggggatataattagtttatcacaaattagaaaacaaatttaaaatttttaaataaatttcaaatcaaatttgatgaatttcgtatatcttccc

SEQ ID NO: 36726 - DNA, 650 bp, Oryza sativa
aatctattttcttagcacaagagcaattattcacaatatttgtaataatattattcttgtgctgaaaaggaaatcaagccacaggaaataaatgagcggctagatcaaaaggaggaattcagatatttggatcaagaactaaggataggtctaagatcaaaggataggttaacaattaattccaataaaattggaattgctttggtttaggttctagcacaatataggaaggtttcttggaccataattcataataggtaagaagggttttcaaactaaatttaaataaagaaagttttagacgaaagaaggtttttagattaaaaccaaatcaagaaatacctcaagataaatcttaaatgaaaatcataaaagaaattaaataccaaagagaaattttatataagttaggtttaggaggtctctctaatcatattttcctaggtttagaaggatattaagaacataagaatatgcatgatgcaagactagaaaaatagttaattttcaggatgttacaatttaccagatttaatctttcatttaaagtgacccgttttatttcgaggtttatgatttactcattttgataaaaccaaaagagttgatcaagtgtatcaaacaacctcaccaattttggaagatcgaga

SEQ ID NO: 36727 - DNA, 632 bp, Oryza sativa
ttcgtcttatttaaaaacttttgtgaaatatgtaaaactatatgtatacataaaagtatatttaacaataaattaaatggtaggaaaagaattaataattgcttaaattttttgaataaaacgaacggtcaaacatgtttaaaaaagtcaacggcgtcaaacatttagggatggagggagtatcatttaaaggaatgagggcatccagtgctcaggacttaaaacagtttcccatttgaaaatgctatattgcgataaccatgtgatagataacatttttcattgacgcaataagtcatggcagcaacttttctttataaagtcattaaaattctatgggaacgcgacaaccatatactagcgttatgtctttttttaaagtaagcatcttgacttgacgtcaaaaccagtgagttgagcttatcattttgggatgagctaattaactagctaagttgctataccaaagttttcagttcaagcagtgttaatgtgtttggctagcttgctagttaagttgctaatgtgtgtttagcttgctaagtaggcttcgtcagacggcagtagtgtgcaaatgcaagatggctaatatttgtctgacgaaccttcacttgatctccacaactgtagga

SEQ ID NO: 36728 - DNA, 637 bp, Oryza sativa
acttagggagaaactgaacttctttcaaggccgggctgcggacggcagagttcgaggagagtttgcccacgccgtgctcaccaacgaccgacgttcttgactcgccgtcaattccagccattgctgtccaggtgctttattttttttaagacagctaggaaggaaacccgcgcacatgcgcgggcacttatttaatgggtttgaaattttcttatgaatgttttatgggtaacctttttattgaaatgttttctactctattctaaacatgttttttttgtcaatgaattatttttcctaattatccttgcggcatataaattataaactaaaattacatggaactttttggtttttaatttatgagaaaatattgtgtcgtaataacctactcccttgagttttaaaattattgacgtcttaagctttgacattaaagttgccagttcttgacgttctaaacttagcctacttataagccattaaagagcatgtgctgcatgcatgttttctcattgctacagcacagctgctttgcctttctctattcgtgcttgcctgcttgcattctcgagtgttttctttttttttttgaatatttggcataccttgatatttttagtttctaaactaacat

SEQ ID NO: 36729 - DNA, 1284 bp, Oryza sativa
accaaatcctagtcaataccttgctagtcaaattccactcgtcttccaagctccatatcagctacaatattacctatataccactttccataatcttcctcacccccaccatatattctccacctacctacaacatatacataaattatagagccgagctgaaatgctatcctatttcagtatcgactcgagaacaactaaaccttagtttccatacgacctaaacctagctaccaccaaccaataccagtcacataccctcttaaccaataccattatccaaactagttacttctcatcctcctactaatcaaacccacacatgaaatataagcgacagtagttgcttaatcccctctagcctccaaccctttagaacctacacataaaatatcagcccagtaatccatataccctataaaagagataggctataccctaaaccctagccctcctaaccgtttatctctttctttctattttatagcttttattgaatttggttcttcttcttcttcagtagagtctattatatttggatggcagcctgtggtatttcgagcatcggataatcaagttgcctatctcggatttatttgcgttggagcaaggcaagttattattcctcccctttgagcataattatgctatattctatatctccattatctcatgcattagtcattcatgattttgaatgcataacctgaacatatagcaaaccagatatgctagcttttgcttagccctacctagttagactgtataaaatataatgaacttagattggaacagtatggtagaattggttgatttccgggtggctagtactgttccaaccgacataagactgcccaaatacttgtgaagaacaaacgagtacgaccacagttctaggatggggacagtggttctttttaagtcctcgcgcaggaggaaaacttatgccgagcagggcaattgtgatatttaccgaggcgcaagtaaatatttgtttgagataaattatgatgtcatatgacttgtttgtaaaccctaattgcgatgacatggtgtcatacaatcagtcctctctaaataccccgggaacgccagaactcctatcgctgctgataacgttacgttcagagcatatggggactagagttcatggaacaggtgccactattgttagtaacctaatgctgggctatgactaaagctgatgattatcgacaagtcgtgggccgtgggtaaagcgtacatttactacagtaaagtataaatgaatctattcgaatagcc

SEQ ID NO: 36730 - DNA, 558 bp, Oryza sativa
aaacaatccagcttatgttaatttggtactcaatacaggtctttaattgttcattcaattaatagaaatacagtggttgaaaccaattataaattgcatgtacaattaaaagttgtggtaaaagaatcaaatcatcaataccacataaaatcctcgtatgcatgccattaaatctttaatatcttaaaattaaatatttttaaagtcattaatagttaaatttataaaagtttgaccacaacattgttcaaaacgtcaagaattatggaaccgaaggtagtaaactttattgttgaacattgtaaagcaaattttgatagagtcatatgatatatatatatatatatatatatatatatatagtaaatttgtttggtgctccatggtgcccgggcaccattgttgaaattgagtatatacctaattcaaatgagtatgaaactttttcaattacttagatattaacattagctactttactaactagttcaaagcaagtttgaactgaatttgaacttgtttttgttagattttgattctaggtatatagcatccata

SEQ ID NO: 36731 - DNA, 524 bp, Oryza sativa
ctagccaaacacattaacactgcttgaactgaaaactttggtatagcaacttagctagttaattagctcatcccaaaatgataagctcaactcactggttttgacgtcaagtcaagatgcttactttaaaaaaagacataacgctagtatatggttgtcgcgttcccatagaattttaatgactttataaagaaaagttgctgccatgacttattgcgtcaatgaaaaatgttatctatcacatggttatcgcaatatagcattttcaaatgggaaactgttttaagtcctgagcactggatgccctcattcctttaaatgatactccctccatccctaaatgtttgacgccgttgacttttttaaacatgtttgaccgttcgttttattcaaaaaatttaagcaattattaattcttttcctaccatttaatttattgttaaatatacttttatgtatacatatagttttacatatttcacaaaagtttttaaataagacgaacggtcaaacatattttaaaa

SEQ ID NO: 36732 - DNA, 1331 bp, Oryza sativa
tgatacctcaagaaatcatctggtgcgctcgagataccatgatacatctggtaccgtcgaggtatcatccagtaccctcaaagtatcacctacggtatcctcaaggtatcacccgtggtcctcgatgtatcatgatacacctggtacctcaaggtatcatctggtacgttggaggtaccatgatacatctagtatcctcgaggtttcatccggtaccctcaaagtatcacctatagtgttctcaacgtatcactggtcctcaagttatacatagggaatttctaggtattaggtttgttacagtgattcatttagtctctatgctctggaaagagatctcaagtgacttaaataaaaaaaatataatttcaaagaaaggaaaagaatagtcaaaaggaaaaaaaataggtatgattgggccgtggcccaagacatgacagcgcaacagcactactgggctagctggcctaccacgtacggatgtgcaagtgtaggagttaggtggtgtttggatcagggacttaactttagtccctgtctttagacactaatttagagtattaaatatagactacttacaaaactaattacataaatgaaagctaattcacgagacaaattttttaagcctaattaatccataattagagaatgtttactgtagcatcatataggctaatcatggattagttaggctcaatagattcgtctcgtgaattagtccaagattatggatgggttttattaatagtctacgtttaatatttataattaatattcaaacatccgatgtgatagggacttaaaagttttagtcccatctaaacagggccttagtctagtctagctggccacgtaccgatgtgtgtatgtataggagtcttcaccaaaggtgacggcctatgcggatggaagcatgccatgctagactatcccgttgaagaacggtacaccgttctttagtatttctgtttttttgagttgtccatctccagttcccgcataaggtttttttggggcccacagctcatgaattacatagagtccaacccaagaattacatggagtccaaacataggaattacatgaccaagtaggatacaaacaacttctcaacctatatagaaaaactaaaagcacagagaagactaatatatgcacccagagtttgatgtggataccgagaaatctctcgctcgacgctactcatacatgcacccagattttttttaaaaactgagaaattcctgatcgccgttagacttaatctgcttttactgcatttatgatgacagaagataattctttagtccgtaatgatgtacacatta

SEQ ID NO: 36733 - DNA, 517 bp, Oryza sativa
caggcgaaaaggacacttcaaatgccaggaggtccaagttgaagtcagtcaaaaccctccgcattgagactggcagaagcaaggaaagaattactcctttgagttacagctatcagaaagaagaaaaccaaaatgagaatcctatatgttctcagaactgtgggatagaatgtgaagcctgcatggttttgtttaataattcttatgtcggagaagctgaagaaaaggaaaagatgaatatcttggacagaattatgatggaggagaatcaggaacagacaaatcatcttcaatccaaagaatttgtgcattatgttgcccctctgaatttggactatgaaacattttcagataatgaaaactgcgtgctgagtgttgctaaggagacagagcataatgatttcaactctgtgaattgtatctcacaagattcagtttgtgaaaatccacagaagatatcagaattattgcattttgtttcccctctggttttcaaaggcgatgacttcactgacag

SEQ ID NO: 36734 - DNA, 702 bp, Oryza sativa
taacattacaggtaaatcacttatccaatcaacaattggaatatatcattatattcgatgaaaacaaatttttatagcaatgggttatacgacaatgacctgacgaaaaaatatatattgaaattaattgtattgcatatttaaattaattggatcatatatatatatattacttttagatctgcttgaacctactccttatacatacataatatttcgagtttctacttgatggatatagtttgtgcatacatacacaaatgatttattgacttacttcattcaatgatgatgagatccctattctagggtaacacgaatgaattatgaataatttcttaagaaatacatatagatagaaactttctactttcaagctctcatattatgtggtcgcaaagaatgaaaaagttacaaattctcaatagggccccactattcttctaacttattatacacttacgtgatatccccacatgattttccctctccatacgaactgtttgctcatcgataatgccgaagaatgacatatgcgcttatcgcatccacctccgaagatcttcgcaccttggctcagcctcgcattggagatcaagcagcgctcatatagggacaaagacaacatgcatggcaaggccccaccttctacgtgggagagagcccccgctaggatcctagagagagaagatggcggagaga

SEQ ID NO: 36735 - DNA, 712 bp, Oryza sativa
agtggcagaggcttacatcaacacctctatcggaaggtattgtacaggcttttggagattgtgcatgtaatgtatctgtgggggatgatctaaataaatggagcggtcacatgacgatatcttaaccgtcactgcatgtctaaagtgctcatgttttctgatatcatccaaacatattatctgccggcctatattaccgataaacataatgacatgactctggactatgggagaagacgtcatgtggacaaaagacattctaattgaatggaaatgaatgcggcacactgatatagtgaatgaaatgctgatcagactatacagccactatccttacaccgaaccgcatgcacaatcagtgcggagtgcctcatctattctcagccacttacttatacgcccatggaatatcacccaatcctttctacgcccatgagatacggtcgaactcttatataccattgggtgggcataagtatccataacatacccattccgttcgttgaccattagcaagaccgccagatattgatgcaatgactttattgaccttgcaatattgttaacagcatgcaaatgttttatgcagaagaaaatatggttgtgacaaccaatgaggactttattactaaacatctgtgatgatttgatggaaatcagacattatactatgagagcaggaaaagaactattgtcaaaatgagttgtgctt

SEQ ID NO: 36736 - DNA, 1264 bp, Oryza sativa
aaagtgattgctgtcattccaagaaatcaggacttgctggggatcaagagtgattgccttcttgaactcaagcagtgagagcttatctgtctcgtttccatacaacgaactgcaaatgatttggactgcactgcacaccataagcagcaactgaaacagtccaattatagtgatcttcatggccagctctttggtcgaatagtgctaggtcttggttatatcatatatgcagacagagaaagagaaagggggtcaacacatgtctggcaagtgttctttttgaaagaacattcaagagcctaaagtttcaatagagaaggtgttttaagaaagttagggaatgttggtaaatggacaaatgtgaagtaccataaagcttttatttttctttacctcgtttcgtcagaaagattccacaacatgaaagctgcttgctgctataggttgatgaatgcaactgtccttcagacttcagaatcagagttgagaagtagcttcagaaacatacagttagcagatatacttattcagaaacatacagttatgatttttctttcttttggtttttttactacgcatatattttttatactagttaatgaatgatgaatctgactcccgcagtttcgtaaaaacaaaaagaaaagaaatatgatcaccagtcattgaaaagaagggctctagtgtcaaagacttgaaagaggggatgcaagccataagctagcaaaacaagttctaggtaacaaagaaacaataatttcttatcatctaacagtatctttctaatcatatgtgtactatctcaatttcatattataagtcgttttaactttctttttaaatcaaactactttagctttgaccaaatttgcagaaaaatatagcaatattttcaccataaaccaaagaaactatcaaaatatattcaatgttagatttaataaaactaatttggtgctataaatgttagctatatttttctataaacttgatcaaactttcaagaagtttgactttaaaaaaaatcaaagcaacatgagagggggggggtattaaatatgcataaaattcatgaacagaaacaagcctgtagatacatggagacccatcccacaaaagcccccaaagcagtcaattaatagatgaacataaacaaattaaattaaaagatcaatcgacattcattcaagaaggttatttccagcgagaagagtagccttcagcctgcagtctagtggccatcagcaatcagctgcctcatttt

SEQ ID NO: 36737 - DNA, 582 bp, Oryza sativa
gctggtcttactcttatggatcaaaatcatacaagtataatgtatgcaatgacctacctagccgtggagactagtcacctgaaaacttcacatagatgctggattacccaacatgcacccatcactaatgatgagtcttattagtgtcattgcaattaacgactgccacctatagagatgcacaccctttttatttaggataattagagccatgccactgctgtacattaaaaatataccaccactatttacattatctgtggagtaccattataaattaataaaataggaactatgccactctggcactctttatgtcctacccatcctctctccgagacgacgtgaggctacgcgctcggtgatgacatcgtgacatcgcagacagcggacacggcatcgacagcgagaccccgacgagtcgctgcgccgtgaagtccaggatctgagccagcgccgcgctagctgcaactccgcgcgtaccgcatcaggtcggggaacggcgctgacacggaggacaccgatgccggtctcatgctgcggaaaacggagcacggcatgagagactcggcgggggggggg

SEQ ID NO: 36738 - DNA, 737 bp, Oryza sativa
gcggccgctttagaactagtggtttctctgatgagtaaacagttttaatggagaggtaaaatcatgtggtgatatcatgtatgtgtataataatttagatataatttggggtcctattgaaaatttgtaactttttctttctttgcgaactcaaaatatgctaacttgtaagtagaaagtttctatctatataaatttcttaagatatttttcataattcattcgtgttaccctcgaatagggatcacaacattattaaaaaaagttattcaaaaaatcatttgtataattatgaacaaactaaaaacaacaagagaaactcaaaatattatgaatgtataataagtaatttaaatcaaatctaaaagtaatatatatatatatgattcaattaatttaaatatacaataaaattaattacaatatatattttttcatcagaacattatcgtataacatattgttataaaaatttatttacaacgaatataatgatatattccaattgttgattggatatgtgatttaaatgaaattttatttgaagcttacttattaggaatcttttatttatactgttgcatgcttgcatactttgacgtgggaaagagatacattgctatatttttaccatctattggtataatagttggttttcattaagggtgtgtttagttctttgggtataaagtttttgaagtacacagacacacatttgaagtattaaacgtagacta

SEQ ID NO: 36739 - DNA, 2057 bp, Oryza sativa
tgctctcaaatgtgtcattattgtagtactagtactacctgtgctgctacactttcatctcaagaagaaaaggagaagggagaagaaaaaaaaatgttgttaccgcagctgtaacttgtatactgataaatacttcctgtctttgaccgggcagagagtactgccacggtctgctgctactgtgtaagggtattcctaactcaataactagatggtgtccatagtattaaataagttgttatctatgataaaaaataatgtggcaagtgaataaataagaaaaaaagaagaaaatcatgtgttgcatctacacaacatccaagacattatgtgagataagtaacattaaattaaagtaggaatagtggtgtttgcattggaagagtaatgtctagtactagtttttttgatgatgtggagttcatagaaaccatgtctagtgttatgggttgggactgccctaacgtactactacttaattccactaaacaaccaccattacttatgctaatctatacttgctggatttggatgggattttgcattccataagcataatgatgctaatcactgcctcagctcagctcagatggtggatctctgtattactgcaggtttgtagagcatgggtagagtaggggcctgtttagattcatttggaatggcaaaagttttggtggcaaaaattttggcattgcaaaagtactggttggtgtttagatgcatgttaaagttttgtcattctagtactaaagtgagagagaaaaagagagagggagtggtctcaaagcattttttggtacaatttgctagcaaataccaaatgccaaattgccaacttttactactaatgtttagatctaaaatggcaaaaagtgctataaaataacaaaacttttgctattttagaggatctaaacagggtctagatttgtttagtgaacacaggctgcgttgcacctggggtcctggggaggctctggcctctgggcgtttcggatttaattttctttgtttcttccgatacggtggggcccacctgcagcgcgtcgggaccgaggagatcccatcgtctcgtattcggaagtattcgtatggatcggagtaccctggagcttgcacacacaggtttgaaaatgtattacgtcctccatcgaaatatagaagtagtactccatcaatctaatatggaacttaacacattattttactatattaaggccgagtttagttccaaagtttttttttaaactttcaacttttccatcacatcaaaactttcctacacacacaaacttccaacttttctgtcacatcattccaatttcaataaaacttctaatttaaacgtgaactaaccacaccctaaatccggtactagatcgttatgctatgagacaaaggcaatactagtatggtttggaaataaaatgaaaattttcaaaaaggtcaaattttggccctctagctctaaactctcactccagtgggagcgggctcctatgagagttggggacaagctaaaaagtgtttgtctagcattcagctctagatctaaatagaaaaaaaaaagggaaaaaaagcaatccccaatctgaagccctaggttgccgtctccgtgtgtgctaccggctgtcggccgcgcgccatcgcccgccactggacacctcccatgcgccatccccacgtgcgccgtcggtcaccgcccgcatgccgtccccccaccaaccgtgcgccgcccgtggcctaccgcgcaccccaagccgtcgactatgccgcctgtgcgcctggccgggtgggagaggtgaggattatgggagggaaagagaggtgagaggtggggtagttcggtggcatttttatgtaaatatgttgaaaaattaaatggtagtgggtcttttagattggagtggaactgtgccgcagcaaaaatttagctccacccccgtattttattttttatgagtagcttagctaactccacttccaaaaacggaggatctgaactgtttggcacagctccggctccgggtaaattagagttaggaactagagct

SEQ ID NO: 36740 - DNA, 687 bp, Oryza sativa
agttttggaatctggttggtggatttaaggatgttatgtctgaagaagatttcataggcatgtatcaaatactccctttgctttctttaatatttaacaccattaacttttcgatatacatttgagtaaagttatgtagttatcatttattttattgtgacttattttgttgttaaagttattttaaacatgacttattatatatatatatatatatatatatatatatttgcacaaaatttaataagataaattattaaatatatatttaaaagtcaactgcgctaaatattaaaaataaatgaggaagtatgtcctttgaactctgttgctgtgggcgaatctcatcatttttctttatttgagcattgtgatgcactgatgcagaagccgttataggtactatcaaatgcactagtggctaacaaatgcatgaaagctacagagaattgtgataaacatcagcccaggaaagatagtacagataatatctcacatccagcacatggcaaattatggagaaatcgattggccgtttgaagatcattttcaggagatgacgtcaatgatgatattttcattttcattgtcacgctgatcctctctgctcgcatgcaagtcaaagccagggaaagaactgcacaagtcagtggctgctaacccagtatgatgcccttcattgtcaaa

SEQ ID NO: 36741 - DNA, 848 bp, Oryza sativa
aggaatctccagttgccatgaaggaaatcttttctgagggtttacattcagtgctaaacattggactttgctgcaccaagcagtccccgtacgagcgcatggacatgcgagaagtggctgcaaagctacatggaacaaggaggcatatctctgaggcaactaggtaatataatgtaagatatgtaccctgcctatagctgtgagatactctgctaccttctcgcatggcatgtttaatattgtcactctctcttatataatgaaatcacaactcttgttattgctgtaataatccgacactacatttggtttggaatcttacacaattacactgcagatacatggtattgttggaaactctgcactgttatcatattcttttcttttagagtaattgataccaatattcagccctcatgctttttgctgttgatggagataaggactggtcagctttatattcacagaacattgaaaattttcttgttagttccttaatttgtcaacaatggaactttcttctcagctactagctgatttgggtgatgactgccatctgcgttgaattttgtactcagctgttttttttcccctgtgaatggactgggaaattgggtctctcgaacgaaaccttatttggtttgatgttgtgtttcataatcaatttgattatatttaatggatcgaattatatataacacatgtcacatgtggtacttttctgggttacaacttacaatgctttgagattgctcatggcataaaagaaaaatacaagggcctgcttggaagccagctggtatttgacccgaaactggtactccctccatccctaaatgtttgacgcc

SEQ ID NO: 36742 - DNA, 564 bp, Oryza sativa
aaataaactcaaacggacgaaatatgtggcatgtggaattttccaaagctccaccgaaaaacttctttcctcgaaaacacaatcttgcaagcggaatttggaggttttaatatcgtcgaacccggcaaagcgggggagaatcggatgtaactttttctatagatgtccgtgcatatattatttgcctgattccgagtccgtatgagaaagttatgcctattttaatagatggcatattttgtccgtttcggtagagttttggaaaattctacatgtcacatattttgtctgtttgagtttattttttatacagttggttcctatgttctcctaagtgtgaaaaaaatatcaaaaaaatgaaataaaaataaaaaattgcatctctacgtactgtttaacttatatatgtcatttcatatggttatattttgaattagattaagtaatttcatatagtggtagagtgcattatgtttaacatgctgatcaaagggttttactaaaggagttatggtctaattttagtgaaggtgcaaagtagactaagtggtatgctagatattt

SEQ ID NO: 36743 - DNA, 521 bp, Oryza sativa
tcctcctgccaccgtggcgcacgcgaaccgacgtggcaggaggaggctggcgccgccccaaggaggagggcgccagcatggctggcagccgccgcctccattcctgtttctctgtatggagttgcaacggtgtcatttttattttattttttcggatgttttttcacactcaggatcacgatacaaccaaccacaaaaaaaatttaaactcgaactaccacttagctaagtttgaaaatatctagcataccacttagtctactttgcaccttcactaaaattagaccataactcctttagtaaaaccctttgatcagcatgttaaacataatgcactctaccactatatgaaattacttaatctaattcaaaatataaccatatgaaatgacatatataagttaaacagtacgtagagatgcaattttttatttttatttcatttttttgatatttttttcacacttaggagaacataggaaccaaccgtataaaaaataaactcaaacagacaaaatatg

SEQ ID NO: 36744 - DNA, 503 bp, Oryza sativa
  unsure (1)..(503): unsure at all n locations
cccgcgaattttcggagcccaagtaacattatcaatacaaagttcatttaatcaattaaaataaaaagaaaaccaatttaaattccccttctttcccttgggccggtttcggcccaagtctgctttgcctccccgcggcctgggcgccctccctctctctaaggccggccgccccgtcccttctcccctcgggcctccggcccagatcgcctccctctcgaagttttttttgcgtcccccaaccgacctcctctctctccctctggccgacaggtgggacccgagaccccacctgtcagctcttcctcctacctccggccaaccgccatggctgccgttgccgcccacgattgccgccgaatccggccaccttctccactccgcacgcccgcacccggccgtgggactctgccgccccacgtnctcctcattcccccacctctcccgcaaaatccggccgccactttcccacgtcggcgccacctccatccatcggccattgc

SEQ ID NO: 36745 - DNA, 507 bp, Oryza sativa
ctaccgaaacggacaaaatatgccatctattaaaataggcataactttctcatacggactcggaatcaggcaaataatatatgcacggacatctatagaaaaagttacatccgattctcccccgctttgccgggttcgacgatattaaaacctccaaattccgcttgcaagattgtgttttcgaggaaagaagtttttcggtggagctttggaaaattccacatgccacatatttcgtccgtttgagtttattttttacatggttggttcctgtgaggtcctaagtgtgaaaaaaatatcaacaaaataaaataaaaataaaaaagttgcacatctctctcctctgcactagttcggaaagagaggagaggagaggaaaaattatacatgtcacatattacgtccatttaagttcaatttttctatggttggttcttgtgtgtccctaagcgtgaaaaaaatatcaaacaaataaaacaaaaataaaaaatttcggggggggggggg

SEQ ID NO: 36746 - DNA, 611 bp, Oryza sativa
tgacataatctgcagataatggagggaaaaaggttatcactgaattcaggggacaaattaatcaaataatcacagttaaaacaactacattgattttcaatcatgatttaaaaagttcaagatatttggaaggaatcaaaagggcccataatacttaaatcccctcggctaatatctcttattttcagttaacttcagctgacaaaaacatgtcaaataaacaataaataaaattccacatccagtgtgcaggattaatacaatctacgggagttacattgaatgtgacaacagaagtctgcatcaatcgtacctgcatggcatatgatgagggcatgaactccacctttgctcgcaagcaactcctcaatctcaagggcatgttgtaagcaaaagatccgaggccgtgcaaatgcacagcctgtattccagctgatagtttcctcactaccttcgacatctggtacattaacatcacctctgcctgattgtttactcaactctgagccagggcaatcacttggtattttcttctcaggggtttctgtgtcaccgtaaggatgaatggtattttcactgcttcaagaacaggaagtgccaatatgtttccc

SEQ ID NO: 36747 - DNA, 602 bp, Oryza sativa
ttttgttaaattttattcatatttttctcaatctaaattaaatatgtcaaacatctatcaaatttaaagtccattttatcaaactaaagtcaaatttaacaaaaacaatttttgacaaaaatatgccaaatttgatgaaaatctgacaaatctaagtcaaacttatcacaaatcagtgaaacctacgctaagtgcattcattcatttgtatcaggggtcaccgatatggccgaaattatttgaatttttgaacaaaattttatcaaatttgaataaatagtaccaaatgagaaccaaaatttctgaaattttgttatggaattttgaaccctgccctcaaccactgatagcaaaatatttttttattagaagcagaattcataaatcaatagttggtcacttgtactaatgataatacaataatagtgtattacgagtagagagtctagagagtagagaccactgtaaaaggatcccggtacagaaggccaataaccattcacattttagagcttggcacagtcatagtccggcattttcagaagctttttcaccagcgcttcggccaaccaattgtcacgcagaaagctgatgaccgcatt

SEQ ID NO: 36748 - DNA, 663 bp, Oryza sativa
atttgcgtgttcattggtgagtttgtagtgaatattgaagaaatctgttgatcaaaagattttatgtttatgttgtaaaatggaaataaaaaaatgtgttctatttctttactattattttaataaaaacaagtgaacgaggtggttttttaaaatgcgaatactaagatttgaaaaacgtgtcttgcatactagtatgttctataagggactctcattgtaatgaagtattgatagggactctaatcaggcctcctataaatcgttattgatttgtcaaaatatctctggaaaagaattactactacctgccggcgatcacaacaccgatttggacaggttttattgtttgagcacgacgcgaaatctaacaaaagctgctccacacgaacactgcttgtagaaaatgacgataaattcacaggctcacagtgcagtggcccatctctttggacggagagggccaccggagacaggaaggcagaaagaaaaaatggcgataggatggcataggtcacagagcctggcgtctgcagggctcgggctgcacgtcctcctctgctcgtcgttgctgctcaacgccgtcttcatcgcgcaccaattcctcggggcctcaccgccggcaacgccggagcggatcggcgacgggctgagctgggcact

SEQ ID NO: 36749 - DNA, 1464 bp, Oryza sativa
  unsure (1)..(1464): unsure at all n locations
tttgcctaatttgttcgacttcttcaatggcttgggcatcttgagcatcagtcccagaaatgatcttcaggaacttggttaggtcagcaacatatcttgatatgccgatttgagccttgctttttgctattnacaaattttgggagatcggctagttttttgtgctccatatccaattcagcattgcattcttcaagctgtgccaagagaatattggatttgatcttgcgggcttcaagccgatcgatattggatttgatcggaccttcggatagttgatcgagtttgactttttcttcatgcacaagctgccgattgacttggattgtggcttcaatctccttgcgctcacggcgttcggctaatcttagcttggctttttctagtttaaattgatgttgctcaagataagtggctagagttaggacacccgccagttcttcaggaattagagcttgaacttcgtgcaatcgtgtcctaatcgatccatagtcgaccactaagctatccagagaagaggcctctagccgacgcgagatatcttccagtgttttctttgcatcatcagataagggagctagagctttgcttgaagtatctttttctgcctcatcaagataatctttgatatcaaaagaaaagagatcggctagaacttgcaggtataagttcagaaagtttgagagctaagtcaatatagtcgatctaaattcttgcattaaaggaaagcttactgggatagcaggagcagccggttgttcttcttccacaatatgatgactccccacggccgatggagttcagtcactcaatgattgttgtacaggagaagaaggaggaggaggaggctgtaaaaagacaagtgttagacaaaatcggctgaaatcaactagtaaaattgagagtgtcttactggtggagctggtttgagaattggtgctgccgatttcttctttatagcagttttcttcttctgcaactacaaaacctatgagtagtcagctgaaaaataatgattataaaagggtttgcaaggaaagatgttttactctgaagaagtgagtgggggcagaaggagttgaaggtatctgcttaggcgaagccgatggtgttttttcagtatcacttgcttcggctgtagcctgatcaacatcatcctcaatatcttcttcatccagagcatgttcaatggatggatccaaagcaggcaggtcgtcggttggcttggttttcttagatttggccttttttctttggaactagagtcaaggtgttcatagccgatgatctagtttttcttttcttggttacatcggttggttccctaatggcgccttggaggagggttgagaccttgggggagacaattcgcctccattaggaatcagacctgggcatattcaatgtttctaccactattgctctgatgtggaggggaggactttgttgtctgcaaaacaggaa

SEQ ID NO: 36750 - DNA, 517 bp, Oryza sativa
ctggatgctcttctgtcacttctagaaacatcagaaaataccacaattcatcgagtcacagctggtgctattgctaatttggcaatgaatggtaatgcctattccaacctctcatgagatttattttccacatttggtcaaaaggggctattatttcattgtatagttggctcactgctgataatattgcagcatggaagtagttgttaaccggtgtgttctatagtctttcactaaatgtcttccgcacatgccaaatggcccagtcattgactgaaggaaaattccccaataggtttccagcatgagatattctttttacatatttgaactatatctatattattagtcaaatttatattgcgatatttataaaatgaacaggcaataacttgagtattaagttagatccttgtaagtgcaggatcaaaccagggactaataatgaacaaaggaggagctcgattattagcaaatattgcgtcgaaaactaatgatccccaaactctgcggatgg

SEQ ID NO: 36751 - DNA, 588 bp, Oryza sativa
agtaaatggattttttttcccttttcttgaatgaagccctaacatcatagagaaagtagggttagatggtaactttgattttgaaaaaggggtcaaatgagcaaattagaataagtagagtctgattggtagttatgcttcaaaacagagccaaatgagcaattatccataaaaaatatggacggtccaaactagaaactattctaaactcttgagggatatcatcttgttgtttgcatgtcatctaaatagttataaaataaaataaaaaaaaatcaacatgatagattaaaatgtgataaacaaatccataaacatgcaagatcaaatttaacttctacaagttacaacgaaaaaagtaaatttgattatagatatacattaactagctataatttaatttatatctcatcaagagtttagaatccaatcccacgatccaaatacatcgttgtttgtacttacatgtgggttgcatgaacaaatgatggaactgatttttgtgatacagttggcacaaaacacaaatgagggttagctatgttatacggacactcccatacggatacagacacgaatatggtacat

SEQ ID NO: 36752 - DNA, 652 bp, Oryza sativa
ttctccaggttctattctcaacaactgaagttatttgttttgtacatgtatcattatttcttattgatcgacattattcttttttggcatggaatggtggaattgttttaactttcttattagctaggattcttcaaactgtctcgattaatgcaggaagccaggaacagtcatatttatatgctaaggcttatatgattatcgtgccacattgtcacaatcatttttgaacagattatgtaagacatagcaccagtttttgtatttaatacatgacatcaaataggtcatgtataacaatatgtgtttgaacactttcactcactttaatattatccatccatagttccaggtagtttgccatgttaaacgtggacgacaaagataaaggcatttttctatcgtgctagataaattgcataaaaaactgcacaaatgggatgaagtgttatagttcatggtgtactgcaaattgaaccaaagtgcaccatggttcatttaatgcttaagcttctatgtccatattttttttctcaattatataaaaatatttgaatattcattagtggtcccttattgttgcagtatgtttttccatactaatgcatacatgtttattttgtttatacctttacttacaatatgtgcaaga

SEQ ID NO: 36753 - DNA, 715 bp, Oryza sativa
tcgatgtcagggtctgttatatgtactgtagatcatttttttttttatggtttctaaggaaacctaattttccccgtctaagatctggcaccttgtgtttcggaaagataatttccttctttctttgtcatatttcccgtatctcccatattctggtttaaggacatataacaggacacgggtttaaggagaccttatctttcccgagtaagattctggcccttctatttcggaaagataattccttctttctttgtcatatttccttaactaaaggatactttctcttataatatcaggtatatagtattatcgtatgccacgaacatgtgtataggaggtatgccttatccttgacactgatagatgggacaactcatcaggggaggaagacgatagacgggatggcacatcggttgaggaagacggctgacgggatagcatatcggggggaggaacatgatggatggaacgcagagctcgagcttgtcacctcccttgtcaccgcccctttcccttgcctccctcctctcatcctctgccgtgaaccgccttcctcactagctgccagctcgttgaccctgcttcaactccagatgggaaggcgagaaggtgtcgagtaaatcagtggtggtggtggcggcggtcgtgatcaagtgcttgtgcaggatgggagggggtggcaacagttacatcatcgtcgtgggggcatggg

SEQ ID NO: 36754 - DNA, 583 bp, Oryza sativa
cgtttgtcaggttgctgtacgcgtcggcggtgggctggaccgtccggctgctgcccgccccctccatctcctcctcgtagtcgtcaccgccgacctctccgaccacgccgagtaccagttcgagaccagatcgacaacgacgacagttcccgagtgctcggagccccatgaagatcttggcggcgatggcccgccgccgccgctcccgcctcttgttgttctccctctccttccacgtcggcttcctccccgccgccgcggccgccgccccggacgtcatacccaccacctccgttcttccctcacctggtctcctctcctctcctctctccacttggtgaggccgatggcgaggccgccgccgccgcttcagctcccgcggtcgccgccgctctggcccccgaccgccgccactccagcttcagtcgcccgtgctccctgcggccagccgaaggggagagaagagagagaaagaaagagagaagggaggaagaggggaggaagaagaaaggcagagagaggatgacatgtggggtccacatgtcagtgagccccacaattttttgtgtgtgaatgactaatg

SEQ ID NO: 36755 - DNA, 613 bp, Oryza sativa
ggtggggtgaatggaagttgcatctatttcatcaatcggccacaatgtacatgacagatctattccctgacatcataccccaggtaaactttgtcatcactaaatttcataacggttagctaattcattacttgactaatcttttgttcctgttttgcagacaacaaagtcctcccctccacatcagagcaatagtggtagaaacattgaatatgccccaggtctgattcctaatggaggcgaattgtctcccccaaggtctcaaccctcctccaaggcgccattagggaaccaaccgatgtaaccaagaaaagaaaaactagatcatcggctatgaacaccttgactctagttccaaagaaaaaaggccaaatctaagaaaaccaagccaaccgacgacctgcctgctttggatccatccattgaacatgctctggatgaagaagatattgaggatgatgttgatcaggctacagccgaagcaagtgatactgaaaaaacaccatcggcttcgcctaagcagataccttcaactccttctgcccccactcacttcttcagagtaaaacatctttccttgcaaacccttttataatcattatttttcagctga

SEQ ID NO: 36756 - DNA, 689 bp, Oryza sativa
cccaactcctaggctattcctttggtttgtttattcctccgtttacctagaacaaaaaaacaaaattagacgttgaattcaaagaatgttaaaaccaatgtttcttttgtttagtgaatttcaaaacgacaagctctcccatcctattcctaagatagtatactagtacaatctttctaaaggaaataaggaaaaaaaatgaaaggacatctgaatctgacggccataaatacatttgccgcacatgtatgctgacaaaaaggaggcagctttaaaaaagggaaaacaagtgtaaattttgcacttaaatttgttggctacggcatatgtatgttcagttctttttcaaaaattggttctaataatagttgaacttataatgggatttgtgcagaaatgtgccattgggagcgccaactatatgatgaggagaggagactgcgtggtttgggcgctgagacaattggtatttatttgattcgcataattattgtgttcaacacattcatcggcaaaagggttattgacaaagcatcacatgaaaaatttgaactacatatcaccaacgaaataagttactatataatcacagtagcaaacttctttttttctggatgcttatttccaggttttgtttaatagtatgttttcttctttgttttgccacacactgaaaattgtgaaatacg

SEQ ID NO: 36757 - DNA, 573 bp, Oryza sativa
gcggtgacaacaaggacggtttcagcggtcttgcttccctttttttttaagaaaaaaataacagttgttaacccaaagttaaaccaatcattgtcacactataaaacaatatagctttcctaaccgtttttcaatcaggtttagtatttagttctcccttgttccctacgagagaggatttggcttcctttaatggcaaaacatataaagtatggcgttattaatgaatctcctctttatcactttttgtgcagaaaaaaaaaattatagagatgaacatggacaactgcttgtacggtgaatccatcaaacataaaacatgtaactaagctacagtgaaaccatcaaactaaattctagggagtatttcatacaaaacataaagtgaaatgtggactagttagaaatagttgtactatatgactggtgttactctctagtttgtatccaataaaagatatcacaatgccattaaatagtgatgaatatactataaggtggtattttgttaatctaaacgaaatgaggaagggatcaaaattttagtctctgatcctaaagtgcacatattta

SEQ ID NO: 36758 - DNA, 541 bp, Oryza sativa
attctacatgtcacatattttgtctgtttgagtttattttttatacagttggttcctatgttctcctaagtgtgaaaaaaatatcaaaaaaatgaaataaaaataaaaaattgcatctctacgtactgtttaacttatatatgtcatttcatatggttatattttgaattagattaagtaatttcatatagtggtagagtgcattatgtttaacatgctgatcaaagggttttactaaaggagttatggtctaattttagtgaaggtgcaaagtagactaagtggtatgctagatattttcaaacttagctaagtggtagttcgagtttaaattttttttgtggttggttgtatcgcgatcctgagtgtgaaaaaacatccgaaaaaataaaataaaaatgacaccgttgcaactccatacagagaaacaggaatggaggcggcggcgccagccatgctggcgccctacttcttggggcggagccagcctcctcctgccacgtaggttcgcgtgcgccacggtggcaggaggacggcgcca

SEQ ID NO: 36759 - DNA, 537 bp, Oryza sativa
atcaaaatacccttgatgacattcaaccatatccattcattagctcccaaccctatctctctatgttaggtgaggcagtgacgacgcacacgtagagggatggcacagtggtgccagcgtcgccggtgtggagagggagggagcggtggttgcgcatgaagaaagggagcgacgacgaaagctgcacacgaacggagcagcgataacggcgtgccaagagagggagcggtagcgcacgcctcgacaatgatgatgaggagcgatggcagctgggcccgggcgtcagagctaggactagggcgggaggattcagtaggggatgggtggcgaagctcaggctgaggcgggtggatgcgacggggaaggagtgtggagctcgggctgaggcgggtggatccagcggagaaggggcaacgatggctcgatgatgatgaggaagagcaccaaaggcaaggctcaggcggcagagttcgggctgtagcgatgggtaggcgatcaatccggtggcggggtaccgagctcgaattcgccctatag

SEQ ID NO: 36760 - DNA, 528 bp, Oryza sativa
agagcccaagtgtgaaattcattttacttttctaaaagagtaaattgcattcacggtacaagaatttgttaggtgggtgcattctattgtaagaacttgaaaactgaacaaactggctcaccaacttgactagacggtgcgcttttggtcaaggtgaataccacacggaattttcggccacgttagcaagacatgtcattcatgtaacatgtttttgcttcttccttcaaacgacagatagactgaaggttcattttagcaaatatccccagttcaatggtaacaatatcaaatcaaaagctctataggtctagatttagctttgatagagggcactgtaatctcttgattgatgcatgaatcaattcatagttatactgtcaattgaacaatgaaactagacagtagaaatttagcttgatctaaaaggccaacgcttgcttcgagaagactagcatcaccatcacccgccaccaccactgacgaagcacacagtaacatctttgagttagctagcctgttcgattt

SEQ ID NO: 36761 - DNA, 620 bp, Oryza sativa
gcaagttggatgctttaatcataataacttcaccaggcataaacatggtagactgttctcatgtgctacctatttgcgtcaatcttagcagattgacataactggctaatacctcatgcccatgccttttagtactctcttcattttctgcaactttataaatcacggcattgagcaatgttctgagatctttagaagtcatatagaattaccttcggtgaaatcccctttttcagaaagaaaggaagcacacgtgtatctgttgattaattttagatgttatacatatgctgattaatcactcatgttctttgttggaaggatgcaggttgttttgcaagtgaatgttggtgttaacaaaatggaagctccagtgctagaagttcttcaatttgagaaatcttcatcaagcaattatataaccaagaatctggtcaatggactttctagtggtgatgaggatccatgtcaggagctgctaagctggctgctccctttggatcgcacacttcctccgcgatccttatcaacttctactctcaatcctagtgcatcacacaagcaatcttattctggttctgggtctcaaattttttcattaaggcacttcagaagctatt

SEQ ID NO: 36762 - DNA, 636 bp, Oryza sativa
cctgttcatgattgaaaccttcctggtgaattatccttaaatatcattttcttccactgtctaatctcacatggaaatcctaataatcattttgttcttatatatccgaaggttatccattccgatggcctctgctcttaattaatttgtgcagttcttttaatccctgatgctgttgcatcgttgatccgttgccaaatggaggaaacaaaacacacagcaaaactattttttttcatgctctgtttttgtcttcatacgtgtgcctgactaagaatattctcccaaatggcaattaaatatggcgttgattaactcaggcaacatgtcagaaaaacacggacttctgaaagctgaaacttggaaaatgttggactgcaattcaatttctggaagtagtggataacctaatcctgtacgaacaactgctggatatgaatctcttgtcggtgtgctgattttccattagttaattgaataattgagtcggtgttttctttaattatggtttggggcatgccgcatttgcgccctgattacgcaaaatgtttttatattttttggctcgtgggtttacgaaatcgaagaaattgggttgtgttagatctaaagtttgaatccaaacttcagtccttt

SEQ ID NO: 36763 - DNA, 563 bp, Oryza sativa
ttattgataggtgggccccacgaaaacacgcacacgcaaaacagctatataagcgccggggggtcgctttcttggcccattgttgcgcccgtctttgtctcgtttgtctcgaatactctcctctctcaaacacttccgtatagacacgcctttcgagttttctgcttcgagagtttctgattcgagtcttctcagcgaccatggggaaatccaaaaaaccggcctcaaaacagaaagcgaagaaaacatcttccggtcttggtccatcgattatctctgaaaagcggctcaataaacttgtttcaaaaggtgccattgctagtctcaatctagtcattcgtcctgctggtgagttgatgtaacgccctgattttcgatcgggattaaaaattattaaataatgtattttttagaaattaaatataagttaaatcaatttaatcaagtaaaataatgggagaattaaaatttccccttaaaaatcattggccgggaatattttgtaatattcttgtgccctaaaatactctctgaaatttcccgcgaattttcggagcccaagt

SEQ ID NO: 36764 - DNA, 586 bp, Oryza sativa
ggtcactgttttataaccaaaccaagttcacataggccgtgtctagatgttttggcaaaaaaaaaaaagtttgacgtatacggacacacatttaaagcattaaacgtaaactaataataaaccaaattacagattccgcatataaactgcgagacgaatctattaagcctaactaatccatcattagtaaatatttactgtaacaccacattgtcaaatcatagcgtaattaagcttaaaatattcgtctcatgatttacatgtaaattgtgcaattggtttttttattcatatttaatgctccatacatgtgtccaaacatttgatgtaaaaaaaattaaaagtttgaaggtaaataaagacagtcgtactagtcagcttctgtaggctagctgtagccacaagcttcttacacctcacgtttttttagccgcacctcacgtttttctagccacaaaagtccttattgatccacgtggctacagcctacgggctgcatcaatcaagttcgtactcctcctagtattccctcgaaaataaaccaaactcttacaacaatataacacattctaggacgattagttta

SEQ ID NO: 36765 - DNA, 501 bp, Oryza sativa
taattgttacaagcttatggcacttctaaaagcatgacctatgttccatggcacttcaaaaggaaaattttcagaaaaatatggatttccttagaacatttagcagatcttgtagagatattcctaacaaatggattcttattaaccagtaatgactttaaatgaaaataaagacgggcaagtcaaagggcacatactgttcggaattgtgatccatccttcgtcatccaaaacatcggtatgctttccagtaggaactgaattttttgaatctgcatctgcagagtccccaccgatatctacatctccattatcagtatcttcatcttcaggggaggggtgatatggatcatcggcaataaggccctccagagttgtaactggcttttgtaggctatccctttgctgatcttgctctggaatccgcggaagctcgggtgcaacaggctgcgaagtccggtagaggaaattcatctctacccgtcctgccaagcaaagcaa

SEQ ID NO: 36766 - DNA, 557 bp, Oryza sativa
tcatcaccggcgcgttcccggacaacatcgaggagatcctcgacgtggccctgctgctgcaggccgaggagctcgacggagcagcgtcgtcgacgacgtcggaggaggagagcgaggcgcgcgtcacggtgcgcgattgcttggcatccgccattagggtcgggctcagctgctcccggcgagctccctacgagaggatggccatgagcgtcgccgccgacgagatgcgcctcatcagagacgcttgccttcgtgcttgtggtaaataagtaggacagtatactgattatttgtagaactttgacagccgaattagtcgatggataattattactacgtcatcggcatcgaattctatcactattcgaggcttcgagcaagctgttgtggagtaaaaaaaatgaaaatgtaaaatccatggaattcaggagctctgatctcttgatttatctagtgtactgtactgacagaaaatggatgtactctgcatattcagatttcagaatagattgttctgtttatgtccagattccagaatataatgggccctgggaaat

SEQ ID NO: 36767 - DNA, 578 bp, Oryza sativa
acactagatttgtacaaagttttcttcagctgtaattcaattcaagtctataagaacagaacatgaattaaattttattgagaataatgccaaaattggcattgttagcaaaatcctctaactggaagtaatcaaataaaagtttctaatctcaagccctactaccccctaactcagtagggacccaacccaacattgcaacctccagctggactaattttccttgaagacaggctgataacttaagctaggctgaagagtacaagggccttgacacattcactagcccagtttaatgatattttttgggccttgacatattcactagcccagtttaatgatattttttgggccttgactgacataattttgagcatacctagcaggccaaatccttgtggggcttggtcaggttgggccacttgtgttatatctggtccatcgctacattcgtaacctagcataatttattagttagtttcagttgtcgcttgtcagaaaaaattgctcaggtcacaagtcccctgtgaaccaaaatgtttgagtcacgaaattgtcgattgatgaactacttgcag

SEQ ID NO: 36768 - DNA, 564 bp, Oryza sativa
aatgctttacaaccgcctttatgcaaatagccataaacagtccttgtgttccccttgcacatctgcatcgttggtgtggcttgctgagtacggtggttgtactcagccttgctattattcccccttttcagaagtgtagtgcttctgagctgaagatgaaattagaagaccaaggctcagaccccagttgagttttgcctttggagtaaagctgaagccccgctaggattgcctttttcgctgctgctgtttttgtttcggtgtgaggactaagtgcctcttctgtaagtaattttcgctttatttacgtttggaactgtttattacttgtcgttttgtgtaccctggctggtcctggacagggatttaatacacaaaatagtctggaaatttgggctaaatttatgggcgtgacagttgagtccttcacctcgggcccgctacaccttggtgtttgatgattttttttgaagctggcttcaggtttccttgcagtgcatttcttggtgaaggtcttaggctatatggacttgaggtttctcagcttacaccaaacacccttgt

SEQ ID NO: 36769 - DNA, 595 bp, Oryza sativa
  unsure (1)..(595): unsure at all n locations
gttggccggagcgctgttaanaaagcttctaaaatggcggactatgactgtggcaagctttaaaatgtgaatggtaattggctttctgtaccgggatccctttacagtggtctctactctctagactctctactcgtaatacactattattgtattatcattagtacaagtgaccaactattgatttatgaattctgcttcttaataaaaaaatattttgctatcagtggttgagggcagggttcaaaattccataacaaaatttcagaaattttggttctcatttggtactatttattcaaatttgataaaattttgttcaaaaattcaaataatttcggccatatcggtgacccctgatacaaatgaatgaatgcacttagcgtaggtttcactgatttgtgataagtttgacttagatttgtcagattttcatcaaatttggcatatttttgtcaaaaattgtttttgttaaatttgactttagtttgataaaatggactttaaatttgatagatgtttgacatatttaatttagattgagaaaaatatgaataaaatttaacaaaattttggataacatccacccaaaata

SEQ ID NO: 36770 - DNA, 764 bp, Oryza sativa
cgcgaatgcagtactcgatggtacagtcagtcatcacgaaccccactctcgctaggcatggtcctacttttatactctaaggggatcccacatatgctgcgggtactacctaaggaggaggaaaaatattttatatactaaggacatgtgacgggccttaacccaaaacctatctgggcgtctgctggtgcgtggggcctatgatataatgcggggcgaccttgtgattcagcgcttaatgactgaggacttaacctttgctatacccacctacgaaaaaagtacccgggacatttaatagcggtaagaccatctgttaccgggattataaaccattaatcccctcattagtatgattagacattgtggatcacgcctactgacacaatgtcaacaggaggactcaagctggacttgacattggccattataccgaccacataatggataaaggctcgccacatcacattatatgcggcgtggggttgttgggtcgaccgctatgaatgtcggtatgtggatcttaaattactgacctgatgctgaacattaaacagaatcataggtgtgacaagcaaatattgtcacctattgaaagtgttgcttgggagcctaacagcagaactgatatgctcaaatgatgatgtgaaacactgcaagatacgtgtaagacataacatgtttcataatacccccggaaatttaatgcattattacgatacgctcaatcagagcatgtgatcacatacgtacattgcggaaga

SEQ ID NO: 36771 - DNA, 854 bp, Oryza sativa
  unsure (1)..(854): unsure at all n locations
acttcgannnatgcacctacnagttggnacagnagttcatcatcgataggaatctttctgctgccactctattacctacgtacaagtcaaagcagtattcttgagataatcttttggacaagtagatcacttagtttttggagtaaattgcatatatgacctagctcttcgatttcctaaacttccaaaagctaaccttttcaggaatcaggagcctatagctaattaacctttttcagattaaagttgtttaagggagtaggggttgggtatttatgacaatatatttgttgggaaacgcctgggctatgatggcataaattaaaatttctttttgcgtaacccagaacccaagaccggtttagaacatgtacccgtcacactaaacgcgctgcgcaagtggagagaaaccctgaaaatccgagacacctctcgcaagatagcgcgcgtccatcagaggaagcagtcgatcgccgcgctcaaccttgtctcatagacgttcttctcggcgccctctgatgccgatcagcacccgaaacaaagggcgcctctacctgtatccacacgcagatgtgctaccccccgcgcgcggctaggcttttgctcggggagggaagngacagctagggttcatacctgaaggaaatgcttccgcggtcacccccgacaagatattattggatccatcatgcggacatccaacgcccgggaggttcctatgggcatcccaatttaaatggacctaaagttggttttttggcacaccctttttcgccttcccagagggggccatcccggagtgttattataatttggttgaaacctaaaattttttttggcccgccggggaaggg

SEQ ID NO: 36772 - DNA, 858 bp, Oryza sativa
  unsure (1)..(858): unsure at all n locations
agggtcactggattgatctcttctactgcatagttatcactgctcaacctactgcttgattaaatagacctttatgcacttctgacaccctacagtangcaatttacgtgtgtactgttacctctgttttctgtttactgtatcacacatgtgaggaatatagtaaatcagtgataattgaccctggtgttgtggaggtaggagaccagttctctggcagtccaacgcctgaattgaggaggctgaaaatctgtattttcagcagcccaacatctgagagccaataatgattagaattaatttgagcaacatgttgggtgtcttatatctgttctttatcaaatttagcacaattctatacaagtttggcatagaaagtttatttttcaatatgcttatgaacatgtcatctttctgtactttgaattgtgttgtcatctttgtaatattaaatggaatgccgcacaggcattacaatagtatcaactgctgtacctaggattgtaatgctgcagtgctgcgctatgaatatttctactccttgttatacaaggtgtgtttgtgtgtatctgaatatttgcctattaattaattgccaccttcactcatttcgtttgatagtccatacaaagggaataacaattactcctctattctaaaatacaaggcatattataaaaacattcatggcaagggattactcccatgtngggcatcaggaggggatttatgggaaaaagtatggtgatagagaacactattgtgatagggaacgctatgatgatagagaacgttaccataatagagaacgttatggtgatagggggattttggttttcaggtcatgcaagacgtgat

SEQ ID NO: 36773 - DNA, 596 bp, Oryza sativa
attgcttgtgcaaatgggttacagagttaaataagcttttaggtatctacagctgggggataattctgacaaatggaggaagcatgtctgcattgtcaaagaaagcagatagcaaatatagcagctttgctctagcaatgtttgattgatacagttctaggaaatttctgcagcctgagaaagcaatgagctgctcttaggctgataataagggagcgatggactggtagtaatgatgcatatacccatccagcttctgtggaagtgatgcattgcatttgcctattattttcgtagagttgcattcatcttttggcctgctgttgcttgttatgtgctgctgtcattcatgctatcagtaactatatgctaatttcatcgacgagaataggactaactcttgtattcctgttaggggcacctatatgttgaataatgtgttgggctcatatattaccatgatgattttttcctggtttatataggtctggaaatgtaacaagatcagtctcaaaacctcatgggcggaacttgtttctgcaaagcttagttgaagaagggcagaatccaagcactagcaatggtgccagcaactc

SEQ ID NO: 36774 - DNA, 768 bp, Oryza sativa
  unsure (1)..(768): unsure at all n locations
agtgattttgactgccagtcggacagnaccncatcatgtcgagaacagtttcgccgctagatcggtttgtaagaccccaactcgtgagcttaatcattcatctgcaattttgattgttttctatctcgttcttgtttgtgttcttcgattggcaaacagggattagccttctcggtgaggtcatccgcgtttcgacacgggtgataaccagaggagacgtggtgctgcgattgcggggctcaagagcatgcgtgttcaagaagtcggatcaatttgtgtcgcgactccgcccaaatcgttgtgtatcagaacctttcggaagatcgggaaccctagtgcacatcaagtggtatcagagctctaggttcaccgtcaggttcgcttagttcctttaccctagattagtttttgttttttcgcatttatcctagagtctatagaaaagccaaaaaaaaatttagtcgttagttaccttaacctataccgtttttagcctttgcatgattctttttcagagtccgtagtgttgagtttgagtcctaattaaagttcctgttgctggtctagtgcgtgtttaactgtgcccactacaacaagaacctcatttaacaacacatctatgtattgctagaaatccaaataagtgttgcaagggtctacaccaacgcttttagtatgcgttctatgctggtgttgcaatggtagaaatatatgatcatgtgttagtgacactaaaaataagcgttgcaaagttgcaacagataactg

SEQ ID NO: 36775 - DNA, 756 bp, Oryza sativa
  unsure (1)..(756): unsure at all n locations
cagggtttganttcngattgcggnctactgcaagnacntcatcagtccaatgtgaaattaattctagttgtatcttacgatttgattttattcggatttcagaactgtttttttcaggttagtagtactacgttctaagcatgtgttcttttcctcgagtttttagccatattgtccaagttgattacttgtaaattaatatcccctctagctgacaacattgatatcttactgtaatagcaaacttattaggccttttatttgtgtacaaacaatgactttcttttttactttttgccgaatagtttatcgaggtcactatctcctcttattggattcgtagtaatgcctgacgatgatacatcaaggagtattcctgaaaagagaaatatctacaaccaatatcgtttaactattagtcaaaacttttaaatattgactttgtggaaaacaaggacgccttgtttttttaagacagagggagtactactgattaatcacacatgtcaattaatttcatttgcggattttgaaactggacttatacgtaggctgcaaaattcagagttgctcgacatatatttgggttacttgtatacaaaacttatttgaattacatgcatatgcatcgattttgtgtaagtcaactgtgccattcattatgactattatgcatgttagccctctttggttctgtcaattaatagccaaatagagtcaagtgtacaagtactggtaattaatcatcaagctgca

SEQ ID NO: 36776 - DNA, 3151 bp, Oryza sativa
  unsure (1)..(3151): unsure at all n locations
agtttgctgttgctgagatgagccaagtcaataccatgccatgtcttcctgttctttgcctcccttcgtctggatgcttcttcaacttcattacttgcttcatcttttatagagcagctttgaatagtttatggctacaactacaagggtcatgtgtggtgcaacttgggctgaagactggggtctggggattcagactcaagatcctgacgatgatggaatggatgacaatccccttttatgcgatagaaaggttcagatggtcagttcttttagtcgcatttttcattaggctttttatattattaacttcttatttgtaccaaatactaaattgttcaaatttcaaatgtttgtcccaaaaaacaccagctggattgttgactgtgtggtttgcatgcatcattggaatcaatcaaacattagcatccattaaaaaacacagtgaactttgaaaaatcctccatggtccaattcttgctggaaagaaagcaacaagaatgcagcactagtgtgttgtgaaaacgaagcgtctgctttgtttccttccctttgacatggtcaatactgtaactaaaaatttccaggccggctgtaacattgtcctcttgtgaacatgacctggagataacgtagaatagcttgagcacagcaaaccgaccaatgttaccaatgcacaagcacaatgcactgtctcatcaattgatttattttggtcactttacatacttttttctgggtggctgctatgggggcttgccaagcacaactttcacgctactgccatcggtcactgaaacctgttttggaataatgtttttgtaatcacgataataagctttggatattataaaactttaaagcacgttttgagacaaacacatgatttttatgcagcaaaacataaacatttaaataggcatcagtgtttaaagctttaaaattttgattaggacatattcaaagctgaaacatgttttcattactggagcgagtacacatcagcttggcaaaaagacagtgttatacatatgcgtcagatgacatatgtatgcatgcatttgttctactagtcatttgtacgtttgaacttagattttctatcatacagaaaagattttttaaaaaacatagctttagttatctttagttgcttcagtctgtaaaagaatgtgccggtaatatggtggttatctctctaccacttcaaaatttgagttgtggtttttttattaggagggttatgcttgtatatgttacataggatcttgtgttgaggattggacctctgggtcatgtatgtcttgcacaaagattcttcatgtatttcttattcatcatctgcaaactatatttcgaatcgaaaattagaatgaatcaacattgcatgttgatactctgaattcagagctttgtgaaccgtgtacatttatttaaaaataacagggtaacttcactgtaattaatagaacattaattaatcatcattgcaaagtgatctatggaaaattccattgaatttaagaataataggtgttgtgaatatcagttatatactagtaagtagttagaaataggatgattatgagcaatatttagtaaactaggatttttttactttatttccacaatttctccaatccattgctctctttgttttttggctaattacaagtatatgcacatatgtgtgtgtatcatcacgtacacacgcttaaacagatgcatgcgtagggataaatccatgaaccattaaaatttgccatcgaagtgcactcatgtatgcataatttgagacaccaggatttgaactttgatcaaatgattttgaaattggtgggggtaaaatattgtcaagagaatatacaagcatagctaggttgaagtcctacattgcatacatcacccctgttgacactaatgagaatcaaaatagtttagacctacctccagatcaccactgtgaacttgctatgccataccatcgaatgtgaacctcaaattgaggtatataattattaacgtgtatacggtttccccacagctagctggccaaagtaatatcatacatagacatgacactgctatttcaagttagcgtgtaactaaccatgcgttgcataaagaattgctacctaatgcagaaggatatattttttgaagtaaaattcagaaggatattgcgtgggggattggatcgctgactcatgtgtgttgtacagagattgttcttgcattgcttgcaaactactacctatgtttggaaatcccataattggacttgaattgacactgcatggcattctcttaatttagaactcttagtgtaccatgtacagttaaatatttgaaaattgcttcatcacactagtacttggctagtaattaatagaaaatatcatctaatcatcaatgtagaagaaggattttagaacggctatctttggtgtgggtatcgttgatagcagtaggaagattatgagcaaaatgtcacacactcacactagcaaaatgactctatacgagtcattagcttcccctcccctgtcgctgccaccattaggcactactggagaaatgatctttgctcggtcggctgatttccataatagtcccggatctagtaaaaaccgggactaaaaattgtttttagtcccggttataaaaattttgatctttagtcccagttggtgatgatctttagtcccggtttataccctgtcagagccatgttaggggaccgaggatctttagtcccagttgatactaccaaccgggactaaagattatcactttagtcccggttgatactatcaaccaggactaaagattatcactttagtcccagttggtagtaacaaccgggagtaaagatcatttagatctttagtcccggttggtactacaaaccgggactaaagatctatctttagtcccggttgaagttactaaccgggagcaaatatttttctcccatctctcatcgattaagtcccagattaaatatttagagataagatcatccctctccaactcccctcagatatcgccctctcccaactcccctcagattagaagcctcctcctcccctcccgtatcgtccccattttcgtgatgaacgnctgcngcagagcgcagatctcacccact

SEQ ID NO: 36777 - DNA, 721 bp, Oryza sativa
gttcaacatatagaaaaaatgtttcaacaatttaaacagtgaaacacaatcgaatcattcttgaagcattttgctataacacatgaaacatcgattttgagctactgaaatatccaaatactttgaaaaaaaatgaaacacaaagaaaaacaccgcaaatttttggtcttactgctttctagtggcaggccaccgtattggcaccggattacttatactccattcatgaagacactttattgcattctctagatgatccacaccgggtccactgttcttactactaccgttgttgacgaaaatgagggtgagctactcccctgattgttggttcccctcccttgatctagcgccctgagcttaacatggtcagaacgccatgctactacatcctggcaatgtggtgcagagcaagatgagacgcatcatgctcgccatcgagcattagcgatggtctcagcaactcggattcatagctgctacaactgctatggggagagaaggggaaaaataaatgaccaccactggtggagtgggaattagaatgcctctaggaaagaaaccgagatgtagacaatgacccgataaagtgtgacatatgcatttaatatgtactcgtacgccaatatgacatgacagcgtgtccatattagccttcatcgcgagagcgtgatatatagctattgtgtactactattccagcagaaagaaatatagctgc

SEQ ID NO: 36778 - DNA, 551 bp, Oryza sativa
tagtggtagtaggaggaggaggaggagtagcggtttaactcgtgtgttgcggggtttctgggggtgaaagtgaaacttgggttggcggctccaccccatatataggcgccacaggccggtgtggaacagcggcgcgcgcatgctctcgtggaaattttgtgccgtgtcgggggctcggccgcgggcggggtcgccgatggggggaatctcgcgtatcgactatactcttacttctaaagagcaaggacaatagcagtctataagccagctgtaaacatattttaagaagataaatgaagagagagaaaagcagcgggctacagatttctagtcagctataacacagaatttaagacgcagtgtgtatgacagatgagaccaggtattaattttgtagtatgtaactattgtatgaggcttccatccaatggtccaataaaccaaaaaataagccaaattttgaattttcaaacttaattttgaaatattttcaacgtaattttttttcaacattggcttttaagttacaaagaacacatatataaaagttt

SEQ ID NO: 36779 - DNA, 1001 bp, Oryza sativa
gggatgtgacccctcctaagattatgaatctggactaccctttgtccagattcgttgttctaggaggggtcacgtcccctcttagattgaggttttttgtagaaggagggagtagaagtcagaagcaggaaaacttaattttttttccagattctcagaagttgttaccaaccagctgtttctcagaaatttaaactcccctaaataagccctaagcttcttagctggtagggagccgctgggaggaaggcaccgatctcggttcaaacctagccaataactttttttttacttagttctggatgtaacacaacaacattttaggacagatgtgtgcacagtacgcccttccgagaacatcacccacgcccttctaaaaaacgcatatgctcctgttacaacagaaaactagcagaactatcgccccgacgtactacacagctacccgactcacgacgactcccaaacagaagccccccactgatcgacttgacggactgactgagggtctgtttagttactaaaaagtttttcctaaaaatatcacattaaatctttgaagatatgtatgaagcattaaatgtagataaaaaaactaattgcataattatgatggaaatcgcgagacgaatcttttgagtctaattagtctataattagccacaagtgctacagtaacttatatatgctaatggcggattaattaggctcaaaagtttcgtctcgcggttttcaggcaagttatgaaattaattttttgattcgtgtccgaaaaacctttccgacatccgatcaaacgtctgatatgacaactaaaaatttttatttcaccaaactaaactggcccagactaatcctatttgcagggacgatcgacatgtcgtgaactcgtgatcctccggtttcccggccgtatacatgctaccgctagcaagcatcaaaactttctctccacagtggtgccatggcaggtgtacgtgcgatccctactttgattggct

SEQ ID NO: 36780 - DNA, 638 bp, Oryza sativa
ggggtgttcgtctagcactagggatccccctcagaacttgacccaaattttcctatgtccaatatgctgatgacaccctgttttatttgaaagctagtagtaaagagctctttactctaaaggctttatggcaaaccttccagctgggaactggtttgaaggtaaattttaataaaacttgtctcatcccaataaatgttgatgaagggaaagctcagaatttagctgcagtttttggctgtcaattgggatctttgccatttacatatttgggtttaccacttggtactattaagccaaaggtaatagattttgcacctttagttgacagaatcgaaagaaggcttacaacaaatgcttcattcttgtcttatggagatagacttacactggttaattcagttttctcttcactacctacttattacatgtgtactttaatgttgccaaagacagtgattgataacattgacagagcaagaagacattgtctttggagaggctctgaggtcaattccaataaaagatcttttgcagcctgggataaagtttgtaagcctaagagaaaaggtggtttaggagtgctaaacgttactatcccaaaaattttcatgctctgctcatcaaatttttggaca

SEQ ID NO: 36781 - DNA, 605 bp, Oryza sativa
ttgacctcacctaggttaaagtagcaatttttggctcccaaaattggaaatgttagtttctaattattttgataagaaaattttaagacctagaattctggtatgtcacagttggtgtcatcggctcgtcccctaaacacgagagcgcgaaggttgcaggcataatgtttgcaccaacagtaagattataaagatttttcaccatggacctctctcacgagtcaaggaatggttaaggacggggagctaatccgaattgcttcactcatgatggtagtcagatgaggctggatccattggaaagaggactccgagagctttacatcaagtactcacggaccgaaaatggagttcatatgcatatttggctgccgttcgaagtcaacaatgtagtaggaagccgaataagattgcagcatgtcacaccctaaaaatcctaaatatataaattgttgtttaactggaattattaaaatttattttaaaagtctagaaaagaagatctaattttaaataataaattccaatataaaatagggctagataaaatttcattaaatactttacttaattctataattcctagatttttctgggatttattt

SEQ ID NO: 36782 - DNA, 651 bp, Oryza sativa
tcctgcagccccttgccgaatttgttatcacgagttcctatcgccaagatcaactccaaacaagctctccctcagagaaaggcttagatattatcttcttgttataatgccgagcaaccctttccttatccttagtaacttttgtgagagctctcaatctggattgaaccaaatcctccttcacatcggacatgagattataatattcatcggctgacaacgcattctgcaaatctgttctcctcgagccgattctaatgtccataaacaagcttataaggaggaacttggatcgatccatggcaacccatccgataggaccagaatgcttcagccaacctagtatgccattgccgaggataatgagaaatctttctctgaaacaacttgatcaaactcttgttagatgcctcggattgcccattagcttatgcatagtatggcgaagaattcaacaatttgatacccatgctatcggaaaactgaacaaactcatcagacacaaagatagacacttgatcagtcgtaatagtatgaggaatcctaaattggtaaataatatgctcttgaacaaattgtatagcatcccctgaatcaaccttcttcaaaagaatcgcccctacccacttggtaaagtaatcggttgccacc

SEQ ID NO: 36783 - DNA, 1254 bp, Oryza sativa
tccaattaataattgcatttattaattagggattcaactctaggttaattagaacaatttctccggacgatttacttaacaaatttttaaagcaaggaaaaggttgaaactttagggcgtgacactctgtctctcaagggccgccccgccctccttccccttggcccaactcccctcccctccccctcccgggccgcctccgcccatccgcccggcccaagccaggccgagtccctcccgcgcacgtgcgctgtgtgcgctgaccgcgtgctagcaggaggggcccacgcgctggcaggaggggcccacgcgcggtagtcttcctcctctagccggccgttccgctctgtccctctcccgaaccatagccacctccccatcaccttcctctctctcctgtgctgacggtcaactccggccgcccctgccgcagtgcctgtgcgccggccggccgcgccgtgttctcgctcggcctcacaggtgcatcatcttccctggcgccgcctccgattcgtggggaaatcgccggagacgcgtccccgccggcttgcagtggcattgccgctactataccatctccaaccatccctgccacctcgcctgagtgcaggccgacgtcgctgccacctctgtcggtgctgcagcgccatcctcttctccggcccggctgcggcgtcgcccgaagttcgctgaaacgccgccgccgcgccaaccgcccgttcctccttgccggctcgtcgccccgctgcaccaccaccttctccaacatcgcaatggcgtgttccacgccgtcccctactccggcattgcagcggtgatgtcgtcctcggcatcgcctccccttcggccgaacccgccggcgtttgtcgtcgcctcctcaccggttcccaccgtcgtcctctcgtcgttcccggtcgtcgtggtgttcgtccctctgtcaagccattctcgttcgtcatcctcgctccatcaagtgccacagccccgtcgtcatcttcgtcctcgcctccgcgtcgtcaagcattgcaccggccgcgtcttgccttcgtgcaaggatcgccgccgaagtcgttccctcgctgttcgcctccgtcgtccctgagccgtctccgccgtgcccgttcgtcatcatcgtgccacacctcgtcgcatggtggtaagggtctctcctctcgctgccccgccctcgtcctttcgatgtcgcccctgcccgttgtgcgggtgtcgatcccgctacccgtgtaccggtgtcgg

SEQ ID NO: 36784 - DNA, 519 bp, Oryza sativa
gactgattatttcgccaccatggctacacaactgtgtcgctatcgctgggcgccttcatcttcactaatgacagaccatattactgttgactggtttcttcgcctccacggctgtgcgacttcatcacctttgattggtgccactgtctttaccaccaccaatatctttgtcacctttgatgggcgatgtcatcccctcgttagtcatctcgttttcatgccgactacataagctaccatcaatggacaactaaaactacaacagaagtacatgttacatgcttagggggctcatgaactcaagcgcgatgatcataccttcaatttggacttgtcccacatgcatgcaacataaattcatgatcatgagtcaatttcttatgctcaacgagtggactattcgttatttcccacgagggctatcatctgagtatttgtaagagtcaggatttaatttttacatctactgaggtacactctatgaggataaccactcgatcagaagccacctaaatgaga

SEQ ID NO: 36785 - DNA, 551 bp, Oryza sativa
  unsure (1)..(551): unsure at all n locations
cgagggntttgagtgcgaaccgatgaattctccgtgaattcgagctcggtacccttgatcggggcacaatagttcgaccaggcattgtgcaaccttggagttagtgtcagggtcatgccaaaagacatcttcgacaagctcaacttaacagtgttggcaccaacaccaatgcaccttcaactggctcattcgtcagtccgttacccggcagggatagcggaagatgtgccagtcaagatacgggattttttcatcccggatgacttcgtggtgctggatatggacacgggaaaaaagacaccgctcatcctgggatgcccgttccttagcaccgcgggagccaacattaacgtgggaacaggaagtatccgtttccacatcatcggcaaggaagagaagtttgagtttcaaccgaggacggaacaatgctccatggtcagaataaagtacgggccgaacccacagaatattcaagaggtcgaagtggagccacccaagacggacagcctggtgaaattcatgcagaatttcctagagaagaaaacaacaat

SEQ ID NO: 36786 - DNA, 719 bp, Oryza sativa
atacacatgctatcagatggaagccaggcaagaatggtccttgatgtaacatcataagctacatgaataggttactcttaagaactatacatctggattagaatagtctaatgatgacgacttgcgggtcaaatcggaatttccattgtggcaaaggaagttccactgctcaaccaagagattcagaggaattatagtagaccgcttattgtgaggcaggtgatacagcaaccaaacacaatactaagcacatggtgaccctctatgtaaatactctagatatatcgactgcacctatatatactaatcgtaccgggtgatgtgaacctacacgcttgagctcgccaagagaaatggatgaccgtactacttgagacatcagacactcaaatggatagctcgaactttatatatgcggatcctacgagctcaatgctggatacacataagtgggtatacatgcacctaaacattaccacgatgagcgcgatccctaactggacactatcactcatgacgagagcgaaagcgaggcgacgatggactatcgcgacgcacctaaaactagtgtgctaaccagcacatgcctatgcgtgtacgagagctcatggctaagaaggacatgctcattacaatatatgactgctatgacagctaatgctgagagacatggagcaggctcactcactagtcaatgtacaatatgcaatacaatttgt

SEQ ID NO: 36787 - DNA, 689 bp, Oryza sativa
  unsure (1)..(689): unsure at all n locations
aataaggtagtattggtaatttccagcctaatggtgtcctcgtaaggaaatatccaaaaagcatattgtgacgccgaaagataattcgaacccgggtggggttgtgattgaaggttagacaaacaacatgcctgaaatatgtaaatctaactagtgaaatagcttttatactattatatagatatagacttccgaaggcctgatggctttgtcttcaatcaccaaaaaggggtatatagaaagtacaggtcataatactttggttttgatgatgcctgataaattcaattatgtgagcctattttggatatgaaagtcctaggcaaagccctgtcagttttcaaggtcaaaaaaatgtgnatatgaaagtggagtgtgtagatctacttcagaaacttcaagaagttaagttaagatagaaacgttcattggtaacgcacataacttccaaggatgaaatccttggagataaatcttacaacaatctctctctctccaggtacatattgatatgtccaaagagaagattacgatgtgcacatcattattcacatgaccctaatgtgttgtaggagcattttcggcacgtttagtctcttcaccctgaaaacatggagattgtgaaggtaaacattcctttagcgcggtaggtttgatagatgcgtcctattcctgtatgtcttacgccg

SEQ ID NO: 36788 - DNA, 652 bp, Oryza sativa
  unsure (1)..(652): unsure at all n locations
ccggcattgagtgcttatcctttttgcncccaggtcgactctagaggatccccatcgacaaccaaaagcaggctggagattgaaattctaatcacgacctataaggtcaaactcaactgatgcagctataagtataagtatgaaaagaagaacaaaatctagacaatcaagccgttggatgtttcatagagtggtggatatcctatacaatctaagccaacatagatatttaacctaatcggctgccttctaatgatagatcttagccgattgaaggttagataacgatattgtcgtagattatacagaatatatgataactcgatgaattacataatcaagattagagtatcataaagatggaagcactaatcccgagaacgcaagccgccataacaagttttacctctagttgaagatcaaaaccgatgcagctcaacccgaaagcaagaactcgtcaaaacaaaacgaaagtaaaagggtggcgatgcgccaagattgtattgaacgtatgttagattgattacatgaggctcggggtctatttatacccgagatttagaaaatatgtccatgtcggacacgacttttatctctaacaaactctaagataccataagtctctacagcagactcttgcccaaacatatct

SEQ ID NO: 36789 - DNA, 677 bp, Oryza sativa
  unsure (1)..(677): unsure at all n locations
cgatcaactctctattgggcggatcaagtcgacaatagatcggcttaagcccgcaaaattgatctcatagctcaactcaaagaatgcaatgccgaatggatcttgaaaacaaaaagctaccgatccttccaagtgctattgaagaacaaaagtctaggctgaaatcggccattaggaatgttgccgatatgactaagtccttaaaagtcgcccctggacccgatgcacaagatgcccaagcaattgaagaaatagaccaaatcagacacaaggctgtatcggctatcaagcgatacttatctcagtgactatgtaataggattaagaaaaaaatttgtattcggctaagaaattatggtacttcatttgttgcttttgttgctgaactgatgtgccgattaatataacctctcgtttttgctaaaaaaatttgcaacttttgctttgcaacttttacatatatgtgcccccctaattttacaatgacgaaggcattaataaaattataaattgaactaagggcgatataaccatatcggccattgtatatcggcaaaacacaaccgattacaatataaaaacaactaagggtgatataaccatattggccattgtatatcggcaaaacgcaaccgattataataaaaaaacaactaagggcgatatanccatatcgg

SEQ ID NO: 36790 - DNA, 529 bp, Oryza sativa
cctacgagtgctccacctccttcacggcctccccctacgcttgccgccaagaaaggaccaacggaatccaacactagtaatgcatatccacatgatcataatcaaggttacaatccttttataagttcaacaaatacttctaaaacacccaaaattgatgaattagaagattttgtcatggcaaagccttctagcttggctaatggttgtctgcaagatctaaatcataatggaattgggattggacaagattcatctacatctgctgcaggtttcatggattgggctgagctaaaacactctaaaggggtgaaccaagggaactttgattctttgttcgctagcagtcagtaccaagaaaaagagaaagcagtgctctatgcttctggaatggaaagcagagatgaggaagaactattagagcatgagaaaaaacaaagagaaaaggaagaggaacagagaaaactagaaagggacagggaggaagagcttgagagggaaagagaaatgatgagaagaagggaacatg

SEQ ID NO: 36791 - DNA, 780 bp, Oryza sativa
  unsure (1)..(780): unsure at all n locations
aaaccataggatagcctctcgtgcagcacttaagacacaccacatggaatgtaaccctcatggactttgcctagaaggtttgcgaaactgtttccttctctgtgctgcctgagtgttacgtcactgatctcgagggcaactcatgctaaggtggagttagaatgcctagaggagatgtacaacatccagcagagtctgcgtgggtttaagatgcaaatggtgcgtttgccattattagtatatgtttcttttgttttgtgatgccgagcacgtaaactctggcatcttactgagatctagtactcttcgttcattttcattctcatgcatggacgacatattcatcaaggctgcgtagagctgtagtgtgtgcatttgctttctggactggtgtacatgattgtattaatttttagtccgtgcccccacatttcctgtgtcctactgtccttcattggctagttgattaatgacaacttatgagccataatgttctattacacttctcttatattctattggggaataaacaggaagcatggaacaaattcaactcgaagaactcttctaacacttaaatcgtttggcaatcctgagccactgaggtactaggaaggaaacaaatgacatacttggnaagcttttaatgtttctatcattataatagcctcttttcttttttgcttaattcttggccgagtctttgattcattctatgtaaccacagttgcttctggaacctgtgtgtgatgatctgcaatttgtacccatggtgtgtag

SEQ ID NO: 36792 - DNA, 627 bp, Oryza sativa
cgactaagtctcccgtcttgctgtaatcgagaatttggattgaagtcaagaaattttatctcggcgggtacaccatttcttcattccgtattccttgtcaagatccagcaactgttctcgagcgatcgagaaggcgtagagtctgcgacggagccttgtcgacatttgtcgtactcgccttagtcgatcttggtgtacaaccatagagacatggagccttcgtcattgtcgaatagaattttcttgaaatcaatactaagaaaagaatattagatagaaatagcccccgagcgaacgctcaaagggtaacatgttataatataacatactagtgaattgaatgtacagaccagtgttttgtatatgagcgtcttctctcttaccgactccgatcagtcagtttgtggagtcatacactctccctagcccccagccttgtcgtcggagaattgttctcggatgataaggctcttggacctttgacctgccttggttgaacaagcactgatcctagccccaagccgtgaagttggaaattccatttccgattacacagcttggttaatacgcacggcgagaactattacacgaccagatcttacatggtctttcgtctctaaagtgatg

SEQ ID NO: 36793 - DNA, 670 bp, Oryza sativa
ttctcagtaggagttcacagaaagaggagcataggggccatggccgacaatgcatccaaaaggcaagtgcaactgtggattcagctgtaaaatactttgagaaacgacaattccaaattccaactaggcctacatgttttgtgtttcttttgttaaaaattatttgtcaagttcagctaagctcattgacttggcaagctcttggtacataggattgaacatgtatgccacacactggttcaatgttaccttctccattttagttcactgttatattttaatctttttttacacactaccaattttttgtgctgatgttgttgatcgattctttatatttttggcaagcacgcaagattggggaggtgacattgcgtactgtacatgatttcttttggatttgggctttctttttcccgtgatgggatgtagggctcttggctctggtcacgcgaaccaaagaacttccttttctcaagtggagtgctgcgggctatgggctatagtaacctagtgggctttttcgtcggattttttgtgtacaaactgtgatgggccctttgttttctttcaaaaaagaggtggtctttttgccctactataaaaacggaagcagagtcacgagtaacgctgcttttttgttcacgtgcatggctcatgtatgcgcgcg

SEQ ID NO: 36794 - DNA, 653 bp, Oryza sativa
tccttctccccttcaagattaatgttgttttcccaaaagataatgatctttaagaggtcattaatgatccccacaactttaaataaagctgtcctgcttggttacaagacaatatgattaacccttcagcccgccaactaaaatatataaaatttcgtcaatattggacatggcacaataaagaaaaatattgggatggccgtcgtggtgcttctcgcagaattggccgcattgctcatgtcagcccttcacaaggagaagcttactacctacagaagctactgcacattgttaggggcccaagatcctttgctgaaatcagaactgtatcaggtgttgaatatcatacattttgaccagcatgtgaagcattaggtctccttggtgatgaccaagaatggtcaaatgctataaagtatgcagctcaatgggccttctcattccaagtacgccagctttttgccacaatgttactcttttgtgaggtaacaaatcgtattagactttacaatgaacatatgtcatgtatgagtgaggtcatagcatatcgtacgacccgtaacgcttctcaggccatcagctccatcaatacatttgtaacatcatctcgccttcttgagttagacaagctgctaacacccgttgggtatagt

SEQ ID NO: 36795 - DNA, 577 bp, Oryza sativa
tatttcttaagttgatgaaatcttctgtaaactcatcttaacataggaatttaaggttcgattacacatttatacttgactagcccactaataggaagctggtataggcctgaggaatttttggggggtcttatattaagatccagataatttctagttcctgaaaatcctatttattctaaagcctattccttgattgttggttagctaataaaaaaacttatgcaagtctaaagtcaggttttagcgaatttgcagaacaaattacagatgcttacattgcagtataagaaccagagggactaaaagcttacagtgggtccattaaaggagcaatacttgaaacatctgatgcagatgccgggaaaaagtgagcaaaaagctggtgctcaaattggcatgcctgagaagcaacaggaaaagtagtaaaatatgtcttgcagtcaaaatcagctgaatattataagaggagagaaaaataaaagcatgaatactggagattagataaaattggttatgtgccgtcaaaggctcagaattcagttttatgacattgaaagtcccaggttgaggggaa

SEQ ID NO: 36796 - DNA, 992 bp, Oryza sativa
  unsure (1)..(992): unsure at all n locations
tagtaagacaaagagggcaagcggccatcctcccagcaagctcgagcgatatgccggcacaatggcgtcgcggcaagcgagagccctcctctcgtcggcacgggtcgccggcgctggcatcgccgccgtgagctgctgctgccaccgctccttctcagaaagcggcgtcngcgtcggtgagtcagcaagagcctgctacgacgcagtcggccggcacgacgtcgaagctgcaggcggcggagggagcccccgccgggagtaaggaggggttcttctggatgagggagcccaggacggggaactggatgccggagaaccacttcaacgacgtcgacgccgccgacctccggtcccagcttctcttcgccaagaaaaactagctagatatgccctagatcactgatcattggagccaccatcaagatgatgcacatatgcaagcgcacacacgaacgcgcaccagaagtcttcattgtgtgttgtattgtggattaatcaccaagtagcagattcttcgttgtgtttttgtgtgtgtggaagtagggattaatcacttcgttcattgtgcttttgtatgtgtgccacttcattgtgtaagcacattttttattcaaatttctgtgttagtttttgtgtgcgcggaacacaatttgaaatttgtgttagttttttctttttgttggttcaaattgtgtgcggaacacaatctgaaaattgttggtctgtttgtggaacacaatttagaatcacggacagagcttgcccagtaacccgatcaagaaaattttttagctacaacttatgtattttcatcatatgtacacccctccaatccaaactcagacactcatatcagcctaaacttggtctaaagtagagtaaataaagtaagtgagagtagcacatctctccatttccttttagctcttggtctaaaatagagtaaagcaaacgagtagcacccctctctatttctagaatcgcaatccaaa

SEQ ID NO: 36797 - DNA, 771 bp, Oryza sativa
  unsure (1)..(771): unsure at all n locations
ggggggggggagaaaaagaaaaggagaggggggggggaaaaaaaacataagggaagggggggaaaaaaaaagggcnggtcacacaaaaaaaataaaaaaaaagaaagagtgaattggatttgatgcattncaannnncnnnnnnnnnnnnaaaaaggaagggaaaaagggaaaaaaaaagaggggaggaaaaaaaaaaaangggaganaagaaaaaaaaaagggggggaaaagaagggggggggggggaaaaaaaaaggggggggaaaaaaagggggggggaaaaaaaagagggggggggaaaaaaggggggggaaaaagagggggggaaaaaaagaggggggggaaaaagggagggggaaaaggggggggggaaaaaggggggggaaaaaaagggggggggaaaaaaaaggggggggggaaaaaagagggggggagaaaaaaaagaggggggggaaaaaaaaggaggggggggaaaaaaaaggggagggggagaaaagagggggggaggggaaaaaagagggggggggagaaagaaagggggggggagagaagaaaagagggggggggaaagaaaaagggggggaggggggaaaanagagggagaggagggaaaaaaaagggaggggagggagaaganaaaagaggggaggagaaaagagggagggggagagggagaaagaggggggggagggagaaaaagaggggggaggggaagaaagagggggagagaggaaaaaaaaagggggagggggagaaaaaaaagggggga

SEQ ID NO: 36798 - DNA, 679 bp, Oryza sativa
  unsure (1)..(679): unsure at all n locations
attgaaggcacatcataataagggaacgacgaccatgatttcgcgtaacagacaccgggagtaactatgttaatggcagccatcaatgacctcgttggtgagcgtggagaaagaatcgccggggagggggaggcggatgagaagcggcgcacgcagggggtggggcaacttggggcgccccccgggtgtgtgtgtggggggggagtggaagggtgtcttnttgacgaaaattgtcgcttgctcaggtggaggagaagccgcgccggttgaatgccccagagattggggaaacccgggtctgtaatgacgccatctccattcaggagaggcagtcagggcgtcatccgccggtcctggcctggtacccccccatgtgagaagcaatggctttctcttgtgggcccgcgcttgttgcgctctgctatgggatagtgggtaaggaacctaacacccgccatcgcgagaggaaccactcccccccccccatgggaaaacccgttgccgttgatacacaaatttttggcttagggatctccctaatatatagtattcaaccgcctgggaagatttcatccgaccggctgaaaaaaataagcgatgtggttttacccccgtctctgtaaaacttcttttaactcaactatggggggccaattgtttaggtttattgaatcccaac

SEQ ID NO: 36799 - DNA, 726 bp, Oryza sativa
  unsure (1)..(726): unsure at all n locations
cgatggggtannnnttaagatgctatggctgtctgcccggaagtcgactctagaggatccccactttgtcaatcttttcaagatttggcggtccagtctttgaagatgctcataggggttggggttacctgcctgccttcataggggtgagtgcccctgccttttgagtgtctgccttgtactgtgtaattttaaaaaaaaagttttagggggaattaataaaacaaagaaactttacgtatgcattggtaataatggggataaaaaaaattttgggtttcggtcaacaactaatttggacatagaaactaccaatattaccattttaatttttggagaaacccaattattaaatatgtcggacacttttggatgaacatattatgtcattcattggggattcttatcctctttggggcttttttggaacgtgagaaaattttttgatatattcctattggaatttgattgaattatgaatattctttaaaaatggtggttatattggaaagaattgttaaattggagttcggtctacttataaggatggcgtgttcaagaaaaatgaaggcccttttggcttttttgtggaaaaaaggttacatttttgttttttttttgctgtttccctttggtgaccccactccccccccgcacgaattgcttaattgcattgattgtccgttgtaattaattttggttaaattctaccaacctgtcctcccg

SEQ ID NO: 36800 - DNA, 722 bp, Oryza sativa
  unsure (1)..(722): unsure at all n locations
tgcggtccnntttgaattgacataccactgctgcaagcccgcgggncgactctagaggatccccccgatgcttacccctgcctcgtttaactagtgcgcaaaaggggatcacactaaagcatacgctttgattattaggcgtaggtttgtaatagtgccaccgcaatagggcctgttcattaaaatacactacatggtgggctgtgggggcatggttctgctagtcgtgcccctggcgattaaggaccggctcgcgggatgccctggaagaacttattgtacttaccacaagccagcgtgtgcaacagctgggcttttagtgtagcttttctttaaccgacctacccaagcgagggtgggcgtaatggacttgggtcaaccagtgtggccctttgatcgggttacagattcaccgtggcatttaacgggggctgcccgttgccttttggggacgggggcggaccctaaggagttgtaccaccggtagagagggttatactaagggtactgtcacggtctctatccggtatttcaagcaggcatgtacacccaccggaacatatcgtggggatattgtttgtgggaacaagtgtacacctttgatcagagtcaaactatccccatagccgcgccccgtgatattgggcggctaccggattcaccaatgatagtgtaacccctagatcagctttatgaaccggcgcaggtttatgtgttggttg

SEQ ID NO: 36801 - DNA, 614 bp, Oryza sativa
tttttttaattacgggcgacaaacacgttcccaattaattcgcgtggatgaaaatataaaattaaaaccgatttaaacatggatgacgtaccaaaattctaacaaaaacatctttaatttttatctctacctctatctctactacttaaaaaattgaagatgtttccttcatctgtccaaataaaaaaaaagcgaaaaaacaacctaaaataaaaaagtatgattctcctaagaagtggcagaaaaaaaaccgtagatccgattcccctataatttttgtccattttattttctttttgcgtttcttactcttttttttttctttcaccggtttttccttttccttttctctttcaccatttttttatttgcctccccatatgtttcctcctccaattcattggaaaaaccgattcctcactactcattattttccccttgaattccctttcaatttggctttaattcaccgaattgaatctccatttcatcgccattattttttatctcgagttttgtggattgcttcaattttgataaaaaacggaaaaaagagatcggtttgatcaaaattctcaacaattttgatttgattgagaagatcaactcctttt

SEQ ID NO: 36802 - DNA, 607 bp, Oryza sativa
ggctccaacaagcccgcctggcaaacgagtgcttgatcagcgaatcccattgaggttatcaggataagacacacatactcctaaagatcactcgatattgaaagctgctgaccctaattgtggtacatagctaaaagtcgactctaaaccaggtcctttacaaaatactaagctccgcaaaaaaaccttgagcactggataaaggctactggtaaccaactctaacatgcttaatgcaagtacgcgattagaaaaaaagggccctttgcgaataagccatctcaaatcatccttcccaacagatgggcatccagaccaacctatggacacaccctggaacagagcaccaagcgcaatagctgacgtggtttctcgcagacttaccgcttcgcttaccagtaagcaaactcccgaacctttagttttgttccccaagtagatagcaacgttcaacaattttcacctgaagagtctaaaggtgggctctgctatagcatgactttacagtgcttaacggactccttgaccccaaaataatggttacgggccgaggttacatataccgtgtccatcccctccaccagatcgctactaccacctgtgaaca

SEQ ID NO: 36803 - DNA, 844 bp, Oryza sativa
  unsure (1)..(844): unsure at all n locations
cgggggggttttcttagggagtttgggagaagccttaaaagtgtgtgagtagccccctggtcaccggggagacaaaggtcccccttataatgggtaaaaaggggaaccagggccatatttcttcctgaggaaaaaaccgctcccgttcaacgccctaaaaaaacccacgtgtattcgggcccgaggaatccggtccttaccttagggtgcgcgtggcctggggttggcccaacccctttaaaccaattctctacctagaggcccagaactcattctaccacaaacatacccatcccccatggagtccaattttcccccccccccaattctactgcactactcccgggtgcagtaggacagcatccccgttggatctaccccaataaatagctagtgtcccctttaatgtactccaaaaatccccttcatatttaatactgaatccctccatccgtttcaggttataaaatggctcctctaagtttgcctaattttatagaaaaaaatagtaatatttccacccccagtatagtttctttaaatctataattgaataaaaataaatgttcataatatatttatcttgggttaaaaatattatatttttttttataaaattagtcaaccttagagtagtttgacttggactaaagtcaaaccgttttataggggttcctctagagtcgccgtccgcgcggcanagatgagcaatacaaattgtcccggngctggggggaggaagatannaaaaagaagagtatagacannatacgtagnnggagtacgcataagagagggagaccaaagcaaaccctaagcaaatagagcggcgtaaacacagagc

SEQ ID NO: 36804 - DNA, 663 bp, Oryza sativa
  unsure (1)..(663): unsure at all n locations
gagcattgaacgggaggaaggggcaaaattagtcatgagacaaaattcatgggggataaatattagcagacgggggaactagctgaaaaccagtgtcttgcaataatcaagaaaagtagggttctaagctttaaagtgggataaatttcctggaaaaaaaaaacatagacatttggcaatccaacatcagccagaaattggagttggctagccagaagatcctaccaactaaaatgggaggtgatgggatgacagactcaccagtcgccatcaaccaccagtaagttttgggtggattacccaatctacagctatttttatgtaaattgttttggtggattacccaatcaacagctatttttatgtaaattgcgcataaaatacataacgcaaagtgtataatgaaagaaaagatgtggaaaggacataaagcaaaaagaagatactaggtgggctgtcanccagacagcccacttatatctccaaccctgccaatactattccttctccagaaaccatagagaacagtgatgccattcgtgactcaaccattgattgggatgatgaaccagatcaaccatgaaccacaaactgagatgatgaaccagggtcgtgggatgtggcggtgaaccacgaatccggtcaccataggatgtgcaacat

SEQ ID NO: 36805 - DNA, 653 bp, Oryza sativa
cagtcagtcatacagtggtgggagaacattgcaaacacgcctagtgtcccgaaaaaaggactctcatcgctcattgggttagtcgtctaggaaatttggaaagagagaaatccgcggatttttgatcacaaagaggtggcaacgaatttcctactaatgaaaatcaaagaggaggcgagcctttgggctttagcaggagctaagcggttgcgtgagttaatcccgcactctgtatagtgtacagctatagtggttcttcgttttccttttacccctaggggtttgtattttctcctgctcttagatgaaaaggcactctagtgctgttttccgttcatttttttttaaactgcacaggcgagcgtggccgcccactcctactagtgattccattcctgtggaccgtgcatgatatgcgtgcagctgacgagcgggccaagccgctcgatcatctaccgctcgcccgctgaaataaatcctgaccattaatgccatgttcggtcgcgcgcaccgcagcccagcgtccagttgtccagttgacccagctagggtccgatgcatgcatccgttgagtatccccaccaaccaacttcctttatgatttacgcccccttggtccagaagatatatagtggaaacaccctttcccgggt

SEQ ID NO: 36806 - DNA, 713 bp, Oryza sativa
cgccgagtggaacgactactataggcgaattcgagctcggtaccctgggaaggggaggccggccgggaaggggaggaggaaggggagagaagggggaggagaggaggaaggggagaagttggagagttagaggatagatatgaggagagggggtgagattcgatctgttaagttgtaactgtggaggagaggataagggatatggattatatactatgtgtttaattttagtccccgctggtacattattgatctttatctacagattgcacgccccttacttttttaaaattgtttgacccatttccttattttacactttcccggtactacttattctttttccccaatttatatcatgactaaccataaacatttttatctaccctgttctaatatcgaatttttattacccatacaactacctcctatactttcggttaaattcgacccgaccctatattgaaatactgccgacccttcataaataacttttccatccatctatacaattaaaatttccatatatttttattacttaatcacacgagcaagctaccttgacagatttaaaaggttattaatactataactgttatggcaatctatttacctgtatgttttaagcttttacctccattaatgtttacacttccaaccttaataaactaatgattatatgactcttttctagtcatttacatcttcctatt

SEQ ID NO: 36807 - DNA, 876 bp, Oryza sativa
  unsure (1)..(876): unsure at all n locations
caggctgggtacccttaaaaaaattaaaatattttttaattattttaaaaaatagtaatagttataaatccgtaaaggtttttaaaaaaataaactttatcttttaccatgtttagaagtcttaaaaatggtaaaagtttaattttttatacgtaaaatttaaactccaaatattgccttttttttgaccggaggaagtactaaaaaaaagcaaaacaaaaaatacgcttttgtccattgtgcatatcatactgctcggtaaaatttttatttgaaaaagagtgaaaaaggggtgcatcgtcatcatattcccccccacgtttaaggcatcttgttcaattggattcttaacgagtaactaaaaaatgtaaaaaaaaaaaactagaaatcttatgatgtgagaattgagtttatgcccttatcggttggcaatacattattataagcagtaacggcttattagctacttaaaaacaattttaaagtaaaatttttatatatttattgttaactacttaaaaataatgctaaaaaaatagtgttgaaaaatactctgaaataaacttcaaaattaattcataaatttaaattttgacaatgactcatgggaaaccacaagcccttaaaaagagtcgaagtgattgcttgcatgtcccaccatatgcaatccctggtgaatataacatcgtccatgtaaaggggatcctctagagtcgncctgcnggcntgcngcnagnangtcatcaaatcaancacctgggggggggggggggggganaaataaacaatttagttcgganctgtaagagcgcaggttaataaggagaacgattcatacacgatcagttgtatacaactgcacgatcttattcaccc

SEQ ID NO: 36808 - DNA, 693 bp, Oryza sativa
ttgtaattcctggtagacgggcccttgtcaattgtaaatgtctttttttccaagaattttataccactttaaagtttaaaagatggattggctgattattgcaaggaactggtgttcaactcgcacacgcgtttgttaatctttatgcgccatgaattatgcatcaagatgatatggcacatactggctgtgtaatgtatgagtttcacccttttattccagattcgaaggtgtagactccacaacagagtcaggtaccttcagctgcaatgcggcatatataatatatattcaatatctggcaacctggcgaggcttataaatactaggtcatgtgtgagtcatgttcttttaccacaaatttaataaagctcaaactggtggtttatcgaataaactaaataatcttgatttgtgctgcctataattcaaaggttaactgccgcgatagttccctaaagaaaaaactaaatggtcgccagattaaatgcttccatcggtgtcttgtgaactatagtcacaatacagtatctaacactatctttttgtggtcatatttttaagtgatgctggtattcttattttggaggtccacgttattacttggttgttgagatgtttaagtggtttttactatcaacattttctattttaagggtgttttcacacgcttttattctggaacattttcac

SEQ ID NO: 36809 - DNA, 726 bp, Oryza sativa
  unsure (1)..(726): unsure at all n locations
tttagagggttccccctacacactccttattatacttgacattcttttaactttttccttcagatttaattggggtagtcagccgtattggtccatatgattcggcgagcccaacatcagacaaaaaactcagaagaattcaaattcagaaccaagagtatatgtaatccttatcctcttcggggcttctttggaacgtgagaaattttcttgatatattcctattgtaattgaattgaattatgaatatcctataaaaatgttgtatatattgcaaagaatgtctaaattggagttcgtactactgataaagattgacgtgtacaagaaaaatgaggaccattgtgtcttcttgtaggaaaaatgattacatattgattttttttatgctgtttacctctagtagacccaacatacccacagtaatgatttgcataattgcattgaattgactgagttaattaatttgggtaaatttcagaaactgatcagctctattcgcgtgatttttttggaaacaaattattcattgacctgacatttaaaagaaagctaaacgcacaaacttgaatcttggacagaaacaatttgcgattctattaaatactctttgtctatagttttgctacttaggttagtagtagttagtttatgctgtcagcatttattaactaattatctaatcgagggtacccagtggcatatcaaanttcaaangtgccacat

SEQ ID NO: 36810 - DNA, 686 bp, Oryza sativa
  unsure (1)..(686): unsure at all n locations
gcatgncgagctgttattatagggcgcgccaacaacggcttgtaatatggacccagcccacaagatagatgattgcttagctcctttcctattattagcttatcttaaggtcaccatatataatatataatagattagctataaggttggcaataatttcttctcttcttttaattttccacttatacatttaatgtatttgtcttgaagtttgtgataatctagctcttgcataagagtcaacacctttgatttttcactatctctctcctccacttaaacttatagtagggcttatagctcactattatacttgctcttagagcacccgcaatggtaaagtaaggtgctatctataaaacatgtacatctcagcaatagacttgattaatagtaaaccaccttaatagtatgtctacattggtatctatagctctctcatgcattgcctcgtttttctctatagactatctctaagttagtagatagctttgctctctctcttcatttaataccttccaagtaggaaaatatgctgacatggatctcttgtagagagcctatagataaccattgtgggtgcccttaggctatgttcagcaggaccccggcgcggaaaacaaaacacttattattacatgattaattaagtactaaaatggattaatatgatttttctaaaacaa

SEQ ID NO: 36811 - DNA, 696 bp, Oryza sativa
tgttaaattgctccggatttacactaaaataagcaatcattgctcttctacaccgcttcttttactgcgtggatgaaatcacaaaaggtggggcattcttcggccaaccgcgaggactggacgacttgacccatgtccaaacgcgcttgttccgagtataccgccctataaaaacacacctcgccagatccgatgcatgtgtctgctagcctactctccacatgcggtgattaacccctcacataaactccctactagaagacaagacttcattaatgagtcatgtgcgacgatatatcggaagctgctgccggcctgctgtaaatcgtatcaggcagcctcataatccctaccgctattgcagcgactgcacaacattagggacatcagcaacttcggcgaggcttgagttcacattgggtaggcccggtttttgcaaaaaataccaaaacgtactatattcctatgctacgaacttataaaccttagcttcaggtgggagggcaaagacataaaaggactgtacactttggtgggcaaaagaacggtaacaagtcttggccttgacggggttcttgcatgcttaggtgcccaaaatttggccagctggcaaaattttcgcatgaccttttttttaggtaccgaacattgggaggcaaccaaactgaacccacctttttgaccattttccgaaat

SEQ ID NO: 36812 - DNA, 969 bp, Oryza sativa
  unsure (1)..(969): unsure at all n locations
taggcggcggggggaaaaaaataaggtgaggggtggggggaaataaaggggggagggaaaatataggggtggagatatnntgtntncccccccccccccccggtgctttgttgtgnngtgcactaacncccncnnnnnnnnnnannncnnnncnnnaannnnncnnncccagaaaaaaccgccaaaaaaaaacacaccccaacaacacaccccaaaaaacaaacacaccaaaaaaggggggggggggggaccccacacaaaacacgggaggaaacaacggggaaaaaaaaggggaggaaagggggaggggacanggaggaggaggaaaggggggggaaaaaggggggggaaaaaaggggggggaaaaggggggggagaaaggggggaaaaaggggagggggaagaacgggggggaaaaagggggggggaaagaggggggaagagaggagggggaagagaggggggggaaaaagagggggggaaaaaacgggggagaaaaaaaggggagaaaaggggggagagaggggggggaaaagggggaggggaaaagagggggaaaaggggggggaaagaggggggaaaaggggggagaaaagggggggggaggggggggggagggggggggggggggggaaagggggaggggggggggggggggggggggggggggggggggggggggggggggggggggggggggggggggggggggggggaggggggggggaggggggggggggggggagaaggggggggggagggggggggagggggggggggggggggggggaggggggggggggggggggggggggggggggggggggggggggggaagggggggggagggggggggggaaggggggggggggggggggggagggggggggggaagggggggggggggggggggggagggggggggggggggggggggggggagggggggggggggggggggggaggggg

SEQ ID NO: 36813 - DNA, 646 bp, Oryza sativa
aacattaacagaaattcattgccattaggaagtttagcatcccttgagccatttactcctactgtttctgaacacatatggggctatcacaacaaaacacaaaatatcgatgctcactcatctctgttatcctcaaaacaaaaggagagacccagaaaagccaagcacagagctccactggaagacaactcaggaagaaaatagcaacattataacgcaatcacaaaatgttatttagacaatgctgattctactagcatgacaaacttcaaagttagaaattaatagatggtcacatagatggcgggcattattatcccaccgctccacgagaattggtgttgtttggaatgattttaagtacaagtccaccctcaaagtattgaataagaaattcttcaatagatgcaagttattatcagttatggtatattgtgatattcagcaaacaaaatttgcagagttatatgtaacccataacattctaatttatgtgcaagctttcagacatttcaagcatagttcactaaaggcattgacaatttagacacaggtgatcaaacattaacagaaattcattgccattaggaagtttagcatacttgaacaaatttactacaactgttcttcaattcatatggtctat

SEQ ID NO: 36814 - DNA, 743 bp, Oryza sativa
caaagtcagacgattatgataatatgatattagatcgcgacagtggagcatacatacatatacaggtggattaattgtttaactatatatatatatatatatatatatatatatatatatatatatatatatatatttcagaacagcaactgagcctgaaaaccacgaggtctgaaactgaattctgattcgttttggattatgtgtgttgcagagctgatatatagtacacagtaccatgattaaattgacaatggaccatattagttcgatctttaacataccgttcgtgcatgatgcagtggtgagtagcagaagtataaggatgattagatactttaattagcagccagatcacgattagctatcatgcaccctcactattccaacataaacaagtgtcgatgaaaatgtttggtcactacccctgcaactgcaattaaccacacctccatgtgcattccttttgcacaactgttcctaattaagtccactaaatcaaaccacctactcttacatcaaatttcagcaaatttggctgcatggaaattgcatttctagtgcactaattaattaactctgatcaagtaattaattatctaggccacgagatacagatagatactaagagttgtactacatgtgtatgaactatgaacaatagttaatatcaggcagcacccacacaaatgatttgtactctgtgttgtctacaagcgaaaaaaaaagaggaaaaaaaacaa

SEQ ID NO: 36815 - DNA, 639 bp, Oryza sativa
cgatcttgagtagtattccctctgtcctataatatagtaacctaatactagatgggatatctcatagtataacgaatttagacagtccatccggtactaggttgctatattataggatggagggagtatataagtacggagtagagaacatcctcaacacttgaagtaagtttttttttctgaacaagagggcaggagttataggatgaaagtgttatatgagcagagtttaatttgagcattggcggtagagacatcctattggctggtttatataggtccatttatttaatgcaaaacctcagttttcgttagcatgtttttaaattgctaaatggtatgtttcgtgtgaaaactttttatatgacaattgctctaaaatataaaataaatccagttttctaatttgaataattaaaaatcaattaattacatgctgagtaatgtttttttttgcgtgcccttatttaatacccaccttaattaggtcaaacaggccatagtggtttgaatagggccatagtgtaggtttcatagaattgcatataactttttttattgccaaaattgtcttagtatatggtaaaattctggcatttgctttgagagagctctgagttcttgacatcagttttgttt

SEQ ID NO: 36816 - DNA, 526 bp, Oryza sativa
tttggattacattgcagaaacatactgacatatattactccctccgtccaaaaaaaaaaaagacaaaccctagatttccgtgtccaacgtttgactgtccgtcttatatgaaatttttttataattagtattttcattgttgttagatgataaacatgattaatactttatgcgtgacttgtctttttaatttttttcatatttttttcaaataagacggacggtcaaacgttggacacggaaactcagagtttgtcctttttggacggagggagtatttcatacgcaataccaaattgacaccatattagacgccccactaacacatgctctaagattaaaaaaccaacagcacattaatgatctcatcaaaatcttgttgaaagttcacctacatgtgcataatatttgtgtacaccaagatttaacccctgatggatttacactcacttaccaaatgattctactaaaatattgataggacaaaattggtaacaatccaaataagtctttattttttttagat

SEQ ID NO: 36817 - DNA, 612 bp, Oryza sativa
agaaaaagttgttatctgcatatgttccagtaatttagatagcagatctagtcttttgtcaagctagatagcatataataggaaagtacatgtactcctccaaattgaagcagctaatggttctatttactaaaagagtttcctgtatcggcactattgcacagtatttgggcacaacttcagattaagttcacataacttcagattaagtgcatctaccagatcacatagttattttttgacaaacaacacaccaaaaaaaaatagtgtagaagactatggggttagccttgtcaatctcagaatcacgttgttgtgtcgggcagacttagttatcatactttgctacggatgcccactacagtcatttgaatattagaaatagatgaaactcagaaatatccagattgaagagctcacggcgtaaaaattaatagatatatataaatagattatactcttaacattttgtacttaagtactgctacagctaccaggtagccatctgtcaggatcagcccttcagaagtcagaaattgaatgataagcatttgaggaaatataattaagcctaacagggttttgtgggggagggggtatttactatcattg

SEQ ID NO: 36818 - DNA, 688 bp, Oryza sativa
tggagaaaatttagatcattggtataggatagatgaatacatcattggtaagatgtaaaagtgtacggatgagagatgagtaaattgaaacggtgaattattatagggcagatgggcggataatcactcagttcaagtcctcctcaattccggatcgatcgggagatgacgacggcatttctcgaaagcggcaaagatggtggtcaagatgggcttagcacgctcccagacgacgtcattgtcggaggcctaggcctgcgggacgttgtcagagcgagcgtcctctcccggcggtagaggcgcgtccctcatctgctctcccataggcttgacatcgatgtcgcagacttcatgccgcatgaccatggcgactcctcctcgtcggacgacagacaccggatcatgtcggcgtatgctaacgcgacaaggtggttgttggctccaagcgcggagagagccatcaagagcgtgtccctcagcttcctcatcgcggagccttacctgctgcacgccgtcgcccgcgccgtcgacgacctcctccttgacggcagcaacagcagcctggagagccttgagatggacatgtggaccgatcgggtcgctgccggcgccgcgaccctcgaacagaggcgcctcttcggacaacgcttccagtcactcttcgacgcttacccggccccgttcaggt

SEQ ID NO: 36819 - DNA, 1206 bp, Oryza sativa
tttttttggcttttatagcttctttgtactgtacttgttaatgcagttttatattcccatgaagaaaacattagcttaaactggaaatatacaaagatggaatgtgtttaatttagtagaacacaagttaaattcaatatagagcatatgcaaatacaaatttacctccaaattttcaagagctttctcaaatttaagtgccaattcaggtatgcagcgcatatgcatactagttactaggttttgtactggcagtacaacctttacaaatcctggatgcgacgtggccttcgtcttcttgggccatattctttatagtatagcattatatatttatgctcccttttggatttccaacctgtacttttttcaggctgtgcaaattaccatacaaatcctttttttttatgatttcaggagaacaatacgattgaaattaaaagattcgataaggataggcgtcgagattttgtgcagatgctgaagggatttattgtaaatcaggtataagaatgctccactagtatttggcgagacaccatgattattacactgtatttatccgtagtgaaagaagaggtgtatacatgtcaataacattggtatatattactgtgtgcaggtttcatattcagaccattatgctaatatgtgggcaaaggtagcagacgaaactaaagtgtatgcaaaaaggagcaactgatgcggcttgtgtatagctagtagtaggatcttggtttattttgatttgctgactataacacttgattctccccagttttgccaccatgcggttcattgtattgctacatttgagttagagagagtttgggcgaatgggcttctcggtgacaattgacatacacgacatatttttccccttattttttttctcaaaaatccatttccctcttctagaaatctcttgtgcattttacggtcctacctcgtgaaactgatgtatctggtttgaattttgccatggacgcaatccatggtatatacaacaggcactttttcacacgtttctgactgtcaaggctgaggcctgaagatccagtggctggtatctttgcttatccacacacgtaagcattgtttcttcagtctacctgttgtctcgttgtatgctgctatgcatatgcaatcgaaatctcaatcttatcgatgtattaccacactgggagctacataatctggtcgatt

SEQ ID NO: 36820 - DNA, 616 bp, Oryza sativa
attgataaaagatggataaaaatagttctccagcaagctgattggttcgtttacccccattcagttttacgccacgtgtcatgaagcattcggcaaacgatcgagtgtctcgcgcatgtattgctgtcttcgtgcggaagaaaacaaaaataacagcagcttctgaatgtcgtctcacctcacgtccctggtatctaggccaaacactctcattaatctctcatccccgttctataaaaaaaattcaatcatcccagctggcctagctacattggcccgtgctgtgcacctgtgctggccgagttagctatcactgacttgttagctgaacccatacatgtgagtattgtagcatatatgacaggcttggaaaaaaataaatcaaaccatattggtctcatatacaattatttgtggcattaaattagtattagttttatagtcaataataatataatgagaatgaatattgatgatcaaattttggtgtcaatgccattttaaaagctaacacatcatatatttctcaaaaagagaaagtatggtatagtctgccacacaataaagaaaaaatgcccacacctttgactgggttataatattcatatattactta

SEQ ID NO: 36821 - DNA, 549 bp, Oryza sativa
ctctttaaaatatgtttatagatggcttatagcctactattgtacctgctctaagagcgagtttaatagcatagcccactactagctacaaatcatttatagccaatgtaataatcaattcatacaatagttgcttactatactattaatacttggtcccacctgtcatacacacattacgtcttagagtttgtgctatagctgactacagatctgtagtctgctactcttctctcttcatttatctctttaaaatatgtttataggtggcttatagcctgctattgtaggtacagtagtagtaggctataatctagttataaatactcctatattttaaggagatataaaataggagagagaagagcagcgggctacagatttgtagtcagctgtagtacggactccaagatgcagtgtgtgtatgataggtgggaccagatattaatagtgtagtatgtaactattgtatgaattggctattaagttgactatatgtgatttggagctagtagttggctatactattaaacttgctctaatactcca

SEQ ID NO: 36822 - DNA, 893 bp, Oryza sativa
agttataaatactcctatattttaaggagatataaaataggagagagaagagcagcgggctacagatttgtagtcagctgtagtacggactccaagatgcagtgtgtgtatgataggtgggaccagatattaatagtgtagtatgtaactattgtatgaattggctattaagttgactatatgtgatttggagctagtagttggctatactattaaacttgctctaatactccacccgttcttgaaaacttacgtcattgacttttttaaatatgtttgactgttcgttttctttaaaaaatttaaataattattaattcttttccaatcatttgattcattgttaaatatacttatatgtatacatatagttctacatatttcacaaaagtatttgaataagacgaacggtcaaacatgtgctaaaaagtcaacggcgtcgaatatttagaaacggatagagtagaagactataaaaaagctaaatgctgaagtggatgagagaggagaggagagagaggggaagtgggtggtaagctcacagccggcttaggtataggacaaaaaaataatctataagagatacagttagaccatatattaaccataaaaagataaccactatacaagttaacgttaactgggaggtacgtactgctgtaaagatctattcagtagacagctcgctatattattaggctcgctggggggggggcggtgggattctttcggatacggtggacagccgcgctctccgctccgctggcgccggattggaacttggaaggcgtcgcgtcgcggcgcggtgcggcggggacggcgggcgggtgcgtgcgggcgcggggcagtcaagccggggcctatccaattcggcagtccatatgcacgccaca

SEQ ID NO: 36823 - DNA, 1291 bp, Oryza sativa
tgggcaaacaaaggatcggggaaacgaaagcatatatgcaaacgaaaagtaatatgtgaataaaacttttatatacgtgttcttagcgatataaaaacaaagaataaaaaactttgataaaaaacctcaaaatattggaagtataaaatttggctggtaaacgtaagcataagaagaaagatgaggctcgagggggtggacgtgccatgatctcggacacgacgcggggctgcttcagcggcttgaggaggaagtagaggacgcgggtgacggcgacgatgaggacgagctgcacgccgagcagcggcagcgacgccgagagcgggctgccgccctggaagatgttccggccggtgcccgtggtctgcggcacgacgtagcagtcgatcttatccattcccaacgattcctcggcgtctgcctcctctgcatccgcgccccactgcgcgcgccggcaatggcgcggtcgccgcgccgctggctcttcttgccccccgcggcccgcccgcctcgtcaggctgctttggccatggcggtttgctgcaacgtggaggggatgagtggtcggagggcgagaagagaggagaaatcaatgacatgtcaaaaaggttcagaacttggtatcctcgagaatatattaaactcagtttgtttagctccatttttgtggctgtaaattgctgatgctgtagagagttcctgcaggagaatctatgttgttaataatagtaaatctaaaattggtgtagtgtacttttactgtggcttatacagatatgaatcaatgaacatatccatagaaatatggaattaacacaaaacagtctatgcttgatgaagataataactggataaattacactttgaactacctctagctcactttacatttgttgtactttgaaacacttctctcttctctagctaatcatatttatggtatccacctgaatattctctagccatatttatcatatatcctcccgtaaatgacagtatgtttataggttgacagtatcacgatttgtatcctagcatcttagaatactacgattctaccatgtcgaaatggtaccgatcccacctagtatcctaattttcatagtatctcaattctactattcattactatacgatcctacaaaatctttggtggtatccagattctacgatccttacgatattacaaaatattatttaaaataagatgggttaaaaataatgtaaataaatatgcttaagtttatataaaagtccggtaaatatatcaaaaccaacgtggcttctcttg

SEQ ID NO: 36824 - DNA, 701 bp, Oryza sativa
ccgactccgattggcgattggacaacactgaaggtcagtgactctgtgacgtaactcaataattttgcctcactgcttattgtcatggctaattagttagctcatagcttaggttgccaatttgtgatttgtgaatggctgaatgggaataaatcgctgctgttattgtaggattggaattagcttattgggtgaaacataaagaggattggggattggtattgacctattgtaatatttgctcattttgaacttgcttgttaaattagtcggctattgatgttataagatactattgttatttatgtgtcgccttttattcaaatttgtacttgtatatgagatttgccgtgtttaaaaaatttggtaagtgatttgaactattgaagtcggactagccaagaaaaattcctagctacaccaatagcccacttcaagatagcaattagtcttggcctggggttcggcaaaatcctgggaccagggcggagggctcagtagggcgaggtgtggcgctcgccgtacctcgtgccgcctgctgaccacccccccttcccccttcctcgtactcctccgcacagagcaacaaccgggtcagagagaatggcgacgcagcatcgtgagaagacgagcgacggccgagacgtgctgtggacgcgtccgcgtgtgccagtgctggtcctcacactgatagctagtag

SEQ ID NO: 36825 - DNA, 1636 bp, Oryza sativa
cctatgcactagacactatcaagttttgcattgggagagaatagtgtcttcatattagatgaaaaataaatatgattggtagaaaagagagatgatgtatttattaatggtccactttaagaaactatgggttgtagagagtgtagtttctattgtgatgtcttattaacatggcaccatagacactgcttatgaacactatgggttgggactgtcctaagtagaggagcatatatattgatataaaatagttttataggctggataagaaaaagaaaaccctaagagttaccctaagatgctagtgaaaatataaaataaattaccctaagatctgtgaaaatataaaataagtttgtaagtattgatacaacaagtgccaaccaatccgagaaatataaagacaagtggatagcaacgtatagctttttataatattagtagttcgtaaatctaacaaaatagagtaagtcatatgagaatagatgtcaaataggaacatatttgatggggcctactatatacgtgtttggttggcatagttgtcaaccgatgaacgcacatggtgggcccccaccaaatacgtgtttgatgggccccgcaatttacgtacaatgtgctcatcatattgatatgtataattgattattttgtgccaataatttagaattaacaacttaaatgtatgaaatgcatatttctaatcatgagagtattgttaacaatatcatgcatgccatgttgacaactcgagataacaaatctagaagcttgtgccatggggagcagtatattttccagcaaaacaaccgattattgcatgcattggtgataatcttttttaagagatatcgacgaaatggaagtacatgcaaattttttaatccaattaaattaacaaagcatattcattttttaccgtacgtataatttgatgtacgtacgtgaacatctcctcacttttctccacaagagagattttcccatcaagcaacttatcaccatatatacagttaaagttaatattagaacatggtgaatcgtattagatcatttggaatgcagaataatctttagtactccatctaataaagcacacaattaaatcacatatgttttcccagctagttgaaccctgcataccagctacaacactgaacactgtcatcacacaaccaaattcaccagtagtattaaagaatcacataaaacactgtcatcacgatcaatctttcgcaaaacccggtgttggctttgcaaataaatactccctccgtttcattttatttgacaccgttgactttttagcgcatgtttgaccgcttgtcttattcaaaaaatttaaataattattaattcttttcctatcatttgattcatcgttaaatatacttttatgcatacgtataattttacatattcataaaagtttttaaataagacgaatggtcaaacatgtgataaaaagtcaacggcgtcaaataaaacgaaacggatggagtagttgtagtactctacaagtctatagattttttcagatgtcgacactatgaatgtatgtagagtgtgacacattattgcaacatgtagtgagatgagttggcatgggcgagttcatcagtttagtattatatta

SEQ ID NO: 36826 - DNA, 1655 bp, Oryza sativa
gtatgagaataagttcaccatatcggatttatgatgtgattcaattctttttttcttgttgtttctttttgagagaatctattttataccactgagcttgctcaagttcaacaatttgccatcaacattgtcgttttctataatataccgacgactttattaattgttctacaatacgccattgggctaagtattcttttcaaaaatacctaaaatacccctatggatatatgaggttaacaattgatttatctaatttgaagtttcaaaaaaaaatgaaaactttcatgtggccttcttatacaacatggaaatttgtatagaagttttaagttttttacatttctattttttaaaaaatatataacttatttgttatatgctatataaaaatacttttttactattgtttttaatataaatcatctttcatacactacataagatatttttattctattatgtcttatataagcaaattctctttcacataccacataaaaatattttttctaaaaactaaatataccagaaaaaaacttgaaacttgtatacaaacttccatgttgtgtaaggatgccatttaaaaattttcattttttttgaaacttctaatgagataaatcaattgttaatcttgtatatttctaagggtattttgggtatttttgaaaagaaggcccagcccaatgacacattgtagaacaattgataaagtcgtcggtatattgtagaaaaagataatatcgatggaaaatcattaaacttgaataaactcagtggtatagagtagattctctctttccttttttgtttgaaacttagatccttttcatttgaaggtatacacgttatgtgatgtgaatggtagatacgtgattccatgagatttgtgattcagatatgtcttttgtcttttaatttgtcatggtagatattcttttgtcttgaagcatttccgttttgtgagtagtcccacactcccacatgaagcacataaagactgcatgtaatttacagagtttatagtttctataatcctctaactcaaatccggctcagcctgttttttttttcgagagctcagcctttttttactcgttcgtcacagatgagcccttttcagtgccgagaacatagagccacggtgccagatccaaatctagcactgttggcccttttggaaccgacactgaattagtgtcgtgtggtagtgaaaggaaaacacatacctgaacaatgcatcctcccagccctatcccttcgaagaactgatgaaatgttaacgcggccacgagcggtctgatcgtgcttgggctctcggatgcacctagtgatatcccgatgataatcgaatgcactatgatacccagctcaaacaccttcatccacacatgcaaattcatatcaaaccaagaaacgtatgaacattagcaaatttaaattaattaacgcgcatccatgttcatctcccagctatatatatatatatatatatatatatatatatatatatatatatatatatatatatatatatatatatatatatatatatatatatgacactcatatggggcaccatggttgcccgggcaccatggtttcaaatgcacaaaatcactcaaatttttcaaaattttcaaattgtgagt

SEQ ID NO: 36827 - DNA, 566 bp, Oryza sativa
tggacacggaaaccagggtttgtcttttttttttgggacggagggagtacaccttaggaatatggcggtacagtgtgcacccaagaagaaaatatctcccctttatgtcagatcggttttctagtagttgtctctcttttatctcttctagggctgtgtttagatccaaagtttggatccaaacttcagtccttttccatcacatcaatctgtcatacatacacaacttttcagtcacatcatcttcaatttcaacaaaaatccaaactttgcgctgaactaaacacaacctaggctttgttcggttaatccctttcacaaaatgattgaaggggaattagagataacttataccactcctattgagatgtgaaattagtcccccttcaattcattcattatagggatgaaccgaataaaccctagctaggcgtgatttgatggtgtgtgcaattatcaataagttattattaaattactccgattccattatgttccgccatttttcgcgtaaagataaataaaaaatggcgtcaactacaagtcaattagtactactagtacca

SEQ ID NO: 36828 - DNA, 622 bp, Oryza sativa
ggggagaccagatccgatctcccctggcgtcccctagcgatcaatcgcccattaggagtttcgctcctcacctcccttccccctccccttcttctcttcctactacaccataaattttaaaaaaaaataaaaaaacaaagttagaaaaatttatgtatagaaatactatatataaaaaatatttaaattcaaatttaaatttgaaacgggtatataaacttttgacttataaactttgggtctataaattaatatttgaattcaaattcaaatttgaatcgggtatgtaaacttttgacttataaactttgggtgtataaactttggatgtatagaaatactatatataaaaaatatttgaattcaaattcaaatttgtatcggatataattcaatttcaaatttgaatcggggatgtaaacttttgacttataaactttgggtctataaactttaggtctataaactttagatgtatagaaatactatatataaaaaatatttgaattcaaattcaaatttgaatcgaatataattcaaatagaaatttaaatcgggtatataaacttttgacttataatctttgggtcaaactttaggtgtataaactttagatgtatag

SEQ ID NO: 36829 - DNA, 1342 bp, Oryza sativa
tgatagtactgattgaaaattggcagtgttgctatagtgtcgacattcatcgattggaagtatgcaaagctaggtcatctctcctagattagattacatttgctaatctagtgccaatctagtggagttgcctagctatctggactttaagtgatgttaaaggacgtacactagtgctgtgtttagtttctaaaattgaggagaagtttagaaaaattaaagttggtagtttgaaaaaaaaagttaagagtttatgtgtgtagaaaagttttggatgtgatggaaagttggaagtttagggaaagtttggtgtgaactaaacggagcctagattagatttagcagacgaagtttctacagcaagccaccgtacttgatataattctttctgttgtacacggcaacattctggcgacgtatatatatgcagtcaaagttttgtgacttaatagttaatacatatataatggtattcatatttatcgaacaaaaatataaagagatgaatcatcgaggaaagcactaaagatgtggttatataggggttcaaaatcctggtgctgatgagtgtacgctctcgttggtgcatttataacaaggatttagtgaggcacgtgatttgttgccggtattactaaataatccttaatatgtcatttcaacaatcaagcaaggagtaaacactatattagttattaacaacaaataaatttgttttatgctatgtttggagagaaataaatttaatagctagctctgtaggagattataaatgaaatattatgttgttggccaagatttgcatcgcgagatgtggaaggtgtgtttagttcactccaaaattgaaagtttgattgaaattggaataatgtgatggaaaagttgaaaatttatgtgtgtaggaaagttttgatgtgatggaaaagttgaaagtttgaagaaaaagttaggaactaaaccaggccgaagataggaaaaaatgatgaaaagctaaggtttaatcatgaaacaaactaaataatatcccgtgcattgatacggaatatatggataaatatatattaagtatttaaaaaatgatggataaatatgttaaaaattacggaaacgatgtgagaggcgataattgaatatgctttgcgtgttattttgtaagattcaataaattatagatgatattgcatgcttgtaattattgttagtggataatggtgtagcatgtttacgtgttgaggtttaaatttaataggttataactttatacaaagtatagatttaatagacatgaattcgccgcaggtctttgtctcttttgtcttttgaacattatcaataaaaattt

SEQ ID NO: 36830 - DNA, 1334 bp, Oryza sativa
gagacgtacacatgacgtctagctagctactgcatctcctccgccttattagttgagtgagcaagcaagcaaccgatcaatcgatcaagatcgaaactgcagattattgatccatcgatcgtctagtggctaatcagtccggccctcctgctgctgcaggggtaccagcatatgcatctcttcaggtagcaaggacgacgacgacagcaaggaacaaagcgacgagaattgggggtagcagcagagcagctatagcttgtacgttagcctagcattgcagcgaatgtacgggcccaaatttttatgtcatgcccccaatcatcacatctcgagaatccaatgatcgatgcttgcttgcgttagataattccttctagctccctcctgttcgtacgcccccacacacattactaatgctgtgcattagcagcagcagcaacaacaacaacagaaaaagatatataaaatcactcgaacgaacgtttgcaacgcaacccgatcgatcgatgatcgaataaagcacaagcaacctgcatgttatagctagtgtatgtagcgtcattgcagtagtactcctaatattatgattagcgcagcagtacccctaatatatactattatgattagcagctagctagctgctagtactagccagctaaattaccaacctaggagtattgaggttgcttttatagtagtagtagatgaatctagcctgtacggatccacaaacatgtacagtactcttacaaagcacctcagacctcacctagttttaggatacgtacgtgcagtgaaacatcaaaatattaaccactaataataattgaataaaaaggggttagtactataagagtaatattaattttcttgctgaagataatcaactcgactgccaatggtgaatggatcgcggccattccacggtctatcccaataaatttgggacaagacctggcattatgagggaaattgaaagcaagcactgcacgcggggaggaggtgcagtttattttgccaactgcatgcccaggcaaccaccttcaccgtgggtggggtcatggcgagaatgaagctatagctagcaagtggaggaggaggagaggccacagtttccatggcgaaaactgggcgaaagtgcaagcgagaacagtttcatggtcagagaaaacacacgtacagtggcgaggagtccagagttaggtcttgtttgggggagcttgtcccagctgcagcttttcccaaaatctgcttatgctagaagctgtcccaaatagtctacagcttctaagaatctgtagttacagattctgaaaaattaaccaagaaggcag

SEQ ID NO: 36831 - DNA, 787 bp, Oryza sativa
tttaaaaaagaagagaaataattgattgctggggcgttcgcgcgctcaactgagattaaattataactacttagttaattaattcttcgagcaacaataacagtttggctggccttgatgcgtttccaattttttgtgtggtttgcctttgccacaacaggtataagcatgaaaatgtgaaacatgcactaatccggttcttctatttcaatgaaattggtcaaaaaaaaagagaaagaaattcaattttgtaggacacaggagcaggtgaggatgccacctcctccaccaaatgtgagatgcacatgtcgattcctctgttttcgaagcagaaaagaattgaagtgtgtacttgctgctccatgcttgccgtacttaattactctcatcaaagcatgcatgatagatcttcagacctaacgaggaattaaagaactactcgtacttctattactactcttcgcagagacgaaaccggagctggaattattaattaataaataaataaactatgagctcctccaaaaataattagctagcagcatctaatctactggtagtttatggaagtcgtctccatgatagtactgattgaaaattggcagtgttgctatagtgtcgacattcatcgattggaagtatgcaaagctaggtcatctctcctagattagattacatttgctaatctagtgccaatctagtggagttgcctagctatctggactttaagtgatgttaaaggacgtacactagtgctgtgtttagtttctaaaattgaggagaagtt

SEQ ID NO: 36832 - DNA, 619 bp, Oryza sativa
catgtcaaaaaggttcagaacttggtatcctcgagaatatattaaactcagtttgttaagctccatttttgtggctgtaaattgctgatgctgtagagagttcctgcaggagaatctatgttgttaataatagtaaatctaaaattggtgtagtgtacttttactgtggcttatacagatatgaatcaatgaacatatccatagaaatatggaattaacacaaaacagtctatgcttgatgaagataataactggataaattacactttgaactacctctagctcactttacatttgttgtactttgaaacacttctctcttctctagctaatcatatttatggtatccacctgaatattctctagccatatttatcatatatcctcccgtaaatgtacagtatgtttataggttgacagtatcccgatttgtatcctagcatcttagaatactacgattctaccaagtcgaaatggtaccgatcccacctagtatcctaattttcatagtatctcaattctactattcattactatacgatcctacgaaatctttggtggtatccggattctacgatccttacgatattacaaaatattatttaaaataagatggttt

SEQ ID NO: 36833 - DNA, 768 bp, Oryza sativa
cccttccctgccgccagatcgaggaggaggtagtggcggcaccggcggtggcgggcgcggtgctgggggaggaggccaaggcagaggtggaggaggtcgcaacggacgcccgtctcgtgcggtggccgacagcggcgaccgccaccacgacgttgtcctcgtgctcctgaagcggtggcgatggcggcgccaccgcagcgcggtcactgctccgccggatccgatcatcgttgccatcgcggatccgtcgtcgtcgtcacctctctctctctctctcttatcgccacgccgccggtgtcgtcgccgcggatccggtgtcgtcgcggcccttctttcttttctttcttctcttctcttcgccggtcgtcccctacgccaagcccacacggccacctcttcttcttcctctcgcctcctcctttgcatccgcctcgctcccttctcttcccatggcggctgctactgctctcacatgatcagagatggtgatggctagcgtcggcatcaacatgccgggtgtcacgcccagaaatttagcccaaatttctagactattttgtgtattaaatccatgtccaggcatcaaccaaggtacacaaaacgacaaattaatatacagatccaaacgtaaataaagcgtaaaatacttacataataggcagttagtcctcacaccgaaacgaaagcagcagcagcggaaaaaggcgatcttagcggagcttcagctccactccacaggcaaaactcaactggggtctgagccttggt

SEQ ID NO: 36834 - DNA, 602 bp, Oryza sativa
ggctcacgtcaagaacacgacgttccccatgagtaagtgaatattggacctgcaattgatcgtaaagttaaccggttaagatcatatatgaataaaaatcgtaagataaaaaattagattcaatcgtaagaacatatattgaagctgtttggttaaaggaaacgtatgtcttttctgccctttaaggcaagaaacccactcttattccctttagttatactgtactaccctatgtattcatgttggttttcctctgaaagtacggcaagggttcattttaccattcgtcaatcgatctgagagctattgaaacacacgattgagaaaatagaggagtaggagaaaaatacatggttagcagggctgcacatataaaataaaagactgcaataatcatgataaaaaaataaccgtttggttaggctatggaaaccataggaatttgagagataataaaagacttgaaaggaaatttttcatgaggtctaaaactcatgttgattttttttccaaaacttgcacggattgaaatttcatagaattaaatagggtaaaatcatttgtttcaaaggagcatttatgaaaaaatctgtaggattgca

SEQ ID NO: 36835 - DNA, 602 bp, Oryza sativa
agcaaaaaaaaacaaacaaacacatttttgacaggcgaaaagcctcaaaactcaaaaacacaaagtggcgcgagggtgggcgctgtacccgtacctgatccggtggtcgggctgcgacgaactgatgattgattcagacggtagcaatgctgcggcggaggagtggaggcggagtggagtggaggatgggcagcagggagaggggaagcgtttaaaacgaggaaacggagggggggggagaaagagagagcccgcagtaaagccgttttgttgcgttcgcgtggcgtgggttcgggtgcagggtgcagcgcgctagagaggaggagagagaagcggcacgctcttctcgctgccgccgcggcgcccacttttattgcctgcggccactgatacgtgggtcccaccctactgcggggcccgctcgcctggtcaaaagcccggagtaaaagcgcaacaaacaaacagctgtgctgtaccagtattccacggtttccaccagtaaagcatggtgctcgatcggtgtggtagatattttggcttgtcacggtttaatttgttattggttcactgtaacgttatatactctctctcttacactgatc

SEQ ID NO: 36836 - DNA, 642 bp, Oryza sativa
tctctctctctctcttcagaaattcgtagtacaattattttgccttacacatcttcgattgttctttaggagggaatcctcagaaattccccaaaagactgatggtgccagtgtaaggaaaacttccttttggttacacgatggtgccatatagcctgtttttattagagcacagggttgtcgatttgtcttttaacacagagaatacaatttcccctatgtattcttatctttttccactgcaaccatagttcactgaaatattcacaatccataacatggcctaatgcagcaaccttttaacctagggaactatttactcaattcttttttagcatttctttttttttgtttggtacagattatctgagtttctctaacaattgtgtttcatatcattgctggtttagtggagcatcggctatgagagagtctagctactagctacaatcagccacttcttgctagtttgttgtcctttgtggcaaggacagtgaactcatactggggaacacaggttgagcattctctgcacatttctaattatatgtttgtgttggtagcatagtgcagactcaagatgtttagatcactttagactaaagaactcttcagggaatctggctatgagtaatggcattg

SEQ ID NO: 36837 - DNA, 622 bp, Oryza sativa
ttttaacccaaaacaaatatattatcaaaatatattttatgttaattttaatgaaattaatttcgtattgtagatgttaataatttttcggaattgctagaaaacttccgcaagtttttttttgcccccaaaaaactttcagatttgtggccatcagatcgcattgagatttgtgcatgaaggaaaataattggtagaaagaaattttcacccatctcacgcgtaagaacttgatgctaaccaaaacatagtagaatataagttttatataagttatattacagttacagcgcagttgcagtgtggttacgatgtaatttcacttcaattatattatagttatatctgaaaatttttcactcaaaaaacttactgcggttttcttaatactccttaatctttctataaatttaggtaaacttaaataagtttgattaagaaaaaagttaaaataacttataatataacctgttctttcttgtttctgcaggcaaagttccgtgtcaggtcaatggtgacgatggcgctcttcttctccttgacgacccggccggcatcgtcgtcgggatcgggatcttctccgtctacgacgcgaacagcccaacggcgcttgtggtgcagg

SEQ ID NO: 36838 - DNA, 940 bp, Oryza sativa
cccccccccccccgccgctttcacgactcgcgtgacgcgcgagtggggccaacctgcagagtcatgtggccggagggaaagtaattcccctctacttcacgtacccctgggcccatatctctgacagtagcccctgacgctatatcagatatcgatttcctgggatcgttctaacatggcgcctcacgactcctcgagctggggttgtgggcccggcagggaatccaaaaggatatcaccgcgtggcctggttggcgtactaaccacaacagcggtttgaccgcctctgactacgctcatgataaagacgcttgaggcacgataaccagggggtcagttagaccacgcctagattctctcgcccgctactcctgcggcggtagcggtgacggtttgcccaacttgtgctcatggccgttgcaccctccacctcgagtgtgccactaacgggcgcactaaaggcggaagcggatacaatgggcgacgtgatgattgggcgcgggatgcgaagagacaaatgcgggcgtgaggatcgtgagggcagttattggctcgcgaaatgaggaggtgagcgcggatgaggcgaggataaaagggggcagagaaggagactctgtcttcttcctttcgccaaccgcccactcgtcctttcgcttctcgaaccctaatattctcgccacctcacactgtctcgtgctccacgctctccatcacctcttcgccggttgccatggcccaagacaccggcgacgcagtgctcccttcctcttgcatcacggcagacaggcaccttagccttccttgcaagatcatgccggcggtccgtcgtgcgggcgggagagtcgaggccgtggccgcgatatccggagcgatccgtgcacctcttgtccttcgccatggtaggcttgatcccgctgttctccagattcttccatgaagt

SEQ ID NO: 36839 - DNA, 531 bp, Oryza sativa
ggttcatgcaatgcccgtcacaattcacaggtaactcatccaaaagcagcgttggtactgtattgatagtttaatacacctaaataacatattacatttacctttcttttttcctttgagatggaaggcgcatgtacttaaacatcaagattagttccagacatactatgtcggatgcaaaacaaaagttagtaagcagaaattcgccagttcattttagcaaaaacacctgacagaaggtaaaaccagtcgacattctgaaaagaatgatacagaatgcagcactccaaactcaaaagtgctgccagccaactcagtagtatcatattgtttaaattatcacattcctctgcaatgaatatcatattccaccaatggatttcgtgatttggcatccatcttaagctaccgacaatctgatcatagaatagatcataggcaaagtcatgatagatagaacttccaacccctttttcgattgtttaagcaaaacatgaaacttcctaaagtaaataacagaaattcacacat

SEQ ID NO: 36840 - DNA, 605 bp, Oryza sativa
tattttaggatgaaggtagtactagcatatgtcacgtccacccaaaatcctttatatgatggtgccattcgttatgaaactattgtttttaaataaattaattatgacattcgttcagaagttcaacaaacgaaataaagctgcatatggtgccatttcattgtccattgtctggctcagaaaaagttggtgcgctttcttagtcgcaatcattaattgaaactgcaggttctatcgttttatgatctttggtactagtagtactaattgacttgtagttgacgccattttttatttatctttacgcgaaaaatggcggaacataatggaatcggagtaatttaataataacttattgataattgcacacaccatcaaatcacgcctagctagggtttattcggttcatccctataatgaatgaattgaagggggactaatttcacatctcaataggagtggtataagttatctctaattccccttcaatcattttgtgaaagggattaaccgaacaaagcctaggttgtgtttagttcagcgcaaagtttggatttttgttgaaattgaagatgatgtgactgaaaagttgtgtatgtatgaca

SEQ ID NO: 36841 - DNA, 509 bp, Oryza sativa
ccaaaaaaaaaacataaagacgctgttttcactagcacaattcatgcaattgaaacttacatgtaaaatttccaagaaaaccacaaggtttgcactgagaaagaaaacaatattggtactacgataaatgatttgacaggaataatgatcatttgatcagatgctggcatagtgaccactaccgagaattcacatgtcatacacacaatatatcacatcagcagtatacgaagtggcgaaacttgaatcaacgaccacccacccccaacctacccagcccaatcagtgcttcagccagcccattagtaagagagaacaatgagagatcgagataggcagctagggggccacaacaccacggtttcttcatgacacctctgcccaatgccgattagtgatcatgtcttgtcgttgaccatcgtggcgttgtcgagtctgaccaagctgccgcccacaggagccagggagtaaattctgaccattctaataccctaaatccttaaacaaca

SEQ ID NO: 36842 - DNA, 552 bp, Oryza sativa
agataagataaatgatcaaacatatttttaaaaaaaatcaatatatggaaatcggagaaagtattgtattcttagacaaaagtagtaaaaaaatttgcaactgattaccgctgcaaaacgcagaactccatcaattcccaagtaggataatcatttccaggacttatagggtgtgtgtgaacttaaatcctaaaaatacttggagcctcatggttaggccaatacagctattgttaaaatttaagtttcaaattttggttttggagatggttttagaaaaatcttaacgtacttttttaaaaattggcttttaggatgttttttaaaaaaaaaaggggaagcgaaaccaccccaattattaaaaagtggtttttattctaataaaatttaaatgttttatccacgaataaaccatttgtcatataatcaactattgtccactcaatagggctcttatatttaagaagagagaaagtataacagcctttttttttagacctgcaaaagtgatcacaaagaatggtagtggcggacggggatcctctagagtcg

SEQ ID NO: 36843 - DNA, 645 bp, Oryza sativa
agcgagtgtccgatagctaattactactagttttttttgtgtccgacagcaaattcgtgttcttgcggtgtctaccagctaattacacattttttaagtgtcctgtagcatctgacacgagctcaccttactctttatttttgcataaacattgaggatatcctgatgcacagtatttaaactatgcatgatttcttaacacagagtcgttgagagctgtgtttattaaggagaatgcaataatactccatccgtacccaaaaaaaaagacaaaccctgctttccgtgcccaacgtttgaccgtccgtcttatttgaaaaaattatgaaaaaaattaaaaaaaacaagtcacgcacaaagtattaatcatgttttatcatctaacaacaataaaaatacgaattataaaaaaatttcatacaagacggacacgaaaacctaggatttgcatttttttttgacggaggaagtacatgttatgaccatgtgattagttaacagcctaacttgcaatactgtttattagtcccgttgaactgtaacaaccatacggcagatactcccggagttggaccgcttgctcctaggatcagctacagacgacatggtaaaaatcaggcaagaacagcagtggaaacaaatcta

SEQ ID NO: 36844 - DNA, 1006 bp, Oryza sativa
tttcattttatttgacaccgttgactttttaccgcatgtttgaccgcttgtcttattcaaaaaatttaaataattattaattcttttcctatcatttgattcatcgttaaatatacttttatgcatacgtataattttacatattcataaaagtttttaaataagacgaatggtcaaacatgtgataaaaagtcaacggcgtcaaataaaacgaaacggatggagtagttgtagtactctacaagtctatagattttttcagatgtcgacactatgaatgtatgtagagtgtgacacattattgcaacatgtagtgagatgagttgccatgggcgagttcatcagtttagtattatattagttgacgatgtgtctgtttctgttaaccctgaccaggcaagaagcacaccggccgcatgaagtgtgccctagctctcgagaagctgcagatagaaagtattttatccaaactactcatctcgaaaacggtggcatgtgtcctcatatgagcacacatatgtcgccatctttagtgcaatcgtgtttagcagctgcaaattaacacgactgcagagataaagaattcattgatacgtacggtggcttcatttgattgggtcatgacgatgagaccccaggttgctatagtaatttaaaatggatttgactttgagttgcatattactactcctttgtaatgccatcttctttctttcttttttcctttgtaaaataattctcgtaatgtcaaatagagccttttaaaacttgttgacacatatatagtgaccaataaggcgataatagagaattcacgatagctacacgagaaacacgctaggaccctcaaattgtactgcgcgcattttgaatcggcggtatgggtctaattaattaggtttgttgtgatggaacgtgaagaggcatttgatagtagtggtaaggggtgtgtgatttcaaatctaaggtcccgtgttaatccccaacatacttataactttttttt

SEQ ID NO: 36845 - DNA, 771 bp, Oryza sativa
cattttagaaaaccgacaccccaaaactactatgtgtgctggttttagggaaccacaaaaaactgagccgatcaaccgagtggttaagtcccattacacgaccgactgatcctagagggcatatgcttcccctctcccaacctcccttcgtctcttcgtctctccccagcagccctgcctctctatgtccactctcccttccctcgatccctgtcacttgacccacaccggcaagtggcaccgcaggatccacctctccccagtgcggtgacgactctctacccctccctagcacatcggccactagatcgagctccctagagctcgggggttgtcggatcatgccacttggagcttgggggccatcggttgagcttggtgacgttagatttgtcgtcaccttaccgatcgagttagcggtggcgaggttggatccatccagatcccatcatgatgccatcaagtcttaccatcgataacccatgtacctggttgtattcatgtcccattttcccatcactgctgctgaccccatcgacgacgagaagaaaaaagtatgagaataagttcaccatatcggatttatgatgtgattcaattctttttttcttgttgtttctttttgagagaatctattttataccactgagcttgctcaagttcaacaatttgccatcaacattgtcgttttctataatataccgacgactttattaattgttctacaatacgccattgggctaagtattcttttcaaaaatacctaaaata

SEQ ID NO: 36846 - DNA, 570 bp, Oryza sativa
tatagggcgaagtcgagctcggtaccccaatgttacaccaatattatacgagaatatcacgtgttaaaaactatgccagtatagggctcaaacctatatataatgatctggtaaatatatccctacccacccgtttgatctagatgcatgcttctaagtgccatgacatatcttatgcctgcaaaatttttgatgctaacggctctttgatattgctatcgatataacttccgcctgtgtgaaagacaacatgttatattgaataccaatactactattcgatactactatgagcaaaatgatacttcgatcctatttctgccgacctacttcataggtgaggggagcatgtaggcttcttggatctgatgctctcaatgtgattggtactctgaataattgatatcgcgcaatgcatacgtatcaaacacaacattctataccctatattgaaaatgatcctatttaaggggaaaaaatgtaaacctctttattagcataagcataccaaagggctgaactctacggataaatatagtggaatgttggttgcaaaactactatttacat

SEQ ID NO: 36847 - DNA, 628 bp, Oryza sativa
  unsure (1)..(628): unsure at all n locations
tagatatgtgattgttaacagattgaggagccaagaatttggttacaacaaagattataaaagcagtcttgaatacaatctgttcgtgaacagtcatcgtcctgttaaattttttctccaatatcctctgaattgttacaatggtaagtccatcaaaggaatctttctcaaagatttcacacttataagccttaacatcttttacctcgttttttattgcaggcaaaatctccttccgtccacaagggattcccaaaagtaggctgacatcctcacatgtcaaacaaatttcatgtctagatcnnnnnnnnnnnnnnnnnnnnnnngggtctagcttgcacagaatccatgctccgaattgcttgttcagtttagtcagcctcatggaaagcaacccatcaaactccatctgtttcactagctctttttgctgatcaccaaaacctaagaatagatctgagagaatagcaggagtgcacctggtgtaaattttttcttgtactacctttttacccttgatgccacttgtttttttggaatttgatactgcagaaccaggtagctgcttccgctgatgcatctttcttgcttgagccagccctgaaggactctagtgaaaacagaacta

SEQ ID NO: 36848 - DNA, 1049 bp, Oryza sativa
cgactctggaggatcccccacttcctcatcaacaactttaaggatccaagagcaaatgtaagaagcgtaaagaatagggaaaaaatttggggataatctgaattcgatgtggcttctctccctacttggatttgaagaggaaagattcaaggtggctagcatcttctatggcgccgccggccgccggacctcctcctctcccacctctccccaccggcctctgtcggggagctcgacgtcgcgacgctcggttggagctctctttccctctctctgcgccgtcgcaagcggggtggagctcgacgccgtgacgctcggtccgccctcgggctcgaccccatcctcatcggcgctgaccccatcctcgtcggtgccacaccaagtcgccgccgcatcgcctgtcattggccaccagacgaggagcaaagtgagagagagaagaagggagagaagaggggaaagagattgtcctacgtggcatcctgacatgtgggacccacgtgggtccaatgctgactcagccgctatataggacaaatccggcatcaatattgccctgggacctcgggtgatcggttttgtattgttaagagaccccacatatctatttttacggttggaggacgattttgtaactcgatgacaagttgagggaccttcggtgtactttttcctaggcataaatggggaaagcgccaaataggtctaatgggccggcctggcttatcacggcccatttgacacgcgactgcacgcttaaactagtttgcatgtttagcatagtggaaacttgaaggtcttaatttatttattttttatttgtgttgacgtgatggcaggtaaacttgaaccatgcacgttttgatattcttttagttatccaagatccgcaatctgattgtggttagttcttccaatggagcagggacggcctagataatgacgtcatgcaggaacgactcaaatcaatcaggttgggcgatcatggttgcgtgcaacatgtctcaactttcagctatggcaagtattgcaacagattagtatatata

SEQ ID NO: 36849 - DNA, 574 bp, Oryza sativa
atttgctatttatatgatgttggagctagctgctagctacctatattgaaccttctcttgtatctcaatacatatacgtgtttcttatctagctacaatggagcatatacatacatataaacaatagccttgtggtctgtcacccccattcccaaatcctggcttcgcccttgagcatacgtgctaggaattagctaggatcccctacccgttcaaccagatagatcaatccatacacccagcgctcgcatatgccccagatgaaaccaccaggaaagcggcatcaggcatctagatcgacttgtgcgaggaaagcctagtagtggccgagagcgaacctagcgagtaggggagaacggggcgagaggcaagggggaagatgtacctcgtggtggcgggggtggcaccggatctagccgggcgtggggcgaggtccactcgtcgccggcggggaagctcaccggcagccgtggcgcatatgcgtccagtcggcggcggggaggggacgatctccgcttcttttcccttcgccgcttgctcgacctgttgttctttgcttcgtctcgaggcacac

SEQ ID NO: 36850 - DNA, 613 bp, Oryza sativa
atcatgaggaatttgggcatagaaaggggcagtcccaaatcctatggcaaaggacatcgtacgcaactcctggacaaatccctcaacaccaaacaagtactcaggcttgtagcgcggcatctaaagacaagtgaaaggagggagttaagacatttatccaattaatagcacaagtttttggattaatttgaataaagttagaaaatcaaagtaaaaggtaagccaaacttgcaggataagttgaaacagttggaaacaaggtcacaaattttgtacttttgaacaaccggtttcaaaagaaataaaagaaagttataaaatcaacatgctaaatttatttcattgcagcaagattaaactaaacaatattgtaaaacttttgttggtaaaatgagccattagtacagtaatagatgtacagtactaataacgctagaataaattttgaacgagaaccactaaaaaaaatattaggaaatgcatgtgccattagtttggtttaattaaaagagaaggggaggagaacagttctacttttccaatatttttagagggcttctatgggtaaccatttggcataacctagggtcagggagctctgataccaacttgt

SEQ ID NO: 36851 - DNA, 640 bp, Oryza sativa
ctccaaaaggatgtgtactgcgcactgactaacaagattgctcgaagaaggagaagaagataaaagaaatatgatggagaagaaaaaaggaagatggagcgaaaacaccccagccggtagctgcaactttaagattattgtaatctatattattaagacaggttactgtaagctgaattataataagccgacataaaataagctgtgagccgtttgttttcctggattataagctgtttgttagctgttagccacccaatagtctaaaaaaacacctttagagtggattactagattgtagtaatctggcttatatattataataatatatcataataagttatctgtttgttttagcttatttctaataatccagattataataatcctaagttgaatgaaaagagccctagaccctagcaatccatccgttctataattaaattatttttaatctcttcagtttgtcctagaatatattcacttttatagtcattgtatcagagtttgtgaaaatgtggtatagatgtaatgggaatatagaaaaaaataattacattaggatttgataaaagtgtggatatcatagttttttggggttttgaatatgtgtgggatgtgtgaaaaatggggtaccgag

SEQ ID NO: 36852 - DNA, 545 bp, Oryza sativa
caatctactgtatcttttggagctttgagcccagcccagcacaaaatattcgaagagctcgctgctgggcccacgcggcactcttttgtgccgctgagcaccgggacccaccttgatctggccggatgggaccacccatacaaaattctctcccgtactttgaactcgattttgggacaggataggtggccgtgcatacggtccccgtcctttgggcatctgtaccgtacggctctcacgctgctcctgatgttcattaaggcactgatctactgcaatttctgcagaagattagtacagtactattacctgtttcagcttaagataatgatttttgtaaacatgtttgttcagtggtccattgaacggctggtgagcttgacaggcaggcagcacatttcgatttctatgaagaaagagtaaactcaaccataatgctaagcaggcaaagcatgtagtagcaagtgcaacggcaaagccatgatacttttatttatcttacagcactggctgtacatcttgtgctgagaagctggttacacaaa

SEQ ID NO: 36853 - DNA, 656 bp, Oryza sativa
caacttaggattattataatctggattattagaaataagctaaaacaaacagataacttattatgatatattattataatatataagccagattactacaatctagtaatccactctaaaggtgtttttttagactattgggtggctaacagctaacaaacagcttataatccaggaaaacaaacggctcacagcttattttatgtcggcttattataattcagcttacagtaacctgtcttaataatatagattacaataatcttaaagttgcagctaccggctggggtgttttcgctccatcttccttttttcttctccatcatatttcttttatcttcttctccttcttcgagcaatcttgttagtcagtgcgcagtacacatccttttggaggccctgttcttttcttaaaaaaaaactagataaacttttggataaaagtggtaaaagtggcacgcttttcaagttgctaaacggtgcgtttcgtgcgaaaactttctatatgaaagttgttctaaaatatgagattaatatatttttcaagtttttaataattaaaactcaattaatcatatgttattatcacctcgttttgtatgaaacaattaatctttatctttatctttatcttcatctttaggtgattcaaacat

SEQ ID NO: 36854 - DNA, 991 bp, Oryza sativa
acccgatattaataatatagtaagcaactattgtataaattagctattacattagttatagatgatttggagccagtagttagctaatactattaaacttgctctcacgcagatctggaccgcactctccaccctccctcgtggcccgtgcgcgcgcgcgcgcgcgcgtgcgtagcgtacggcgcatttcctcggcaccttccccaacttggccctgtacgacgttgttgactgcctgcggttacggtatggacgcgggtgccgagctgcctgtgggttggtgggtgggggtgggtcgctcgtatcgatcttgtcctcgattttatttggggggttaacttgccccgacgatgcgtgcgcggtgcgccccgcctgcctctctcgcccaagtggcctccgcctagttggcacgcggccggcgcgggagcccatggacgggccatgcccatgccatgcatgcgccaccccaacccaagggccagttgggagtgatttccttttggacattttgacttgacctgtgtgggcaaggttcagttaatcagttcgatttcttcgcacgtatttcgcgtgcatgtggatacatatatacgttcctgcgcaggacttttctttgccgaaatcttacatggttttatcgtttttattaccggtttgtttcgatttgcaaggtgcggctttagttgtgcatgctagaaaacgagtgtacagggcgaaacttcagcttcattgagaattgggatgacgccatgggattctttggccaagtgcgtaacgtaagtgatgatatgcacatgcatggatgtggtcagctcgatcgaagcaagaagccagcgtcgggtcatctggtcgctagttttgtttgcactttgcacacggcttcatcattgtctcgtggccttcgttttctattatactcataaatgggatgagtttcctgttcggttgatgatcatgttctgttttcagcgatcgtgttctcttccgttcc

SEQ ID NO: 36855 - DNA, 655 bp, Oryza sativa
ctattggtgtagctaggaatttttcttggctagtccgacttcaatagttcaaatcacttaccaaattttttaaacacggcaaatctcatatacaagtacaaatttgaataaaaggcgacacataaataacaatagtatcttataacatcaatagccgactaatttaacaagcaagttcaaaatgagcaaatattacaataggtcaataccaatccccaatcctctttatgtttcacccaataagctaattccaatcctacaataacagcagcgatttattcccattcagccattcacaaatcacaaattggcaacctaagctatgagctaactaattagccatgacaataagcagtgaggcaaaattattgagttacgtcacagagtcactgaccttcagtgttgtccaatcgccaatcggagtcggaggtggagcgccgcagcggggagccggagtttggagacctgccacgaaggattggaggagactggagaagacgagacgggcaggggggccaggcggccgcggcggtcggcggctggctgagccctcaggcactcggcgcctctgcgcgactgcggctgcgcgtctcggcgtccgtcgatctgcgccgatgcggtggctggcggggcgcgagaggcgggccaggcgacc

SEQ ID NO: 36856 - DNA, 646 bp, Oryza sativa
ctctatctgatctgtgcctgcactcgctgctgacgctggttctccttcagcttctccctgggtgacagtttgtcaccgatcagcgtgaccttccaacagtgtgcttggaggatgaaaactgacccagcttttggcacaactgcaggttcaaactttgtaattaagccacaaagatatgcagataatatctatagaatcgaatgtctccatgcaatcagagattgataacaccagccgatggattgactgacaagagtatttcaggtgtctcgagcaagaagcgttcaggttgctggatggaaatttcaagtgcgtagccctcagagcaatacataagctttcataacagagcaccttcctactgtaaatttattatgctatctcacattattttcagttgacagctcaatgagcataatatggaggaaaagagctgcgtaagaactatgtaaccgtatttatatgattgaaacagacactgacttgaggaaaatagcattcatcctatatacgcggttaaatattgcaccaggaatttgaagaattacctcggaagcgattgtcatctgatatgattccaaaagtctctgcagtatcgcgaatcatgatgccgcatacgccttggggtaccgagctcgaattcgcc

SEQ ID NO: 36857 - DNA, 564 bp, Oryza sativa
tttaactaaaactcttttccttctaatatactagcaaaaatgcccgtgtgttgcaacgggtgaaaaaaattctaatgataatatacgtttttcatgcataatcatgtcaatgacaatgtttgtattttaatgagcgacatgcttttttataaacgatgtttttttctcttgcgcgattttctcaaaccatttttcaaaaatggcgcatttctttctaacattttttttcctagcatgttctttttgctttttttttactgacgacgaaaaccatatttttctcctttttttgcttttcttttctagtgtgttttttgcatgttttttctgacaattattttctcgcgtgtttttttgcttgttttttcgaatgttctttttttctttttccaatacaggagaatatatgacgaaataaaagccgtgtagtagatgacaaaaaatcgatggatcctatccggctcaagtgtccatcaatttaacttttttctgacagttttttcggatcgatttgtttttttaataggcgatgtttttttacacggttttttcaaaccatttttt

SEQ ID NO: 36858 - DNA, 630 bp, Oryza sativa
ttcgatttcttcgcacgtatttcgcgtgcatgtggatacatatatacgttcctgcgcaggacttttctttgcggaaatcttacatggttttatcgtttttattaccggtttgtttcgatttgcaaggtgcggctttagttgtgcatgctagaaaacgagtgtacagggcgaaacttcagcttcattgagaattgggatgacgccatgggattctttggccaagtgcgtaacgtaagtgatgatatgcacatgcatggatgtggtcagctcgatcgaagcaagaagccagcgtcgggtcatctggtcgctagttttgtttgcactttgcacacggcttcatcattgtctcgtggccttcgttttctattatactcataaatgggatgagtttcctgttcggttgatgatcatgttctgttttcagcgatcgtgttctcttccgttccaaaatacaccctccgttccaaaataaggggtgtttagatgtaggggtgtaaaattttagcgtgtcacattaggtattatcactggtggagaaaccctttgtagtcccggttcgtaacccccctttagtcccggtttccaaaccgggactaccaatccgggactaaagatcgctatctttagtcc

SEQ ID NO: 36859 - DNA, 783 bp, Oryza sativa
  unsure (1)..(783): unsure at all n locations
gccgcccccgccgctttcaacactcccccaccgccacagcccccgatccggctgtgctgcggcggcgacggccgtggagcggtgtacggcatcatcccaccacgctcttatctcacacaggtttcttggtttttatatttttttcacacaagaaagagagagagcactagacacggtctggctacttatataccttggagcaaaacagcaaatcaccaatcaagctaaaccaatactgagatggtcatcacacaagttgacaacttactcaattacacttgccatttgtaacggtggtttttgcaacttggagcaagtggtttagggtcacttgtgagagttggggtcctttgggatggtgttttttctagcatcagggacaacaattaaaccgcaggtgatatgtacgtatgctgctctgtcgccatgtaatgtcatatagtcataatggtgtagactgaggctgtatagaatatgcgcttcttctgttatgagtccgagtgtctcagactgtttatcgatagattgcaggagccaaccgagctatgttaaggtaccctgttcagatctacggatgtagttgtgaaagctatcttctgagctaagttaatccaccatcagtctgcgcgctgtgcccatatactggccatactatgcatagttagctcagtcagattcatctagtagaattagactcgatagctnacagcccaataccattctaacttatgatgccatatgtttgagcctatgaattagcatgccaacgttcagtgaggcagg

SEQ ID NO: 36860 - DNA, 667 bp, Oryza sativa
agccttctgataagacagtttggtaacaccatgaaaaacagtcactcgactttcactactttgcaaaaggagaaaaaataaacataccttgagatcaatcaggtaaattacaggctagagtaaaatatattgcaaatatgaagttaagatgcccacacaagaaaatataaatgtgtttgtttgatgaatatgtgttcaggttttttggcccatggcctctgaatctgacttcaacttgaataaaacggatgctaaagttttgagggggtttggaaatcagcatgagttctggacttctggtaatattacaactactcctgtagtcctcccacaaaatgggttctggagtactaattagtgatttaaagggcttaactcctctagtccttccacaaaaagttcttcagataaaacagtacacttggtacagagttataactatgctggcaattcataaaaactgcataaagaaacataaatcgcagagatggtcgcatgacacatattggcatacaagtttctgtggtattgtggtggttatgtagttaaagcattagaggcacagggagttggttcacatgcattaacatgtagcttgaaatctttgcggtgccatacaacaaattgtttggattgcccacacaaaatgtgctgcccctcacggagg

SEQ ID NO: 36861 - DNA, 546 bp, Oryza sativa
tgcatttcctaatattttttttagtggttctcgttcaaaatttattctagcgttattagtactgtacatctattactgtactaatggctcattttaccaacaaaagttttacaatattgtttagtttaatcttgctgcaatgaaataaatttagcatgttgattttataactttcttttatttcttttgaaaccggttgttcaaaagtacaaaatttgtgaccttgtttccaactgtttcaacttatcctgcaagtttggcttaccttttactttgattttctaactttattcaaattaatccaaaaacttgtgctattaattggataaatgtcttaactccctcctttcacttgtctttagatgccgcgctacaagcctgagtacttgtttggtgttgagggatttgtccaggagttgcgtacgatgtcctttgccataggatttgggactgcccctttctatgcccaaattcctcatgatcgtcacgaagagaagtgccgagtcaaagtcaccttgaacagtaatagtgaagatattccctcag

SEQ ID NO: 36862 - DNA, 505 bp, Oryza sativa
gagctcggtacccacctgatcagtgcatcctttcacattgtccagggatcctccatagaccttaatccctggcactgactgcgccatcttttcattgccaccagcatgatccctacaaccacaaccacggattagttgggcttttcaattaccacttctctacatcgttgctaatgaattcagcaaaatctggcaaataatattctatgcatagaatgcacctgagagtaatcctaaaaaaaatcaatccttttaatgtatttgtgtttattttatcatatggtgcaaagcacttcctcagccgcatgctcagacaccgtatttctcaatttattataaaatcctaatgcaataaatcccaatctgcaactaactaaaatcactcactttctggtggtaggtgattggtccctgagggtgggattggggaaaattttggcacagcactgattgcatcccataggaaactctggaaggccaacatttgggcggaatttttccataa

SEQ ID NO: 36863 - DNA, 682 bp, Oryza sativa
taggagttggttcgtttaggtggcgattaaatgtagctcgtggcgatcctgtttttcgttcatgcggatatactgcgcggttccaacttgttccagaagatatacatcttgcttatcacgatgaagtctcattttctcggttttctattggagaaattggaacaatattaatttgagcatctgatgcaagccatacagattggatattgtaaactgtgtttaaatctgtgctaacagcgttgctctgtattaatacagtgttatagtccagtgcaattagcttaaaatgtagaatttagatagcattgagtgcccgtgctcgtattattagcaagctattgcaatagatgcatttatttatttatgctttggtgatattttctgccgtctatatatggaattttatgagtttggttggaggtcatgtggtcactggctatgatccatgctttttaaagaaaaatggtaaatatcctccttaaaaaggacacggttagatctctgtaactaaatggttctttacactgtgcaaacgaactcaacaactcaagaatgggttgtctatctggttaaccttttccttctctagtttttgagtatttattttaataggttaccattcctttgcccaggcttttgcctttcagtcagctgcaaaggccaagcgtctaccagcacgatc

SEQ ID NO: 36864 - DNA, 938 bp, Oryza sativa
atttaaaaaaatttagagactttaaccaactaaatccgagctaaaatgaattagttatgactttttgaagattaaatcggattaaaacacttatatggattttaattaaattatgacgcaataatgaattatttttgaaaaggaaaaaggaatttattgcgtcagcggctagggtttctcggtggaccgggcgcacgcgacggttcacgggaacggacggccgagatcgatcttatccaaaacggacggccgagatcgaccgatccacggccggaccacgagagacgacgacgatgacgtcagcggtgacgtcaccaccggcggcggctcgggagcacaagctcgccggcgaacgatggcgcggcggcgcgaacgaagggcaccaggacgtagagggcgacgcggcgaactcaccggcgaccaaaacggcggcggaagatcaacgaacggcgacggcgtcgaggaagaagcggcgtcgaccttcggttacagtaaataagtatttcaattagagtgtaatgctactgtaattccagttaaaatttacttatggaacaaactatctgatggcactttttcttataatatctgatggcactttttcttttctatttctttctatttcaattagatatgatttgttttggtttttacatatgtactacttttgaagtatttgataccctgttttttgctcgaaaaatctgaaatcatcttgaaattgagattaaactgcattagatcatgatttcatatgaattttacattgtttctttgtagttacatgtattttcaattgaaattgtagtgttcactctatatatttgtaatacaagttcactgtaactagtttcattatattctattttgagacattgaacaaatcaataatgatctattatctgaaatcttcattttgttatctgatgatgagagaa

SEQ ID NO: 36865 - DNA, 692 bp, Oryza sativa
tgactggtatcatggtttctgtgggtttcacagattataactaagtacgatcatgtgatacttgggaggtgccatgatcctcctcggtatcatggctggtatttactccacaaaaagtctacacccatgtaatacacttcatttgttcatatatggggaaatgatttttgcttccgtcaacttccagatcaaatatatgtacatggagtggacatggataagttcatatcatttgattcgatcgatgtatcgtctgacactgcttagagcaagaaaatgaagaacctcctgttgatggagaccgtcaaccaaagaaaacgcggtgggtgtcggcgtcggcgccaccaccacgctcacgccgttcttccgcattgacctcatgtgcatcggcggcgacactgaagaggtggagctgccaccaccacgctcacgccgttctcccgcactgacctcgtgtgcatcggcggcgacactgaagaggtggaactaccaccaccacgctcacgccgttcttccgcactgacctcgtgtgcatcggtggcgacactgaagaggtggagctgccgccgtcggcggacgcgagcaggtgccgccaccggcttcgccgccgcaaccgccgccgtcggcgccagcgagatctcacgcgccatgcccacggtgagagaactgtgagtgggggacttggataagca

SEQ ID NO: 36866 - DNA, 1560 bp, Oryza sativa
atccgtacacttttacatcttaccaatgatgtattcatctatcctataccaatgatctaaattttctccactccctctccgcgtcgcaccttcccgttccccgttccctgttcccctctgcccgcgtccctctcccgtctcgctctcctctctctctgaggtttttccttgcatttaaaaagatagtgtctgcctctgtgccactaaaaagttcgagcctccctctctgtcatcgtcgaactttatcgtgtcctccacaccattccgtatgtttttggtcgtaacggtgggtaacggcgtagccaaattacttagttgcccttaggcttgagaggccatttggtccaatatgctctctcctagcactctcctctctctcccctcagatgcagcaacaacaaaggagcgggaggggagaagacggcggtggcagcatcgctgcgacgatgacgatgacggcggcgacgacagtgctgggcgaccccgctgctctcatcgttcccgtccacggccgtcaccgggtgtgtccccacccgtgcaggcccggaaggtggatgacgacgaggcgctccttcgcgtgccccctcctcctcctctccgccccaaccccgtcgctgtcctttcgccgcgggcctagctccgcgtctctcatcgccgcgagcgccgacgctgcctcgtcgaatgcctcctccccccgcctacaccaccgaccgttacgacggccatgagacggtgcaggcagaggcgcagcgccgccgccgcgggggtcgacttggccatggggctagctgctggtggtggtcgcggtcgggccgctgcgaggatcggagggtatgggcgtagtggtcgccttggcgtcacggggaggagggggaaggagtggtggtggtggggaggagaggagaggagaggaggaagaggattgaagagaaggggttaacgatgatcggtgagcagccgcgcggtgagggcgacagcgagcagcgagctacgaggcacggtgagacggcggcatgacgctaatatctcaacggagagagggggatcgagggagaagagagagggagagtgattgaaagggcatgcagcgatatttttcctgtctgaacccacatgtcagagctgccaaacggttaaacccaaacagaacagtgacaggatggtgtggagggcatgataatggcacaatggcagacaccatcttttaatggcacacatgtcagagctgccaaacggttaaatctaaacagaacagtgacaggatggtgtggagggcatgataatggcacagtggcagacactattttttagggtgtgtttggttcttggtcaagattggatgggatacggcggtccatattttgctagatatggcggtccagtattttgtttggttgtgtgaatatggcgatccaattttttgtttggttgtagggacaaaggtggatttggtgatccaattttttgtttggttggaggaagtatggtggatttgtaggtgtggtcacctctcacttgagatggtgaatatacctcatcaaattaatacataatacacat

SEQ ID NO: 36867 - DNA, 948 bp, Oryza sativa
aaatttttttagatttttttatgacatttgttagttggtgtgcacgtgtgtacacatgagatcttgtgtgcataggatatgttgccgatattgatggtgttagtatttattacaaacaactaactaccacatatttaaataggcaaccaagtaatactaacatatttgattaaaaatgtatcttgtctatggcatattatgatatttttttttactcatagctagcaaaacatgtgcattttgatagtgcgtgtttattatactaccactctaccaataggtacgtataattatcatatatatatatatatatatatatatatatatatatatatatatatatatatatatatatataacactcactgtcacgggacgatttaagtaacgatcgatctgtacatatatacatgcctgtatgtataacgaccgtgcgagagtacgtacagttgcgcgagttgcccaccgtacgtgtattacgtaacgtatacgcgcgtacgtgatcgatctatcgccgcgctggatccacctgcatgcgtaccgttttctcagcgcgtacaaaccattattttactagtttgtcacaattactagctagcttgctctgtttggcctacctctcttatatctaacctacaagtgcagctatagttctagctcgcatagccgacggtcgtctcagtctcgtgtcccatgtcaaaatcgattctcaccatcaaatccggtcgaatctttatcaatcttctaattaagattggttgatgatttttgatacactcgatcttctctttctgtttttatcaaaatcgaagtgaatccataaaactcaggataaaaaaaaggtgaatagagattaaattcggtgaattaaaacggaattgaaaggagaaaaattgagagcagtggagaattaacttttacaattaattgagagaaggaacacatggg

SEQ ID NO: 36868 - DNA, 1449 bp, Oryza sativa
gcacctggtgtaaattttttcttgtactacctttttacccttgatgccacttgtttttttggaatttgatactgcagaaccaggtagctgcttccgctgatgcatctttcttgcttgagcagcatgaaggactctagtgaaaacagaactagagccaccaccacctgaaacattcgcacctgctgcaggactgcaaaggtgctgcaaatgcaaaaacataaccaaaacaaattagtaagagatacgatcaaaaaaagactcaaagattaggaaaaaaaaatccatcaatggctgccgcgagcttcgacggcgccggcgttggggcgctcggcgtgcacgcggcacattggggcgctcctctccggcagcctgcagcctgacactgctataccgtaccaatgtcgggttggtgctgttcatcgtcgccatggccggcaccacattcactgcaaaataacagatgaatatggcaacaaaccttggaactggagttctccatgctagacctttcaacgttatctgcaacgcagccgccggcgaggctactaatctgagtttagatgggttaagaactctcaaaacgcaaagaacggttttagatcgataatgttctgctcgacgggataatcatcctgctttctcgctttggataagcaaactgaagagcgaaaaaaccaccctgaaatatatctggtcagctgtctccgaacaaaattctatctacaacaaactcaggaatcttgattcaattttcgaatctgctacagaacagaaacaatcttgttgaccccgagggaaaaaaatacgggtaaaagaaaacgggtaaaagtattcgattcaataaacccgttaatagtcattaccattatctgggcaaacgaattgaattggtggcggacagggagggagtagctactcccggtagtagtatataattttcctatatatatatatatatatatatatatatatatatatatatatatatatatatatatctaaaaaataactattgcaacaaatgaaattatcaaatcctcaaaaaaaatttatcacaatcctaagtttctaataagagaaaattgcactttacataagataaaatataccttgtttcgttgtacaccagatttagcacgtactttctccttacaccagagttcattgttttagttaagtttcactcaacatcagggtactttatcaaatatataggattttcatgatatttcataaattttgaataaatcctcatgaaacaatggtataaattcaaaaaggttttataatttttaatcatatttcacacgatttttctttaatatagagttcactagtgaaagtatcagtaaacccattgcagagtaaaacaatatacgcattacccggcgcaattaatatatgcacaatttactcttctcataactcaaacaaagtagtcctaatctt

SEQ ID NO: 36869 - DNA, 856 bp, Oryza sativa
tatgtttgttcaatccctgttgggtgatcatagggtggatgtcgataatgatactcttaaaacaatgttgaggacctagcttacaacgagaaagaccatgagaagtttatcggttggtgagtaattccgagacacttttatatgctggatgtgtgcgaaacacacaaagttatctgcaaccttggatatgatccagcttaaggcaagtaattgatagagaaacaaaagtttcatccgttaggggtcctaaaagattccgacaaagacgatgtcagttaatactactttaaaaggcactcactagtggtggtggcagtgaatctataactgtcaccatatcactacttttgcagtttttataaattagcccatgatattttttgatgttatggggagcgtatcctatgcacatagaccctcacgtaatacacaccgtgtacaccaactaaaaattatcacaaaactctagaaaaaattatacatgtacttccaatagtattacatctatgtgcaaagttgcatcttcaaatttattctatatagagagtaaaaaaagataaaattttgacagaatgacaaccttaaaactgtcatattttttctgttctaaaatataatgaatttgatgttaagattttacccctaggtgtaatagtattgaaaaacatgcaaatttttttagatttttttatgacatttgttagttggtgtgcacgtgtgtacacatgagatcttgtgtgcataggatatgttgccgatattgatggtgttagtatttattacaaacaactaactaccacatatttaaataggcaaccaagtaatactaacatatttgattaaaaatgtatcttgt

SEQ ID NO: 36870 - DNA, 1345 bp, Oryza sativa
gcgtacgaacaggagggagctagaaggaattatctaacgcaagcaagcatcgatcattggattctcgagatgtgatgattgggggcatgacataaaaatttgggcccgtacattcgctgcaatgctaggctaacgtacaagctatagctgctctgctgctacccccaattctcgtcgctttgttccttgctgtcgtcgtcgtccttgctacctgaagagatgcatatgctggtacccctgcagcagcaggagggccggactgattagccactagacgatcgatggatcaataatctgcagtttcgatcttgatcgattgatcggttgcttgcttgctcactcaactaataaggcggaaggagatgcagttagctagctagacgtcatgtgtacgtctcagctgatttatatattaatgaaggagatggttttaatatatatggtgttgtttggtgtttggatctttctgatatctgaattaacgaccaatcagtgatgactagctacacttgcagatatatgtggacaatcagacaatgtagctagctaggtgtactactactacatggttccttgcttgcacgacgcaaattgtgttatttggtaatatgacactgcaagcatgtggtttgcagctgcacaaagcccggccaatgcttccacattttgctatgctgtcttctttttcagagctagcttagcttgcagcttgtgcagggtgtggtgaacatatatatatgtacagtgtagctactgtggttgagaggaagaatatgcatgcagattgaagacacaaagcatatgcatgcagcttttgcccaagaagaaaatatgccattggacccaatcgagtacttacgaaaaaaacactgtccatctcaaaaaaaaaacactgtttatccttttcttttgtgccataaagcagcaaccagtgtattaacacacacctgctatggtaatcattcatccatgactcagttatgaagtggttcgcgattttgtacgctctgtaattgaaaggctcagaatttaattaccttaaaaccacttgggcttttcatcagctgattaattgggtacatcttgttttgctagctagatttcttttgttagtttagtttgtgctaatggcatggagatgcaggtgactgcgtaactatatatcttacgcacagaggaatatgatatctgcttattatattttaggatggatactacccatcatagcaccttattaataaagtcgttcataatatatgttattacaatgcaacttttgcttgttgatgtttgatcagcttaattaattaatagcgatcttttcatccttgttgtaattaaaaaa

SEQ ID NO: 36871 - DNA, 1101 bp, Oryza sativa
tttcagagcgtcaagaaatccatacttgtcagtcaaaaccgccaaaaaaaatcattactttgggtgctctaaaaccgccaattcaatatgatttgcacaataaagaagcaaacagtaatgttcattttatacgagaacgtacacgaagcaattgcacacaatttaatgtgtttcgcataaatatttcactagttggatatataagcaaattaatccaaccggtaatgctcttgtacacattccattaagttttatatatctaccagctttaggtgagaacacagttcgatctgatttatacttccagttagtggttcatttgccctttgttttcctctaagatttgatagagatgtgtaatccaataaattattggcagatagaaacttattggacagttttatggattatttgtacactgatccatatcatactggcctctcaatcgatcgtgttaataaacaatagatatatgtcgtttttatagtgtaactacatgagtacttaatcccttaatttgcaaacagtacagtaattagttaggtgcccccaatcattctacttgcaatacctgttcttgtactattttgtgttattttatttctttcattttgagagggccgtgtaccatacatagctagatatagaataactatgagctcaacgttaagcaaaggtaatgcagaatgattctttttccagtgcagggagcactcaatatctctggaatgaattagtggggtctgatcaagattacttctaattatatttcccacaaaattatgcgctatgatagcatatgtacgaacactttatgatgaggatacaggaaatatgaagtcgaatatatcgccagcgtagctcttacagtgtatgccaatggcgctctgacaacgaaatagtaagagaaaaggacagagagaagggaaaataaaaggaagagatcacgtatctgtacgtatatgtgctgttcggtacagaaaaagagattttacggtcattaagatgttacacttcaaaaatagcttgtggcgcctcctaaagaattgctaaacaacagtactaagctagcaaggaatgcataatttgattaattagggg

SEQ ID NO: 36872 - DNA, 820 bp, Oryza sativa
aagataataactggataaattacactttgaactacctctagctcactttacatttgttgtactttgaaacacttctctcttctctagctaatcatatttatggtatccacctgaatattctctagccatatttatcatatatcctcccgtaaatgtacagtatgtttataggttgacagtatcccgatttgtatcctagcatcttagaatactacgattctaccaagtcgaaatggtaccgatcccacctagtatcctaattttcatagtatctcaattctactattcattactatacgatcctacgaaatctttggtggtatccggattctacgatccttacgatattacaaaatattatttaaaataagatggtttaaaaataatgtaaataaatatgcttaagtttatataaaagtctgttaaatatatcaaaaccaacgtggtttctcttgataaatgtatctatttgcatgacatatattattactacaatttttttatatataatggctatatgtaattaatataaatattaattaaacttaaaaaaagaagaaaatcttatatagtattccaatactacgatacgatactactttaagcaaaatgatactaggatcttaatactggccacctacttcataggtgaggggagtttgttggcttcttggatctgatgtgctcaagtttattgatatgctgaaaaagtgatatggggtaatccagatcgcaacaaagacaaatttagttagcctaaagtaaaaatgatttgattaaaggtgattcgatgtaaaactctttaagagtaaaagtagtc

SEQ ID NO: 36873 - DNA, 621 bp, Oryza sativa
ggagtatactatagcctccgttgatttgcagatggatagtggagattatggggctagcttatgcttgttactgtgcccctctgcgtaggatctcgtgttcgggtgatctacacgctcagctcgctctgatatcctgtcatattggtcttctgaattctgatcgctgaattcggttcgttcacgcggtgcggccaacggcgatcgagcaaatggtccgagcacaaggctgtcctatgtcagattcttcagatagaaggcccgtgcggtaaacttaaatgggcctcgcgttctcgtcgttcatgcatgtttgggccagaaaggacccatattcctccaactgttgacaggcccattatcctatgtcaaaacttcctttccttgggataaaggtccaaccggtgagtacctaaatggctaagggccccttgaatcgtagggtagaaaaaacagaggaataggaaaaatacaggattctgataagaattgatgtgtaaaatagagtagtgcaaaacatagtaaaaacacatgaatggtcatttgattggagcgcaggaaaaacgcagaaatcgtatgagagagatagactcaaaggaaattttctacgaggttggagctcttgct

SEQ ID NO: 36874 - DNA, 1198 bp, Oryza sativa
atataactttttttattgccaaaattgtcttagtatatggtaaaattctggcatttgctttgagagagctctgagttcttgacatcagttttgttttttccgtacttgttagtggccatacaacctcacatttctcattgacgatgctacgttttacacgaaacattccacactctgctaaactaaaattcactcctttcctatggtgatgtgaatgaggatgttaacttttttcccacctaaccaggttcaatttctatatttggcttagtatgtctcgtttaatatgcatgcacctgcgtgggcggaaaaatttatagtgcaaaccacatacatagtataaacttggaaactattatatgatcgaaaaataaacgtttgatatctgtccacatcactatgagtaaaaattttactcctcgttaaaactaatagtaaattttgtattcagtgtgacatggatgaatctcacacatacggtagtttacaagtttgcactatatatgtgtggtttgcatcatatattttccctgcatgggttggggttttgcacctctagcatgcatttggttcaaagggttgggtagggttgaatttactttttaagatgtttggtttggggacagataatggtatagtttctaatagggaatattctcctaaggtccgggttaacatggtcccttaaaaactgccagaccaatctaacctatttttttcactcgttgacatgtgagccatctcttaaaaagtaacattattccatccaaaaacagagagatgattcttacccatcccacctcgtctccaaaccaaccacatgtctaatttcatttctcttgcaaatctttttttaaaaaaagccctaacaacttgaatataattttcctttatatcatagttttttttcggacaaaaaaaacgtgaatcaatatattagaagaaagcaaagtatttacaacgggcctcctactagcagagaccaacaaacaagaaatttgccgtagacttgtttatgcaaaatctgggtgaacctaaaatggtttctggaaacaaatggccggaagatatttgctcaacaacaacaaagtagcattgccaacacggacaatcaactaatacaatcaccaaggaggcaaggatcactctcagtggcccatcgtgcaaacaccacccaaggcacccaacaagtaaataa

SEQ ID NO: 36875 - DNA, 693 bp, Oryza sativa
tatggattaattaggctaaaaaaaattcatctcgcgaattagctcttatttatgcaattacttttattattagtttatgtttaatactctaaattagtatccaaacattcgatgtgacagggatccctggatcaaagaccacctaacaatgcctggctggttggttgcagcaaggggcaccaagaagggtcaaagtagaattctgggaaagtgatgtaccattgaggaacaataattaataatatagtaatgagggtgtttttgtcaaggtttttgctcttgtttatgtgccaacttgttgggggggggggtagatcagtggatgtaagaaaggagattgttgttatttgttaatgtggagccaaaggggttcttctgaagactcgtgccaaaagaaaatgggtagaaagattgatctaaaggtgaggggtgtatctggaatgacaggcttgtttggtagatcaattaggccacttgttgctcgtcattgttatttacttgttgggtgccttgggtggtgtttgcacgatgggccactgagagtgatccttgcctccttggtgattgtattagttgattgtccgtgttggcaatgctactttgttgttgttgagcaaatatcttccggccatttgtttccagaaaccattttaggttcacccagattttgcataaacaagtctacggcaaatt

SEQ ID NO: 36876 - DNA, 1157 bp, Oryza sativa
ggactcctatacttttctcccaaatggagtgaaagaaactgggcagtagctgtttgattattcgagatcttcttttttagttttttaccatgtcaatgctacaattgacctgtttgagtatttagatttaggaaacaacctcgttggtgagtcgtgggaccattaactccattaacaaacgaatttgcaacgaaattttcaggtaactccattaaaaattcaaactagatggtattacaactgtcagtccgccactaccattctttgagaccacaattgcaggtctaaaaaaaaatgctgttatactttctctcttcttaaatataagagccctattgagtggacaatagttgattatatgacaaatggtttattcgtgataaacattaatttatagataaaacatttatatgttttcttaacatcctaaaagccaatttttaaaaaagtacgttaagatttttctaaaaccatctccaaaaccaaaatttgaaacttaaattttaacaatagctgaattggccaaaccatgaggctccaagtatttttaggatttaagttcacacacaaaatttaagtcctggaaatgattatcctacttgggaattgatggagttctgcgttttgcagcggtaatcagttgcaaatttttttactacttttgtctagaatacaatactttctccgatttccatatattgattttttttaaaaatatgtttgatcatttatcttatcttattataaaatatataattattgtttattttgttgttacttgatttattgttaaatgttatttaaccctgatttaaaacttttttatatttgcacaaaattttatataaaacaaatgatcaaatgtttattaaaaaatcaatgacaacacataataaaaaaagtagagatattaacttttaactatgtatctataaactagatatacttttgtttagataggtggcagaagtctcactaagccttgtttagttctaatttttttttcaaacttctaacttttctatcacataaaaacttttctacacaaaattttttatcacatcgttatgatttcaatcaagctttcattttagcatgaactaaacacaccctaatttaatttttaagaccaaggtagtttgcaggtcgtcggcccg

SEQ ID NO: 36877 - DNA, 1709 bp, Oryza sativa
ccttgtcgtagcgagggcggcgtcgacggcgctgccgaaggtgcccagccagtgccgcttcccgcggttgggctcgcggatctccgagacccacttgccccaccggcgctgccgcacgccgcggtagctgcccggtccccgtttcgctcgccgagacgcccgggcacgggcaccgccggcggcgtcaggctcaggcgtgtcgccgttcttcgcgcgagcttgcttcttcttcctggccgcgctgcacgtgaacaagacgatgataaacatgtcaaccacaccaaaaaaaaaaagcaaaaaaagaaagcaaaacgacgcactcacagcacgaaatggattttctaagttttgtttgcagcaatttgtatcatgctgattgttctgtctggaatttactcaacgtcgactctgctttgcccagctaaaacctttgatggttctgtctgccttgcaaatttgcaacagagaacaaactcctaaaatttaacgctttgtttgagctttggaactattcaggccaatccctgttccatttcttagtgatcaatcctcagttcctcacctatctctacggtggaaatttatctagaaatgtaacggacataatagcaattactccatccgttctaaaatataaacatttttagcacagtcacatgtcaaacatttttaactttgatcattaataacaaaaaaaattaaaaagatcaatcatataaaattgatgttaccggatctatcatcaaacaaactatcgtaatatacaactctttttatttaaaacatcttacttttataaatattgttggtcaaagtagcatatctaagaccgtgctagagtccaaaaatacttctattttaggatggagggagtagcaaacatgaaatagaaaattaatccgcgattatttttttcagaaccaaagttgtaataacgcacaatctcaacatgtttcccctcctacgaacacatctatagttccaaaagaaacggtcaaaattttttaacttctaaaaaaaaaacctatcccctctaatttctccacaaaacgttcaaaaaaactctttgcaggtacactctcctatcctacgaaacaccgttatccaattccaatccttgggttacactaaaaatcctgcaccattgcaccatcacatcgcaagcatccacacatttcagacattcagttaggaccaaatgtctgacgctacctgcgatgatatttctgcctgcacaatagcggctaaaccacccgtatttctgaacgcgcaaacaaagtactgaatcacgccgccaaaattaagctcttacctcgacgacgccggcggcggcggcggcatcgctggcgccttcgtctccacctccatccccacgtctccttcccccgccgccatcgatcctcgcgaccgaccaacacaaaaatccacaccggccgcggctcttctcctgctcaatctaactcctcaagaaaaaaaacctgagacacaacgagatcgagaaacatgtgactacgcaacccacattgccagcgacgagaagatcgagagggtacccccaatatccatacttggtgcgcaaggcaaagaggggaaaggttcgagcggatggcggcgcgctccagaacgaacggcttcttcagttcttcttctccactccactctccggagacacgggtaaggcgcgcctctgtgacatggcaggtgggccc

SEQ ID NO: 36878 - DNA, 836 bp, Oryza sativa
tcgatctagttaattaatactccatctgaaacagatgcagtatattaacctagtatactagctagctaatatactgctacttctgtcgctctagtatattaaacagatctggttgtaagacgttttgattttggtcaaagtcaaactacttcaaatttaactaagtttatgcataaatatagtaatatatataatatcaatttagtttcattaaatcaataattgaatatatttttcataataaatttgtgttgagttaaaaatattattttttttctacaaacttagtcaaacttgaagctagcatgtattttcttggttcaccttcctctgtctctcggtccatattctacatacccatattggaacatagacaatgggttttatttttttatttttaacgtaaaccgaattttatcatattaacatatttaatttgtatatagtgatgaatgacaccatatagtctatatatgttgctattttctttaaaaattattaccatatattttgatgccatcctccccttcattagctattacattgtataaacccatctctctttatttttaagtttttatgtattatatatgtagagcgcggcatgcgcagctagccaaatacgtactccaacatgtccaataactaaacgcgtttcacaaaattatctgactatatcatgtctatcatatattgtagacgcccttaaaccctaaaaatccaatataatctagctagtatctcaaaatctaaagggtgcctatactacaacacatcttttataatttacctctgctttcagaaggatgacgtgctaatttatccagttaaaaatg

SEQ ID NO: 36879 - DNA, 591 bp, Oryza sativa
ggaagatgcatgagtgtaacattgacattcgttacctggtaactaagccccccattgttaatctgtcccaaatttcacctactactaaccttgcaactgaagtaatttgcagttgagacaagaaaggaagaagatgacagtgcggatacctaaacttctagtctctattctgtgtctgaagtctgaactctgaagcaaagtcagtcaaaccatatgccacaagacaaaaacattacagtgtcatcatcaatctcagcacttattttcatactgactagtaattatcatcagcagctactagtatacagcttagtttctgtttcttatacattatatgcacaattacagcatgctgctaccctcctaatttaaaaatgaaatctctgatcttgtcaaagaagcaaattaaggcctgatcgattgatcatctctctatgcactgtagtattctgaaacttttgaaactaatctgttcctgtctgtctgtctgtatgtaaaactgcagtggtgtagcagtgtagatgctgggccattggatctccagggccagtggatggatgtggtctaatttctagggttgatggatggcgg

SEQ ID NO: 36880 - DNA, 788 bp, Oryza sativa
cgaccacacacacacacaaactcatgcgtgagcttgagccactcagaatgtcgtagatcagctgaagacgaagatgatgagatcatcggagctaattaagttaccttgacgacggcagccttgccgtccttcccggaggccgacggctgatcggccggattattcagcctcgacggctggccgccggccgccgccgccgccggcggccgcttggaagagccggcggcgatggcgagggcgttattggacggcgccgagttgatagccgccatggatgatgatcccttgggagaaggctcgccggcgtgcattggctgtgaagggaagatgttgagggtttctgcatccatgtagagatcagtaaagtagcgattcagaataatactgagaaacatatgtccaaaaatatatgcatgttgatgaactaaattgtccaaattaactatatgtaatgcatggcattaattaatatattaacacatatatcaaatggtgtaacagcatgtcaacatgcatgtggttgtaagttctgttgtttcacacttatggtcctaatgtaaattaaagtatgaaaaagtgaacaaaagggagagaatatatatgtgtgtgttcatgtttgatgtcctagatatgtaaatagctagctagctagcagtagtatatatacatatatatgcaaatcgttgttgcaaatgtctctggatgattaaggttaaaaatgcatatatctagcttgctttagcattacatatatgtgtatatacgataatcatcctagcaagaacgac

SEQ ID NO: 36881 - DNA, 1051 bp, Oryza sativa
cagcaacggaagctggccgcggcgaggggcgtgtgcacttcacacaggcatttttcccaaattttttcttcgaacttccaacttttccatcacatcaaaactttcctacacacataaacttccaacttttctattacatcgttccaatttcaacaaaacttccaattttgacgtaaactaaacacaccctcagtcgtcgctgatcattttggttgtgtttcccaacaaacctccgtcccataaaaaatcagcctaatactagatgtgatatattctaatactatgaatctatatattcatctgattcattgtagtgttctagatttctttttttatggagggagtacaatttgtagagtaccattaatttacaatatagattaaaaatatgtattataaaataatagatttaacaccatttaaggtagttttcatgtttgaaatatatatttcattttataaaattgaagctaaatttatagttttgtgatacacatatttcaatatgtacgtagttttacaataatttgatcaaatgtagttttataaaatttactcattaggagtcattaggaggttgtcacaaataatcccaaatcatgcaaaagccaccgaaaaccttagtttaaggtaatcttttatcatgtatccaagctaatatacataattgctaccaaatgaatattttccatttaatgaaattctcagttttgacttttttaaatccctagtgaaggatcaattatggcttagatatagtgaaattggcgaatttaaaactttaactacttgctaaacaaatgtactctaccatggatataaataaatatataaatatactttttataaaatatgttattcatcatttgctattggaaatattcaacttttgattttatacgtggttgtatgttagaattcaattattttaaatattaaaaagttctaaggatgctttataaaatctactgttagagtaggtggggcagtaaatttactgacactaccattagttttttagaaatatatagaaatgaggttcacatccgct

SEQ ID NO: 36882 - DNA, 761 bp, Oryza sativa
atgaatttgaaaaaaaaaataattctttcatgaaagaatggtgtaaagtgtagtcagaagacgtacttcacgcaaggtaaaacgtcgttccatacatacgatattaccatgaacgtacttctcgcgacccaccttttcgtcacaggagtcaggatattccacatatatatacgtagctatcgtgatgaacaggacacaagctagggaacataaaattccaacaatatacaaaaaaaagtactcccttccttaaacaatattgctaatattgcgtcgacgttgatcactaatttcttttaaaatggttgaaataagaaaaaactaatgcgtatgaagcaaaaaaaaaacttttgtaatacgtaatcttttttagtatttataatttttgcattaaaaacaagattaaattaatttcaactttgtatatcacaaaactatatatttaaaaatttgtatcacaaaaattatggatttaacataattttcatttacaaaataatagatttgtattagaaaatcacatagatttaacatcagttttatcacaaactaaacttctgctatggatataaactataaaatgtatagttcttaatatcctcataatctgtagatgccttaaatatgcagatatgtgataaattgacactaaatatgtagttttggttaaaaaaaacgcatatttgttttgtgatagtttggtcaaatcatcgttttataaagtttactctaaaaacaaacattagaaattaaaagtcaga

SEQ ID NO: 36883 - DNA, 4603 bp, Oryza sativa
  unsure (1)..(4603): unsure at all n locations
attttttcgttgtttcttggggcgggggtgttctttcccgagtcggaagagaaggagaggtttgggttctccctcataagcccccgggccgacccggcaaaaggggggcctgcccggtcccccggttaggagcccacgagttccgttcttaggcgccctccctcccgtccaaatatatcctccctttggtactccgacatggttttgagaatgctcctttgaccagcaatatctatagaaattaaattgttttaaataaaaggagttgcatattatgatagtttgtttaatcataagtctagtaacatcatttttccgtgattattcttttttttttttttgctattaatagtcagagttaaaattgtttggcttatcccttttctacaaatgtttatattttcggacgaagggaatgagatattaggactagatgtgatacttcataatactgcccatctattcagtttcatagtgctatgctttgtctcatccggttctaatatctagtgttttggaagagagagcgtaatatctcgtgtgttcattagcgactccctgtcatgtgtcctcgcgggtgcgttcctacctcattcaatgtccccacattacgcccagctatgcctttttttggttagcggttttcgtcagcacatatctcgggccgttccctgttaactggtcaactgaaacacctccagatttcttcctacagttcaagagaagaatgcgaggatggtatgaggaatatattgatagtttgaaaagtcaatttctgatcaagttagcatagctgtacctaatttcctattcttacatctgtcattcggtttaaaagcctacataaataatctcacttcaccttttgaacttcactgagaaatatttgagattgaaattgactgggaaatattttgaatccacttacaagtcaatgatatatagcatgtgttagttccgtggagcaagtcaagcaagcctttgtaatatcattggcaagtagtttgtcatgtgtagacagaatattgtcttgatttgttcttctaggaactgtttaggggaaaacacaattttagacttaaatatattttcaccagtgaaagaataatgaagtaagtactatacgaaccatgtttcttgcatgttttaaaaaagttattagcaaaatgcagacaaccccttagatttcaatgtatatcctcccaacgcaactacattagccgtatgatgtctagagtgtgtatgtagcacattatctaaaattattagttgtttcattctgtcaacatatgattcaacactaggatggtatgtaacaaaggcaactatttactaatctctagagttcatcccaaggacacatccttaaaaatttgaaagagatgctcgaaatgcaatgggtacaccggtccaaaccttgtagagaatataatgtaaatacctgtataatccctacatacagacctgcattaaatgacactgtagagacgtttactacagtaaatgcatcatgatgaaaaataatgttttggctagtaaaagccccattatagcacaacccttcacgatgtagtccagcaacatgcatcaacagcttctgaatattgtaggaggcaaaatataagaaagaccacgtcttggggtacaatgattccaacatcttaacgatctagatgtaatggaacagtatggtacaataatctgtcattaacattgatttttttttatcgaatgtcattcacctacagcaaaacacaatgttacaacgttatagacacgtataaataaagaaaattaacatcagttttaaatagataatactcactgtccgactctttctcggtaacgtatttcaatagttgagtttcgatgtaaagtatactccgacaatgatttatcatagtcaacagtgcataggtgtcttgagttttgactcctatcttttgacaagcaaaattgactagagaatcaacctttgtattatatttatatccacttgcacagatacactaacaccgcatgccttgacaaatagtgattgtagcccctgtaaaaaaatggcaaaagagcataaacaccagtatataacaacaaagaacgaatgagagattgaataaatcttgttaatacgatgaagtgcatcaataaaaaaaaagtggcgtacacattactctaagttgtttacatgttataatcatgtacagagattagtttcaatattgttaaaaattgaaaatctaagataattatgtatatacacattactaagatgaagtgcagcagtgcattcaaagaagtggagcacacattactctaagatgtttatagattataatcatgtatacatattagtttcatcatttctctctagattaaaaattaaaaatccaagataattgtggttagcttcagaaagaaaggaattacgtcatactgctttgtaactaaaccgtcagcccaaaaagtagacaaatttatgcatgacttgagaattagaggggatcttttttacctagacttgagcaagtaagaagatggcgcaggcacattttgcttcacatggacttccttcacctcctcctgcgtgttcctgtagttaagacaacccaaaggacagaatccgcaaaagagcataaagagtagcaaatagcaacaaagaacgaatgcaagcatgattccctcccaatgcgaagggctgcaccatcttcacccaaaattttgttagtaagacaaaaccctctataattgccaatgcattaagaaagaaaaagaaaagaagtagcagcatgtttgcattacacatgggaatagcatagtccattctcggtcgcatccaaaggcagatggcgagggaggtatattcgaacaagaaaggaagaagataggtatattatgggagggagcccttagtagatctaaggagacacacacagcagaaccaacaaacaccacggatgacgtgtacaagaaaaggtaccttcttcttgcatagcgtagagttgccggagaactccatccatacgagagctaacattgctacagccttactagctggcatacaacttggcgcgtgcgcttccgtccccctctccatcgccagctgagatttattctcacacccctacagtgttttcaggtgcttaaagtgacatgctcgcttgggggaaacgggagtagaagcacagctgcattccacactgccaccttaatctttaaagttgtcatgatttttataataaaggaattgtacccttgttaagttgcactagatgaatctgagagttcaaattagtttatttcatccctgaatgttcctttctccttttttttgtggatggctacttgcaatgctatacttatatttgacgcttccgcaatgcttatgttttagaggagttgctgtcaaaatttctccttcttcattaaatgtatttctatttagtagcatcccggtgtctttgtagtttctggggtgttacacatcacctcctacgtgttcctctgcggtcaagacaaagacaacccaaagaaaagaatcgacaaaagatcaaacaacggtagatagcaagcaagaatgaatgcgagattgatcacatcctgcaagtaaggcgaagtgcaacaatgcatcaaaaaacaagttgcatgtctgcacacttcaatcggagcccattctcggatgcgaagcgcatcctaaggcctggcggcgatgcacgcaatcactgtcttttggcgcaatttcattttcaaatcagacatagatttgctcttttttattctatgtgtgtggggtcaaattttcatttgattcttttttattttgtgtgaagtcctagacgacaacatcacctatgcacctgatttttcttttccagatttccaaattactttctagatgtgtattgtaacacttgagcggtgctctaggagggagcagtatccgtgatacattcttgtatgatggattgagtacgtgatacgtttgaggtttaggttgtgatggggaaatatgaagtgagaattctaacatagagtagatataagggtgcacacacggcagaacgaagaaacaccacggatgacagcgtaaaagaagaggtaccttcttcttgcacagagtagagtcgcccgagaacacatccatgcgggagtcggtgtcactgcagccttagcagctagcgggctcgtcaagtcaaagcagccactgctcaacgtcgagcttgcctttgcagccatcgccgccgcatccatgcagcccttggtagctttgtccacgtcgttgcggcaacaagcgcatgcgcttctgtccccctaaagcacatgtctaccgcaacaacaacatctttgtcaatgatgacacaaatgatgctcgcgttcagtggatcaagaacaccaattcgcagtgtgttccacagacctcctcatcccttcacctcgcagattcgaccaagcaccacctgatgctctagcgtccagctgctgccatcgtcgttaagggcaaatgagctgagcacgaaaggatccttctaaaacaactcgatgtagcgcaacctaccctcgctgnnnnnnnnnnnnnnnnnnnnnnnnnnnnnnnnnncgaatgcgg

SEQ ID NO: 36884 - DNA, 538 bp, Oryza sativa
  unsure (1)..(538): unsure at all n locations
aaatgcttagtcgcgacgacagcaantaatccatgacactttgttggagnctaacgnnnccngggntgnanttnaagggaannnttgngatacaaaaanangnnnnaangtgatttttttgttannagnnannnnnnaaggaaaaaaagttttttttttattaaagnannaaaaaaganagccccaaaagcnnaaaanccaaannnnggnnnnnnnnggnnnnnnnnnnnnnggggngnnnnnnagngnaagaggaggggaaaaaagggannnaaaaaaagaaaaggnnnnnnggnggannaaaaaaanggnagnggaaaggaaaaaanngnaaaagaaaaaaggaaggngaaggggnaaaaaaaaagggaaagaggnggnaaaagggaaaaaaaaaaaaaaaaaaaagagaaaaaaaaagaaaaaaaaaaagaaaaaaaaagaaaaaaaaaaaaacaaaaaaaaaaaaaagaaaaaaaaaaaaaaaaaaaaaagaaaaaaaaaaaaaaaaaaaaaaaaaaaaaaaaaaaaaaaaaaa

SEQ ID NO: 36885 - DNA, 764 bp, Oryza sativa
  unsure (1)..(764): unsure at all n locations
tggcctttgatgacctacagactgacagnagctcatcaatgatgcagttttataaaaataaattaatagaaaaataattttgaaattatattaatgcacttttaaaagtttttttaagctgtcggtgatatgggaccgggagtatcatgaccagaggcttgaggcagacgcaatcgcccacgtggcctggcaccttcggggacgtcgggcccgagggtgaggtgtccgccctcctcctgatttcccccgagggggggtcgggttgtgcttgccccagatccgatgtgcctaatatgcaaacccacttgggtaggattaactcctattggtgtgaaacgagaacggccttactcacacttcatgagaagtatattgcagagtaacaagattaactcttaattaatgctatttaaggaggatgctaaacattttatgaaacccatggaaaccttgaaaataagatttttatgggaaccaacttttcttgcaccaagttctattaaaaagatttcaagtccaacatctagatcattgggcaagatcaaaggaagaacaaaaatttcattatttggttcagggcacgaaaatgggacattcatgtgagagaatgctcttgggagaaagataaggaatttcacaagaatgaggatcttgctcacaagtttttcaaatgcaccaaaaagggaaacttttcctatggttgtcctcccaaggatggaggagaaatcacattgtcacaaaaacgttctttatggacagaaggg

SEQ ID NO: 36886 - DNA, 775 bp, Oryza sativa
  unsure (1)..(775): unsure at all n locations
ccagattgctacgattgcatatgctnacaacccattgtnctaacatcctcaaatacaaagcacttccctagttagatgtaggttagacttcccgttcgagaaactttaccttctacctgccctcaatttatgcacgattaatgaatgccacctgggtggaagcgagaggtggaaatggaaggtcttagttcggaggtgggatctctacctgatagttgcattgccattcatgatgatcccctggcattcgttcattcagccattcaccattcacccattcaactggaattttggttgaatgcctgaattgtgtccacaaatttgggatggatagttagttggcttgctcgatggctggcttgatggctggctagattgatcgagaatggctggcttgcgatcagttgctatttagcatttgatgctatcttaattccatttgaaggacgtaccttatcgcccaacatcaactcaatctatattagaattcgcctcatacttcaggaacgggtgtagcctttgattgttctcgtgccccatgtagaggaggaccccaacattgaacccaagttcaaaagttctgttcaaccacccaaaacccaatgtgattctttttattctgcgggaaattgggattccatcaccaagttctacttttattcatagagaaccattggtatatctcacacctggttatttccccctttatatgaaccttttatttattacccctcgtgtttacggcccgacctctttttcccacgggtaagttatt

SEQ ID NO: 36887 - DNA, 533 bp, Oryza sativa
ctgcgtgcagcctttggaccaggatccaagctacagtccctacaggagaagtccagacagcattcattcatgtttatgtgctcctaaatataaatggatttttgttggatgggacgtatcatagggctgcgaatctagatgggaaatattttcagattataatactagaatacgttttatctattccaaaatctattatattaggtcggagggagtatatttgtatgagcagcaggtataaatggacgtttccggtttggtgatctgcatgcacaaacacatgcagctagcgcccaccgacgaggattacatgtatacgacctccggtcctaaatggtacacattctaaggacctgttttattatttcttgttttcaaactgttaaatgttgcattatttaaaaaaaattatatatataagttgttttaagaaaaccaaataaattcagttttcaaatttataataattaatacttaattaatcatgtgctaaggaggtttctcgttttgcgtgccagaattgtggagatcga

SEQ ID NO: 36888 - DNA, 755 bp, Oryza sativa
tcattgataaggttggaagttgtgttgtagtatatcttagcctcgctcccatgctcgcattgaacgtgttacatgcccttagagaaaaggaccgacctagccctatcgctactcgtgatggctcaggctactacatcctcatcgtcattcgctagtccaactcacgctgcaagtacatcctcatcatcattcgccagtccaactcacgctgcaagaagaagcctgtagctacgacaacgaatatgatgccaagggagaggactatctttaaacacctctagtcgacggatttggtctctctagcctagtcatctccccctccccctaaccatcatgaaaatgccagaggtggagctcgagctctaacttgacatggaggtcgtcgacgaggagcgaaggaagactgccatggtggaggagacgggctagcatgcgacagtaccaaagaccattttctacgataggagggtagtcatcttcgaggaagagaggtgggttggccaccaatctcattgcctagtgcccaccttttcgtcgttgaccgatgagagagagggaagagaggctaaatcaatcaaaaccatttggatagataaaataaatcgattttttataggtgagtaagtcttcatatccgatttaggttgagggaggaaaatcggagtcagggcatctgttgacagaaaacacgaggcctgggagatctgcttaactccagtgcaggtccaaagctcgccttcgggtgtgctagcgtg

SEQ ID NO: 36889 - DNA, 1425 bp, Oryza sativa
gataagctaaaatcacacctacccagtacatccttgaaggcaggccagacaacttacggttaaaagactaattggagtactttttttatttttgaatagtctaactggagtacttcacccggaaacaaaaccccattgtggcattgtgcattcaacatacccttatccacttagtttcaagaaaatttaacagcatgagatttatcctctctatacccgtggaccaagccggcagcacgttcgccgtggaccaagcaaggccggcgccgaccgatcaccgatcgataacagatgcatgcacgcacgcacgcacgcacgcacgcacgaacggcgctaactaacgataatatattcgtaccctacggttttttgccgacacgtatgcgtacgcaagcagccatcgacacgtagcccccgcgcgccgacgcggcgctcgtccgctcgctacctactatgtactactatagctgccacatccttcgacctccacgtatgcaaagttgcaaattaaactcactgtacgcatccacgtatacgccatgtgcgtgcggcggccggccgggcaaacggccgatcggcaaatcataaggcagccgcgcgcgcgtaatatataaccgtagctccaaggtaactgtgtctccatacacggtatatgcgtatgcattattatgccgtgtttatataaattgcgtatattagacaaagcggcagatacacgggcgcgcgcttagtatagagatatcggtagattgcaaggcctacgaaaacgatagctatacgctacgaaaccgatcgaatctccaacgtgggtgtgtcgacttgcgcctttggcacgacgcacacttgtccgccgttcgacgttatgcccaatcgcccatcgaccaaatacttctttttttaatcagttccggctagctagtttgtatacatgcatgcatgaatcatgtacatacctgataaataatatgctccgaacatctattatggccaatgatgtatacatgatatgctccgaacatctattgctagctgcaacataactgatcgaccaacatttgtcatgtcgctaactaagcaatcatcgtgcaagctaagctaggtgtatgaaatctgcaataggatatacagtgtatgtatgtgctagttcttacgagcttccgttattgttgatagctaacgattggttgctgctcgtatatttgtctggatatataacgatctatgcagctaatagcaaatgggtttgtctcggataagacaaatcactatttggtcgaacggaccaactgacctgatttttcggatctcttctgcacgtggtaagatcctgttatttcggcatctatttttcgttgtagatctcattttctcgccgctactacttgcaccaattaattaactataatatatatccgcactgtattt

SEQ ID NO: 36890 - DNA, 546 bp, Oryza sativa
gaaaattgattatatactttttccttattggtatggcaggggtattgtctaatattccattaaaccaggtaattttcatttctttttttttgtacgtgtgtgtgtgagtacagctggacacgcatacattactcacacaggtgtgcattttctatgtgcacttgaaataatgtcagagacccgcatgagtatgtgcatatatatacccccattatattaaaacgcatatgcatcactacaagacttgagagctctgcgggtgaacatactgctgtgtactcattttgggacaacagcactaaattcttctttcgctatgtatttgatgaaactgcatttgtaattccagaagtatgcattcctataagttaacaatatacgctttaataatcattaagctttctttgtcatcgagttgcatttactgacatgatggcttaggcttcgttcgagcgcatgaggaagagagaaagatagttttgttttccgggcgcacgtttcccgaactactaaacggtgtgttttttgcaaaaaatttctatagga

SEQ ID NO: 36891 - DNA, 1284 bp, Oryza sativa
acgaatgcacgcacgtaataaaggtacatgggctccctaaaaacagacacaatttatgaaagtatagaagaagtatggaaattaaaataaaggaaaattcacggcatgaactttgctatagtttggatattctcaaagatagatacaacaagaattcaaaaaaaaaagaattcacaattcatgacaataaacaacagtgtcaagttatacataaagagtaaattaggatttattatgtaaaagtactaatattaatagatttatcatgaaaaatgctttcatatatagttatatgttagtaactttttatacaacataaagttagaaaaagtaataagggaacatgtgtttttggagactgtgtttgtgtctaaaatgtaagtaaaagagaatggagataataacattcagttccatctactttgtaaatttcggcggtgccagccagcattaattaatgaacccatagcattgaattggcacaacaagaaaaaggagaagtctttcaatggtcaagatgcttttgggcggagataccacacatctaataatgattaaagattgaagggctaacctcatgtagcactggtacatgcttaatttaccgctaaatatacccacgtgtgcatgttctacactactatagatcctgctattgttggtggcctatttattattggtggcctatttgttatggatcaatacaacacatcacagaaacctttatctctaacatgtagaacattagcccgcttaagattatattgtccggaacaacctgccacaaatcgaggttatatgtgatatagtaattgtagcccgtcacggatcatttatgataggtcataacgacaacccgttatggatgatcccacacctttaacagtctattaacccatcactgataagagtgacgggtacccgatagaaataacaaatcatccctaacgagtttgttttttaacccatcaccaatgtggaaaaaccgattgagcggtcaattgcatgtcatccacacataaaagatcttcaagatatctctcttgctagctagtcagcctctcccttcttgttgctatctcccaccttcaccgtcagcaccaactccaactccaccagccatgccggcaccagctcgatctcgaccggccactgcagcctctagatctgagagttcaggccgctagcctcctcctagggtcaaatatgaagaacaccgtttaagcgtaatagcagatcaaccaacaaaactaatgttggactataataatggattaaatgtta

SEQ ID NO: 36892 - DNA, 1126 bp, Oryza sativa
atagcaaagttcatgccgtgaattttcctttattttaatttccatacttcttctatactttcatacaactttccaaagtttttctatattttatcacttttttaattttcaataaatcctaaaaaatcaatatatatcaagtttttatcgagtgtgtacccgagaaattcttatcaattacttgtaaggggtgtttcttatcaagctttgtttttcctcagatacataaacagacatttatttttttttctcctgacatttggacataccctttttttattgagttaattttcttctaatcaatttattataatttataatttatttatttattagattacactacagatgcgtacacactgagaccaattacacatgtaacaccacactcaacacctcagcaaatgtgacccttaacacacgctctaatagacgaagctagcgacacatcctgatctcattaaaatcttgtttaaagctcacctacatatgtgtaatatttaggaacatcataatttaaaacttggttgggggagtcatgcaccaacgactcaccgttgtattactggtgctcttccccataatttataattttatgttccatttgagactagtattgttttaatgattgagctgactcaagctagagcgaaagtaacatgtgtttgaaaagtatgttattttagttttgaaggaagaggcagattacttggagcaattcaatttaaatcgagccaaagagacagctaaggtggtattttttcacccctttataaggccttattggggaaatgcttcgtgtcgtgcgttcgatcggaagataaacatcggacaccaactttctcctttgtactaatctaaagttgattcaccttttccatgactctgactttacatatgcactattccttttctctctccacgtctcatccttgcatgtagctagcatttatttagcttcatgtagtctacgagtatatacatgcaagaggttctagttgtaagctttaaaggaattttccttgaaaactatttattcaatttactatccgattgcacaattgtatttgttgcaattaaatctctataacaagatatcaaatgattatattccgattaaaaaaat

SEQ ID NO: 36893 - DNA, 704 bp, Oryza sativa
acaattatctgcgcactggggcggaaaacaaacatggagcaactagggttgaaaccctatacctagctccgtaatccttattatatttttaaaaaaatgctatataatttgtgaaaaaaatagctcttatttgtttaggctgaaatcgctccgtaattcttattatattttttaaaaaaatgctatattattcgtgaaaaaatagctcttcattagtttagccctatgcgtgaaaattttcgagctctgataccgtttacacattcttctttgcaaaatagaatggaataaatggtgcatatttcaggttctatatatgcaaggatcataaaatttatcagatactctcatacatgtaattgtccatttgctgcttctcacaggagtatgctgaaatgactcataccaacatatattagttcacccgggtatctaacgttttgatgaatactactctctccgtcccataatataagggattttgagtttttgcttgtagtgtttgaccactcgtcttattcaaataatttatgcaaatataaaaaacgaaaagttatgtgtaaagtattttggataataaagtaagtcacaaaaaagtaaataatgattccaattttttttaataagacgagtggtcaaaccgtataagtaaaaactcaaaatcacttatattatgggacggagggagtacaatacaagatctt

SEQ ID NO: 36894 - DNA, 670 bp, Oryza sativa
cattatctcgcatatattctgcaagggattatgctaacaattgtttaagggaaaaaaactcatgagatggatgaatcatcatttgatgaataattgtataatttgttgtgtagggtcaagtggcagcagcaatgcaggggtgacatgcgatttgacagatagatctgtgctctggaagaggacaagttgctgatgcgagatcaaacacgcactggcgaatttgcaggcatgtgcagcggcagagtagttgtagatcgagttaattgtatggagagagcataatcttggtttgggattggcagcttgcccgacatcgaaataatataggacatggcgaaaattcggcgttgattaggggcgtacagtgtgtgatccgaccgaataaatctagatacttcgtatcgtcaaaatcgccataaattgtgtctgtttttagggagcccatgtacctttatttcatgcgtgcattcgttgtcgatgccaggaatggtaaattggtactagtataatttttcagatgatatgctatcgggttatcctggatatgtaataaagtagctgatcgtctggtttggtctgttttgcacttttgcttcgagtctatccgacgggtgccaaacaggggatatttaagtatttatcaattttaacgtggtatttaataattttt

SEQ ID NO: 36895 - DNA, 540 bp, Oryza sativa
gattacaagatcaaatcaactggcacgctagcacacccgaaggcgagctttggacctgcactggagttaagcagatctcccaggcctcgtgttttctgtcaacagatgccctgactccgattttcctccctcaacctaaatcggatatgaagacttactcacctataaaaaatcgatttattttatctatccaaatggttttgattgatttagcctctcttccctctctctcatcggtcaacgacgaaaaggtgggcactaggcaatgagattggtggccaacccacctctcttcctcgaagatgactaccctcctatcgtagaaaatggtctttggtactgtcgcatgctagcccgtctcctccacatggcagtcttccttcgctcctcgtcgacgacctccatgtcaagttagagctcgagctccacctctggcattttcatgatggttagggggagggggagatgactaggctagagagaccaaatccgtcgactagaggtgtttaaagatagtcctctcccttggcatcatattcg

SEQ ID NO: 36896 - DNA, 768 bp, Oryza sativa
gaacgagagcgagaacgaacacgtcaacgggcgttgccgcgagaacgtgaacgagaacgagaacgatcgaacgaacgagagcgagaacgaacacgtcaatgtacgttgccgcgagaacgtgaacgagaacgagaacgatcgaacgaacgagagcgagaacgaacacggcaacgtacgttgccgcgagaacgtgaacgagaacgagaacgatcgaacgaacgagagcgataacgagaacgatcgaaccaagacaagtgagaacgagggaacgaacgtgaatgagaacaagcgaacgagaacgagcgaacgagaacgaggacgaacgttaacgtgaaatgcaatatatatatatatatatatatatatatatatatatatatatatatatgtatatgtatatgtatatgttacttcgcatttatcctaatacatctttttgtatcttgcagaaaaaacgtgttgtgggagtcgtccgtcaagcctgagtggaagagctagccctagaaggaattggcgcaggcaagtgacgtaataatataaatgattgttatatttgtaatgcaattaattaagattattagacctgtaattagacttatcatataagattgtgtaggtgttctaatattatttgagttttaatataagattactttatttgtaattagacttagtatgtaattattgactaccgaagtggtgcgacaagtagcaattgactattgtagtcttaattagacttagcatatacgcccgaaacacttagca

SEQ ID NO: 36897 - DNA, 796 bp, Oryza sativa
aaattctccctctgaacatcctcctaaaaagaatcgctaaatgataccgcctccttaaaaagaccggcgtggtttcatcgaatagtatacatccatgttccccatacatcaattgacatatagacgaaaaggtacggctaattgttttcaccgaaagtatgtcatcacaaagttttagtgcgtgcgtctctcaacaaaaacagtctgacacacgcaccgagtatgtacaatagagaacatgcaaaatatgcccgcaacaacacatatattgaagcttaatttagccaaataatagttggttcacatctcgtataaatgttaagtaatctccactttttaccagcttcacacctcaagaatggagcctaatgaagcaagatagattgttcttcacctctcgaatagaggtctagtaaaaattaagagttgcgatcctcccacatggtcggttcaggcattagcagagaaaaatcttcgttttcaaacggtcgatttcgtaacccgaatgcaatatatgaccgatcttcgcatgcggctaatcaacccgccccgggggggcggtttttgcaggcgccgccacaagcggcccgcatggaacctaccgaccccctcgtacagaaaaacgatttttgtagtagtgtcgtgaatggatatattggaaatggtacacatttttaatctcaccaccatattactttgaattgtttttgaagaaccagaaagtttaagacccaatccatgatccaaactttgatgagctactgtaccatcggatggtccatggaagtcaaagcca

SEQ ID NO: 36898 - DNA, 515 bp, Oryza sativa
attcctgcagcccctccgaccatgtacaggaccgtttgtgtagtagtgatttttgacgattttatagatattcttcggttatcatcatggttactaagaatgagatttttgaacattttcgaagtttggatcatggtttgggtcttaaactttctggttcttcaaaaacaattcaaagtaatatggtggtgagattaaaaatgtgtaccatttccaatatatccattcacgacactactacaaaaatcgtttttctgtacgagggggtcggtaggttccatgcgggccgcttgtggcggcgcctgcaaaaaccgcccccccggggcgggttgattagccgcatgcgaagatccattatctcatgccgttggttcacacactcgactgttataatacgaatctttttctatgctaatgcatgcacggaccaggggggaggatcgcaactctatacttttacttgaactctatacgaaaggtgaagaacaatctatcttgcttcatttggctccatc

SEQ ID NO: 36899 - DNA, 684 bp, Oryza sativa
tcaaaacatatattttgaagctagattttgcaaaaaatagttggaacaaaccttgtcaaaatattaaaaaaactccactttccaccaacgaaatataacaaaaatggagccaaatgaagcaagatagagagttcttcacctttcgtatagagttcaagtaaaaatttcgagttgaaaacctcccccctaattggtgcttgctttaggagagagaaagcttcgttttcaaatggtcaagctcgggcctggaggagcatatatggccgatcatcgcatgcggctaatcaacccgccccgggggggcggtttttgcaggcgccgccacaagcggcccgcatggaacctaccgaccccctcgtacagaaaaacgatttttgtagtagtgtcgtgaatggatatattggaaatggtacacatttttaatctcaccaccatattactttgaattgtttttgaagaaccagaaagtttaagacccaaaccatgatccaaacttcgaaaatgttcaaaaatctcattcttagtaaccatgatgataaccgaagaatatctataaaatcgtcaaaaatcactactacacaaacggtcctgtacatggtcggagctcttttagattgcagatggaccgtaaccggtcacgtatgtaaaaatcatccttctatttttatgtgtagacctgaagag

SEQ ID NO: 36900 - DNA, 756 bp, Oryza sativa
ccggggtgattcgcttcgtctgcaagtagctcatcaagtgcatctcgcactactacagaaagcgtttttgcatacgggcggaatcgatcttcacatgcggttggccggcccgcatgcgcgaaatggtctgcaaagatcaccatttgcgcatgcggccgtcgcagccgcatgcgaagattgatcttcgcatgcggccgcttaggacggccgcgcgcgcggtgatctttgcagaccgtctcgcgcgtgcgggccggccgaccgcatgtgaagatcgattccgcccgtatgcaaagacgctttctgtagtagtgcgagatgcacttgacgaactacttgtagtcgaacccgaatcaacgctgctcttaagtttaccagaagccccttcgcgtgactgcttacttttcgttcataatggctcatcccttctttacgtttcgatgcttccggggcatcttccaactagttcgggcagtagctcctgcttttcatctttctacttcaccgtccttctttggataacccataccctttgttctaatcctgcttttgttccaattttttagattcttaaggcccttcctctcccaaaagcttgcccatgagggtgggggcttcccacttatattattggcctttaccctttttcaatgagtggggggattttcaacaagagatattctccccctttatacatacgggttccttagttgtaacccgccctgcaccttttctctcatctatacccccgtttctttt

SEQ ID NO: 36901 - DNA, 3801 bp, Oryza sativa
atcttccttggtaataacaaactgtactaagcctaccatgaaaagttgttacatattgatatctcattcatatattttactaatacctcttagcccactaccgcctctccaaaagaatctgggacgctgtacgtgattggtcactccttcatatccaaccatcggaatgggccaatgttgaaacagtacaagattggtgaattcaaatcacctcagcacaaaacatgccaaagaaagctctcaagttgataattatacttgttgcatgggaattatggaagaaaaggaactcaaggatcttcagtaaccttgcaaacactccggcctccatcatggcaaaaataagagcggaagtgcacaggtggctaatggtgggggcaaagtgcctaacagagctctacccgttatgtgagcagtcctttttactcccttggtctgggatgaccctaactcccatttccttatatctatggattctacttctctatcaatatataaggcaaatttcttgccttccttttcaaaaaatatatatatatattactaatatttcttgattggcatatacatatgtcccgttcgaacagtacggccacgcaaaacgaaaaagtcaatagcgcatgattaaacgatttttaattatttcaaacttattggatttatctaatattttaaagcaacttctaaataaaaaagtattttttaatagtttaaaaaagtgctaatggaagcggaagtaaaatctgtatcttaatcagaaaagaaccaaaccataatgtacatgtttggttggatatttggttttggagatttttcaacatttatatcgctaacatatatatcattttcttttggttgtctgtttttaccaggttcacttcctgatgaccctacacagctactctctccgtcctaaaaaagaccaatcctagcatcccaatgtaaaattagtggggagaaaaaaaatgtccaaaatagctcattattggaaaaagtagtaattgtgataggtaggtgaatggtatttaagggataaaatttctcgttgtatgtgttgagggtaggtaggatggtagaagttggttttttgtgggacaaaattcaatctccaaaagttgggtttttttagacgaaggaagtactatgaataatatgaattatagttctttcattgatgtcttgataaatgtgaattacgactacaatatccaaggctctgcctatatataaaataccgaactctaggtctgatatcttgtatcctattagaccacgtggcaacatatattttcagctaaataccatctagaaatctgccatgtgtcctcatcatggtcacaactcacaaacagttcccaccgaatgtgctagagctattgtgcctaccggtcacatgctgctccctccgtcccaaaaaaagataaactatggattcttgtgctaatgtttgactatccgtcttatatgaaatttttttataattagtatttttatggttgttagatgataaaacatgattaatactttatacgtgacttatcttttttatttttttttataatttttttaaataagacgaacggtcaaacgttggacatgggaatcaggtttgtcttttttttttctttgggactgagggagtactacttgtcttaaagaataccagtgaacagatgatgtgtcttaataaaatgaatagttaaattacttggctcttgggaaatatgaaggggcaactcatttacagggataagctaataaggccatcggtttggaaggtatcaaccagattatgagtatttggaagatattaagatgtaaaattaattcccttcaatccttttccatcatgattaaatgaataaggtctaaagaatactccctccgtttcagtttaataattcccttagcaatgggcatcaagaccaatgatatcaaaacatccatcattctaaaattaatcctcatcgatcaaggtgcactttcgcttcatgtttaaaaaaaattaattcacactttaaatattgcatgagttgaaaaatagaaaataattatggttggctacatgcatacagagcattccacaatgcacatttactctttccacaaataaacaaagagacatttcgaggaaacatcaaaaaccttacatgatgattaaactgtgatagagagaaaacctcaaaaagctatatattagatataacatatcagctcacaccttttcccgcctattataaatctgattatccacattgcttacaaaatttttaataaatcccttttattttatgattgggaataacttctatattagccatttttctggtctcttccatgtaagacgacctttttttaaaaaaaatgcactaatctatactttcttttgctttattataattttttattggatgtagcgtaatttgttcttctcttgatgggcccatggtgggcctgtggccttttttttttccaaacttccatttacccatgcttttaaaaataaacacatttttcaatttgtcgaaaaatttgtatgtttttggtaagaattttgtaaaaccttaaataattcataacttcaaaataagcagtactgcatatagaaaacgagtatatgtggttgcataacttttttgcataaaaaatcatcattaatatatattaaacatatcacaccaatgcaatgggtatactttatttcaagcattaaatggataaatacattaggtgtacctacaagcccatatcatttatattatcatacttgctagcccattgcacggcttttgccgcgtctattttctagtgcttcctttttttttctaaattacacagaaggcttttgccgcgtctattttctagtgcttcctttttttttctaaattacacagaacaacgcagataagtacgtcgtctaccactgaaagcacaacgccgttaaattaaatcctgaaaaattcgttcctatgggaagttgaacccaaaaccacaagtgctactgaggctcttgtaaccactaggttacaggccctttcgtattttctagtgcttcctaatcgcaggatctgagcagaatacttgtatgtaaacttaagcgcagtgcaatattgttatttcaatgtaaacatgtggtctgaggatacacacgttcttaactgattttttttctttttcattttcaaacattgattaagtgaatttttgtttttttttcattcaaagtaaaatatttgctttttctcgcaaatcatctcggccattactgttgttcctattgttgcttgggacattcctaacagcagtattagtattggctgttgattttggtggtggtgcttaatcatgatataaatttatgtcagctaatagtttctagattcgttgtatttggatatgtcacatccaaccaaaatcccttatatttagtgacgggggagtaagtccaagtatatataatactaaatatagaccatactaattaacctattaaaaaacaaattagggtactgaatacgtgtaacatatttgatttaatttatatttcattggcgcgcgttgcacgcgtatgattactatataaaaaaaattcgtttcatagcgtcatctacaaaatctcatccgtcgccgtctccgcgctcgcctggtaatccgtcgtcctcgccgggtcccagccggacaacggcggcgccggtgccaacgccgacgctgacgcgcgcgcgcccctcgtcttcttcgccgactgccgccgtcggctggacccgcccgtcgacccggcctacttcggtaactgcgtcgcca

SEQ ID NO: 36902 - DNA, 871 bp, Oryza sativa
aaatgtatttgaaaatataaatattcaaaaaaatactactcaagctaggttcccgcatggaaaacgatgttacccattaatacataattaattaagtattatccataaaaacttaaaaaataaattaatatgatttttaaaataactttcctatagaaaactttttaaaaagaaatcatttacgggtttaaaaagcgtgcgcacggaaaaatagatagatgaggtgggataaaagggaaagaacacatccttatttcactaaccactccttacttttctcccctttctactctaacgagcctccacggtctcacctccattcatatgatttttatataatcttacttcttttgtcctaagaaaaataacctttatatatatatatatatagaaattaatttatttagagatgagggtagtagtctctaaaagatcaaacaaatcatattcttatattcacgggaagagagagtatataatatactccctttgtcctataatataaggtattttggatggatgtgacatatcctcaggcacagattcgtagttctaggatatatcacatccatccaaaaccccttatattataggacggagggagtagcacatattaacccgaataatgatggaccaaagtatacatgctctactagtactgatttggtgcctagccaatttatttggcatgcataaagctatagtactatgctaattgaccacctacctatacgggcatactctgtgttcaggaggtggcccacacggaaaatgtaacgatacattagcttataattgattaagtattagctaacctgctactcattttgattgacgatactgctgtgcacgatctaatactataaatatt

SEQ ID NO: 36903 - DNA, 975 bp, Oryza sativa
ctctctcttctctctctctctctcagatttcaacacctttccacatcgaattaagaaggataatgtaaagtaagcagcgtgtggcagatcaagtacgtgtgtttcatacatggagatagctagcaatcgatccccatgtttggtttgtcgttttagtaccatgcaacgtgcgccctcgggtgttgggaacgtcaaacgagtacatatttgccttcgatgggaaagggggagacaagttgttaacatagcactgtcgataaaacggctgctagcttttgtaaaagaacaaatattagctagataacctctccgggttagggcccaatgtaacaggcaaaaccatagcttatatttttcggaattgctaaataattgtcgacaattttttgtttgcagaactatcgatttgtgagccgttagatcggcatcaagatgcgcacaagcagattgaaaaaaatcacatccacacttgtgggcatggatcgaacccacgatctcataggtgcatatgcttgggttcctaaccaactaagcaacaacatgattctgagcagtttttttgccagttacatagtagttacattgtacaatgtaactacgctgtaattatatatagtgtagttacatttgaaagtttttcatctaaaaaactgtcgacaggcttttatttgcaaaactgtcaatttgtgagccgttagatcgacatccagatgcgcacaagcagattgaaaaaaatcacatccacacttggggccatggatcgaacccccgatctcaccgatgcatatgcttgggttcctaaccaactaagcaacaacatgattctgatcagtttttttgccagttacgtagtagttacgtatattgtaactatagtctagttacaacgtaactacgctgtaattatagagtaatttcagcgtagttacaattaaaagtttttcataaaaaaactatctaccgttatatagctaa

SEQ ID NO: 36904 - DNA, 2397 bp, Oryza sativa
atcttaagccatgccaaagaatggatatagtaggtcgtttagttagttaaatcagatccatccttattgtgaatcattttataacttttgtcttttccacttctcttctatgcatgtttgcctttacctaacaaaatactttgagctaccagctttgtcgtcttatcatagatgtaaagtcactcacatttgaaatcagcgagtatttaacttggtacatccacgtgagatgtcgacatagtcgacctgccaagcaatatagggcaatcacactgagctcgatcgttggcaaaactaaaattaatatttacatatactatccaataagtaaaacatagagtaggtgaagactaattgtaccttctcgaagaaacaagtcatcatggaataaaaacacacaccaagaaagaatcaagacgctacctagctagcttctctctttgcagaaagcaaacaaaaaccccaccaaagaaaagaaatgtcattaaccctctcctgtggaccagcgtagttagaatgttgcatcagtgtgatatatgggcactggaatcatttgaaggtccttgtaccgtgtgtaagttgcacaagaaaatacggaagaaaacaacagatcgatgagcgtgtagactcgtgtagactcatcagacagtgatttcgtaatattaattagctgcatttcttaagggggaaatttttttatagatatatttaacgtatatttcatattatgaactagggagtgtgtcaattaataacaaggatatcgtattggatggaacttattttttctattttcttacatcgatcagatggtttgtataaattggaataaaattaattgagaatacatataaagaaaaaacatattcccttgcaaacattgtacatcagatatatcaactttttttctattacagggtatatgcgcacacgcatttgcatgtgtttaagatctttgtgggcatcaaaatttaaaccccagtgaatggtatataatacaccttgaaaaatatgcgttttgatacttattctagtagaacatattcattatattattaaacaagggtggaaagagacattttgctccaaaccatattaatcagagaaaaaaaaagttagataaagaccgataatcatggtaagtaaagactataacattgtatttatgaaaacataagtaaaattcatatgtcataaccaattcttttttttacttgaatccaattatacttttaggtctcctttgaaatgagggattgtgaaaacatagaaatagaaaaaaaatgcaaagatagagtatcatgtctgtcgttgaattcctatatgattttaagatcacaggaaaattccaagactattgtttggatgattacacgcatgaaattacaggaactttatcattggaaggaaaaaaaacatgatgcagaacctcatttacttcaaaatttctagtccatccgtcctgaaatataagcctttagaatttgtctcaaaatataacaacttctccaccaatattcttttttcaaccatttataatcctccaccattcaattttcccacctacctctacttcttctccaatcacaacactcccccatttaattttaccaattttcttaataaccgtgtcgaactctaaaaatgtttatattctgggaaggatagagtattgaatagcccattcgataagaattttagagaatttgagagaactatctatttattccaaagaagcgcatttttttcataggaaacaaattctccaaaattcctctggtttttgtttgttccaaatgagcactaaagctttaaaacttgtagaaaaacccacaagttatatcaagagcaaaaagaatccatcatgcttgttcggatgaacatctcacaattatttgtatttacagactgtatctgatgattttttttcgataagctagctatagtgcggttattgctcgttactctcacaaacgacttacataaagtaacagaggtaatagaagaaaactccaatttcaaattgaagcattaagattttttttcatttttttctcttaattaattactccatccgtcctaaaatataagcatttttagccgtgtccagattcatagctataagttattatattttgagacggagatagtacttaattagaatcaaagtttttacatatatatgcgcgaaaatctcgtcagctagcgtacgtctagactagaccgcgtaataacagcatgagattattgactagcacggtaaaacaaaagccacaaaaaaataaattcacaaagcctgagattgtaattgaagtcgtcgtcgtgtcgtcctccggcgccaacttgatcccaactgaaattgacttccttgaccaaaaacctcttctctgatctctc

SEQ ID NO: 36905 - DNA, 1471 bp, Oryza sativa
  unsure (1)..(1471): unsure at all n locations
gaggacaaggaaaaagcatgtacacaaccaaaatcgtgcggacatttttcctacgatatgtcgattgatcgacgcgtacatcccaccaaaggtttccgccgggacgnacgcagcaggtgaacttattgtgggatttttctttttcttttgcgagtaaggtgcactgacccctgtagatctcgatgaacagagatcttgctttgctagactagctagctccgatcatcagacaagcagtcgattaaagttgaccagtcccatctcgatgtgtcgcccttgatcggcttgcaggtcaagttgcaatggcacgcacgacaggacgcatgcactttctcataaaatattatgtaataacttacacctagagctccataataagttcactgtgggtttttatgtccaaagtttgacttacaccctgagtactatctactggtcttatttcaaaatttagtgctctctccgtccctagatatttgacgctgttgatttttttaaacatgtttgaccgttcgtcttattcaaaagatttaagtaattatttattttttttcctatcatttgattcattgttaaatatatttttatgtatacatatagttctacatattttagaaaagtttttgaataagacaaacggtcaaacatatttaaaaaagtcaatggcgtcaaatatttagggacggagggagtataaataaaaaaatataaatcaggtttacaataataaaattaatagttcaaatcctagcgtggtcggggtggagttgtagtgcatgactccacccaaagttaatatcatggtgctcacaaatattacgtagatgtatgtagactttcaacaggattttaatgggatataaaactggtttccgtctcttttagcgtatgttagaaggcacattggtggctgtgtatgttgcattagatgtatagtggtgcatgtgtatctcccgtgtaatcgaaaaaagagtatttatacttgttctttttaattgaagagtgaatttcactttgagccacctttgttaccaatgtttcactttggatcaccctttaatcaatgttttcagtttggaaatttactttttattgagtaaattttactttggactaccctttaaccaatattttcactttgcaatgtgtaatcttacctttgtttcacttttgactatccgactcttttttcaagcatatattaaaataaactagtttctacttgttaatgaacccatatctgtacttagagtactattgctttgacataaggtacaagttgatgcaaatggataaaatagttgacgatggtctaaagtgaaacaaagataaaactattcgctctaaagtgaaaatgctgattaaagggtggtctaaagtgaaatactgataataaaaagtgggaaatttactctttattcaatgaaatgaataattattttttaaacagtccttaaaatattaaactact

SEQ ID NO: 36906 - DNA, 561 bp, Oryza sativa
ggacctattgtgacccgttttggtatagcaaccaccgtaaggaaaaggtccccttaagctctctcaaatataggtcgagtttgatttgcttcctctagcctcagatataatcatatagagggtcctccaacttttaaaaccagggtaaataaagttccgtgataggattgttagttgtttttgcctgacgtggcactccaatctattattatatactaaaagtcattaaacttcctacaaacgctctcaagttgccacgtggcgctctagtaaattagagaaaatcctagaaattctaagaaaaaacaaaacatctcccccttaattttcacttaaattggtgggtccaatattatacacccttagatgaaattgatcacaaaacaaacaaaatactattggtcccacctctcctgtttcttccgtgcataagtcacgtacgtacacacccgtacgtacatgggtatgtagtacgtatggctccatccatttttttcttttttcttcttttttccatttatataattgatatatatatatttaaaaattttgcaaacatag

SEQ ID NO: 36907 - DNA, 558 bp, Oryza sativa
ttggacgcttgtcaatggcatttcttggattatctcacaaaacaaatataatgataatatatttaccaacttttaccatttctaaaatttaggatttctattttttttgtcagcgtcgtatttaaattggcactaaatagttaaattcacaaatgaaaattgcatgtcctttttcataaaattaataaaaaaattgtaccttttccgatcatttccgactgttttcatccttaactcaaactgaggtattcttttttacatgacgctgttgtagcattataatcaccccgaaaattaatggtaggacacactagtcagtgacctctttctcctccaccgctctccctttctctttcaccctctcctaatctgtcctctcgtctctctttctaccgaagcaccgaggacactgtcaacaagctcgagggagttcctccctaaggcctttgccgtattgacatgagagggagatgtagagagggatctagcgtcggggaaggtggagctcgaggacatggtgtctcaccttcgatgctgaggtcctagacaagacaatgt

SEQ ID NO: 36908 - DNA, 1448 bp, Oryza sativa
cctattctatcgtcgatggtagaataaaactatacccgaattatcgtatataaaaccaaacagtctactacaaaatatcggccttaattacccactggacaatacttgaacaagcagaaggttagaataaattcttcccgacttttctccgttgggaggaaaaaaaaattgtaatatccttttaccaaaagttggcaatcgctgcatagtgagaagactcgtatattccatccgcgtttttcatgcagggaggtggagtttcaaactgccgatcaacacagctagtcgggcaagaaagatgaacgttgaagacgagaatctgttaggtaattagtcaaacaactgttcccaaacaaccgactagttgtttgattaactaagtttacaaaagccaatatatatagtctggccagaagttggacactaacaagcttttttcgaccttcattggttacctactaattaattaaataacaagtgaccagcctgttggtggaatagctccctaattttgaaatgtccttagctaagaagtcatcttcctgtccaaaaaaagataagttatgaagtctcttcatgtgaaatgttttctttcgttttactattgatgtttaattatcaagtaaatgctcgcaaagagatcgatcgatgcagacgtgtggttggtaagggatggaatcccctctcctgcaatactatacgcccattacttttttagaaccttatgacttctgacgtgggctctcgattaatttgatcctctgatcacaatcgatcatatcttaattaaatttggataagggggtgaccgttacaacctatctactccacaaattaactattgaaactatggctgaacatcataataagtaactaactaaatcatatcgccgcccattgccccgcgcacgctcactctctcctttttcttttcaaagattcctatttacatgtgccaactctactatatttctatataagacaaatttgttataaatttaatttgttagtggacattataaaaacttatcgtgactagaggacactcaaatagtggtagtttactgcagaatattttcgaaccaattaaagagaattttttttaaagaaaaactcccggggccacgagcttctaacatgacagaaatttgcatatagttgctcccgagcaaacaaattcgctcttgcctctacgatattggccgcacgagcatgcttcatgcccatgaacttacaccatgtgtgggccaagcatattagaaggttagtggaagttcctccagaaaattttgtatattaagtttttttatataccttttaattatgttggaaatttttttaataaaaaattttagttttgaattcgtaatagaatttcttataggaagttctaatccattgtcaagacgagtctcttgtacaatgttttaaaatctctaaaataaaat

SEQ ID NO: 36909 - DNA, 2969 bp, Oryza sativa
  unsure (1)..(2969): unsure at all n locations
catagacatgatagggttgttggtatttcttactaacattactagaaatataattcttagcaatggcatagaaatagtcctggtatatttatggttacaaatatgatccacaagcgcacagatataccattgaagcatttcacccggaagtattctaaggtatcgtatttatttaatcctaaggggagattgataagagaagactatgctaataatttatatgttacttgtataagtcagagtctaagcagggattaattaattcaagcatagagtgacacgaagaagaactaagttactctcattaaataaatcctagggtaagtggagaacgaataaaaaaaaagaatccatcccaatacttctaatatacaagtatctttaatttacactccctagtatacaatcatacagtcaataccccctaactattccctcctggtgtttcaagagacaacccctgattgccgagttccttacaacaacccgtcatggctgtccaaccggaaatgaatacggaggagtacccacaccaagaaattaacttagaactatatactaacatggaagaatacccgtaatgagctatcaccatcagcggcccacctctattattccgcagcatataccctcaaataatgatatttaataatctaagcaccatgcttacattatcaaatactactctatatccgctagcatgacatagaacaatcatttgcatgaacattatacccacaccattgcatatctctggtaagctagctacacaattatatcgagataaatgtaaaataaagtcggtactcaaataataagagtgaagaaaaatatcaaaattgaataaagaagaatatttcattaattgtataagtctcgcaaaagagagatagtggaggaggtgatgtccatttataggttgccaatgatggttgtggtggttgcaattgtagaaaatgccacacaaccattattggggagggatcctagacgtccatgccaaaccccagccttaatggctgagatgggggttcggccgaacccagggtgttcggcctagttttcggcaggcctcctctccggtggttcctcaggccagtggtaaggtgttttgggccctttgagattatttctttggacttataggcccatctatccataagtatacctcttgacggcttccgattgattgttcgtttgttttcgtcgattctccttctctctatgtagcaatctttgcaatcaaataggatccatgtacaagtggaaatagattatactanacanaatatgcattgcaagcatagctagttctctttattttggttatactgacagtcgaaattggtctataacgactgtcaacaagggtgaaaccctttcctcatgccacacgtgtcacaactgctcgagatggagatggcccctcgtcctcggagacaggtgaagtggaacttattcttgcacttctttttttttagaactttgaggagtcgcatggtgaggaggagaagaatgtcccttccctagtcttgcaccacctacaagaccgtgaatcatcaccaaatcaatgttgctgcttgaggaggacaggttgcgagtgagtaagaaggggagggagcaagaaggaacattgctctctgaacagcggtccaataaaaaaactcctcgatttggtccaagtggggtaaatttaatgttttaatgggggtttctatatccaagtttcaaagttgagtgatgcttttcaaagaaatgtaataattgaggggggggggggggcaaattgacttattccaaagaaagaaaagaaccaacataggagtagctctcgttcacgctggctccatagcactactttgaaaacgatgttcctagacacctcaatttcatttataaaggtgagttgtaagaaaatatgcaatccacttgtgatagtggagatggaatggtttaaacagtcaatgaaaatcaatgttcacaaatgatcccttgagagaaccacctgtgtaataggtgtatattcacaggcggttcaaactatttgtgaaaatcatgattttcacatgaaaatgtgtatttttgcaccaatttttataggagcttctcttatggcgtgcatttggttcaagggcgaggttggataagatatgaccatacatgtttagttggataggaagatccaagttatttgtttggttacgcggataggataagccatttttttgtttggttggatgggatgagattagtaaattgataattaataacaaaatatgttaactatcactaatattttcataatcaacactaatcaacaacaaaatatactaactatccctaatgagcactaatattgcaatgataatcactaattaacaacaaaacatgctaatcatcactaattagttcctaatgattaatggtagcgaaggtggatgagctcatctaatcaattttgccggatacacttatccaacatcgttggagaatattttcagggtggcagcccaatccatccctcgcccgtgaaccaaatactacgaaagtctggacgaccatctcccatccaaccccatccacccaactaaacgtacccttaagaagccgattttaaaaatgtacataaccctatttcaagaaaaaatacattaatttttatataaaaattatttccctcagtgaaattatggccgaaacttttttcatttaatataatttatgagcctaaatatttgggtgaaatggaccaaaagaataaattgtttgataactatcatttatatgagtgtgaggtgggatggtcggtgggatcgtaggaggcttgaggttgtgggtttgattcttgcaaacaacagatgtatattttgtgttaaaattgtggctttctacttcacgcatgagtgggagccaggtgaggcgctaggatattttttaatttgcaaaggcttctcaaggtggtgaaacct

SEQ ID NO: 36910 - DNA, 1053 bp, Oryza sativa
agtagttcatcattaatgcatgtataacatttttataatttatttttttatcatatattaatatagtaacaaaaactaaacaataaagaacttacaaaatacaaatagttttgatataactaaatggctaaacactagttaaaacgtaacaagtactatacgtaaaaatggtgttccttttaactaacgagctaataaactagtagttcgcgagctggctcaatagttatgctcacgagttaaattatgagtacgagttcgaccgagctaagccaagcttgctttgagcctaattaggggtggaaaaatctcaaagtggctcgaagtattttggaaaacaaaatcatactcaaaggaattctcatatagggagtgtaattggtacatgtacaaattaattaaagaagcgaaatttttatttcggttgtagtgtacgtacgttgctcagagcacatcaaaatttgatgatatgtccgcgcgaagtaagattggttgacagttttttacactgtacacagcggttaatcaaaattaaagtgcacatcaaatatttgatgatgtctacgcaaagttattaaactttggttgcttcattcggtcgatggtaggcacataactaatcatgccgtttaattaggtgcctgcctagcttagctatatacgtaaaaaagtactgtgtgcatttctttttctggacagatcagtgtcacctgagttcagttttagctaaccctaacacgtgtagcctactagccatgcagtactttagataaccctgcgtcacctaaatttgacatgcaaatactaataaaggtgagaaatataagttccaaaattaattttgtatcgaatgatatatacgatatatatataatgacgaacgatgtgattgttaatcgatcagcgcgtgtcaacatgatcaggccgggtgtatatatctgccggcttcgctggatccaccaccgacaaaggataaaatgctgtatatagtggtagttggagggcacagcagcattagttgaatttcattaatcaatatacagatcgaaatat

SEQ ID NO: 36911 - DNA, 2130 bp, Oryza sativa
actctgccgcagtttctcgctctcaatacaaatttaaaatttatataaaaaaaattaaatcagtagagctgagactcaagtgagctaaccagtgtgctgacaaaaacactttaccagctggttcctaaggtgctaaactgatctcagtgtcatcttctaattaactatagcatgcagtacgtacctgtccatctgaagtgattgtcaagtacacgcttcaagtacatgggtcaaaattctttgttttttttaagggagaattccatgcatgggtttagatgcacaaaattatggccgtgtttagtttccccctattcctaactttccatcacataatatcacatcaaaacttttctacacatataaacttttaactttttttcaaactcccaattttcttcaaacttccaacttttttcagaactaaatacaccctataactatccgaatattgcggtttatatatattgatacgggttgtatttgaagctaatcacgatcgaggagaaacaaatgaagcaacaaccaaatagaaaaattatgctatcgaaaggttattcttgggtgttgtttaattaaatctaaattcattttgctagttgatcagtacgtctggcaaactgcagcaattttaattgatgaaaacgccggttagctatagctacacaatttaaaaattgtatacaaatgttcgtgatttgattcaaaactttgtctgcaacagaatatggggactggggtaattttatagttctatgataaacaagatgttattactgttgtttcgtgaaatgttaaacaagatgttatttctgagaaatttatagttgtggttttttgtgaaatctcacttacaaagtcccctagttaatacatatagaatttttcaaaaatatctagccttatcttttggcttatgcttatacttataagccaaaatttaaatttttaaccttaaatttggagttaaatttgaggttttttcatcatattttatttttcagcctttgcttttacaaattattttgccatcaaccttaataaacgaaacgatggcctcaatcatgtgtatcagttctcaatggaagcaatattgctttttgtgttttcagattgaccatctagtagtaggctatgttctcccccccccccacacctttcccaacttgcctttctcgtgttccgtacacatatttttttaaactgttaaacggactattttttttaaaatgttttttacaaaagttactttaaaaaaatcatattaatctttttttaaaaaaataataaatattaattaatcattaaaaaaaatatggcgcttcgttttacctgcacgggaggggaagtagcctccccaacgcagccctacagtccatgtcaatgggtgaaatatcccctgccaaaaaaaattagatagaatcatagaaccccagtttttggcctgcggtagagatcttgatagctactcccttcgtcccataacaaacctagtactggatgtgacacatcctagtactacgaatctggacatatctttgtccagatttatttagtagaatgtgccacatcccgtcctagatttattttttctggacggatggagtactcctcctatttcaagatataaccatttttagtatttaaaattataccaatatcttttctcctcgatctcaatatctcctaaacaatcgaaatattaatacttacattttggaatggggtagctaattatgcaaacaccatcacgtcacgagtgtcttcttcgaacacgacgatcactggttagttccaacaactttgaaaatattcacttgcattgaccaaaatattccatgggttcgttgttcgtataaacaaaaattaatgggttggcccaatcaagttaattatcactcccggtcaagcacaaaagtacaactgaagagatcaactaaactacgcaagcttgtatatgtcgtgctaagaggcaatcaatcatgcaggatcatgacaaaaaaaacacaactactttcccataaaaaaccaatctatttctagatgtaatatattatagtactacgaatctatccagattcgttgtattaaaatatgtcacgtccagtattagattcatttttttaggac

SEQ ID NO: 36912 - DNA, 1195 bp, Oryza sativa
tttttgtatagttagttctccttcgaaagagtctgaaggcagtgacggacctaattaaattaaagttaattcgttgttttaagaaactactcctagatgaacacatagtgtgaacggtcaacacaatggggtctcggtctccatttgtaaggcagaagtgcgtcgtcaaaagatgaacgtcagtagaattgcatccgtgcgtttacttccgagttccgaccgatcgactcgataacaacactgtgaacaaacacgtgcgtgcgtactccggcattaggccattctcaacccaataagtaggatgatgtctctatagtattaaataagctgtcacctatgataaaaaaatgatgtgtcaagtgaataaattagaaaagagaagaaaaccatgtcttgcatgagacttagtttctacacaatatccaaggcatcatgtgagataagtagcattaaatttatatatagaatagtggtatttgcattggaagagtagtatctagtactagtttctcgatgatgtgaaatttatgaaaagtatatcttaggttgggaatggccttaagaccgtctcccacacgctcggccggtgcagccatattaattactgctggtcgttctagtggaatgcatgtccatatgtacacaattgacaattcacagcaccgcgttcgtaatcgtgggtgcgtctgcacgtctcgttttcattagatatcgttataaaaaaagaaaagactaattaagcttgggcgaaggagcgtgtcgaatctgctcatccttggataatggtgaggccatcgattcgttcacaatcgatatactacctatttcttaaaatataacaaactaaagttagatatagcacgtactataaatttagacagataacctatctatattatgatgtatcttttctgtctgtctgtttgtctgtctatctatctatctattatatcattaaaatagctttgaaaggagacatcatattcgccgtaagggctagaaatttccacattaatcggagaaaaagaaaaaaaaagaaaaatgagagttcaagtagaaatacaatctaaaagtagctgaaattcggaattaaaatcttacccgttagattatagtgggtccgaattataatggtatagattaattgatatagtttatacaagatataattatatctatataaatagaagttaag

SEQ ID NO: 36913 - DNA, 1015 bp, Oryza sativa
ttcacattggcattgcagtgatgctaacctgtgtttggaatcctgccgttggatcgtgatccaacggtggtgatgatcgaatgtccttgttagattcgtcaccccctgatgatggcaacgatgattggtggcatcataagtcagagcagttaggtataatgtcaagtttagaatgtacttacacaaaaaagaaaagaaaaacactctggtttcttagtttctctttttgtttttgagaaagggctactccgattttaagttcgattgagcttaattaatttgtcgtaacctggtagtgagttctgtttaaagtaattatctggtttagggcaacatcaaactttagctgtcggcaaatttgaaattccaagcttgtggaattagtgccatcaccaaccaccggtcaaaaaacacagaaggttcagtctaaacttagctcacctcaacttatgtatgatgactctcacaaaattgaaatttcattgacatatttatgctgctaatatatttattggtgattgattggtgaattatgaattgtgtgcgtcatgatgaattgatgatgacatatatattttggaagttggcctcaatgataaggtaatgtttaggttaataacaaacaaaaaatatattaagtactgtttagttagtcgtatatgtatgtattgtgacctatgcagccttatacatatatatatatatataagtaaagaacaaagtgtaattagcattaatgcccatattaggtatgtcaaatgtgggaattttgagtggcttaagcataaactactgacgtcctaaaatcaatttttttccaaaatacaacaacttctgtacatactttctcatcttaatcaatcactatctttcacataatttctacacctgcttctttatctcaaccaataataaccaccctccatcccatttcagtactgctcttcttaatccctattaaaaaatccaaaagtgtttattttctaaaacagagggagtataaatgatgaagcat

SEQ ID NO: 36914 - DNA, 546 bp, Oryza sativa
acagtagtccatgcaataatccatgtaaacaatggcttgatcgttgttgatgagcgtgggagctatctgagaagtagggactaactcctaaattaatttaaaagtaagttttagatttaaaattgaatatggcttataagtcgaagatcaaacatccaggccagtagtataatttccgttcgcagcaattagaagttggtagttgacaacgtttgaacagcacttaagtatatctattatctatattgtactctcagtttatatagaatataagaacttctagtatatatataacttttattaattcgtaataattataataagttggtagttgacaaagtttaagcattactactttaaacattactagtatatatctatatgctactatctcgtgaaacaatagggatatatatattttttaagtaaagaaacaataggaatatatataaatactactataaggtaaggggtccgatccatccaagctagtagtactagtaccgaattgataggaaagctactttttttgactcacgggtgcaa

SEQ ID NO: 36915 - DNA, 609 bp, Oryza sativa
cattaatgctacttatctcacatgatgccttggatatggtgtataaactaagtctcatgcaagagatggttttcttctcttttctaatttattcacttgacacatcatttttttatcataggtgacagcttatttaatactatagagacatcatcctacttattgggttgagaatggcctaatgccggagtacgcacgcacgtgtttgtgcacagggttggtatcgagtcgatcggtctgaactcggaagtaaacgcacggatgctattctactgacgttcatcttttgacgacgcacttttgccttacaaatggagaccgataccccattgtgttgaccgttcacactatgtgtatatctaggagtagtttcttaagacaacgaattaacatttgattaataacgtccgccgctgccttcagactctgtctaaggagaactaactatacaaaaacgagatacatttgatgctttctaaaggagatcgagcactatagtagaaaagatcgattagataacactgtgatattcggaagtgtgttattttgatgcacttcctcaaagagtgtacatgaagtttgtaaaagcagaatgcaagtgttactgaa

SEQ ID NO: 36916 - DNA, 652 bp, Oryza sativa
tttttttaaaaaagcaccatttagaaacttggaaagcgtggagcgtacaaacaaaaatccaaaagatggaatcaggaataaaatagggcgttacactcccttataacactcttatcctataagagttctattgatattcattaatattgtgctcaaatttataacataatgatttctttcaactgtacgaacaaataatacaaagaccaaatacaacataacacaatacattataactattatgtactcaactttcggtttcagcttaaatagagctaagtgttggaaaaactcaacccacggggcttaattcttctctcgctgcatcacacctttaattttcatttcatgttattaacaaaattaattatctccatatatgaattgatatgtggcaaagcggtagcgttgtagcggttgtgatcaccttagatgccgctttgtcacatgtgcgaaaggcaaaggtgcaaacgtgcattgtgcagcaggccaaaaagggagaacttcggacacttatttattaacaatagatccgatgatttaaataataggttcaccggttctagtgtaaatgtaaattagttaatataaattttaaattgttaatttaatgggtacacaatataatggtgtagactttattttaaaacat

SEQ ID NO: 36917 - DNA, 640 bp, Oryza sativa
cattccctacataatccaagtcacatgtagtgcgcagaaaaatatttgcttgagagcaacaagagttagcacatgtaaagtcaacttgaacatgaggcacataggattttaccgttattatgatcacctcatgagttacttctagcatggcatgtgaatccacaagatttccatgagagcacaaaagctcatcatatttttcttgtaagtccacatgcttgctaatgagctccacaagttgagctttaaactctagattttctttctccaaatatgatttctccatgatgcaagaatattcatccaagtgtgaagatgagcatcttggagatgtaaattcttcacttggccattttttcccacatacttctaccttcaaaagattagttccacaagcactataggaagtagaagtatccacattgacactactcaccatttcattacctttaatggaaacatgtgttggtgaggaaatgaatgtggcaaaactatcttgctcattgaatagaatcacttgaaactctttacaaattgtcgataaattttaacactccacaatggttcttctataacaaactttacctcatcacactcaaacttatcatatctctcctcgaatgtattccaaataagataa

SEQ ID NO: 36918 - DNA, 559 bp, Oryza sativa
  unsure (1)..(559): unsure at all n locations
aggatattgtgatgtatttgatttgtgtgtataagtaactttatgatttgtgatgtgggtttggtgatgtgaatttgggatgttattttgatttggggatttgcctacttgattcgggagaaaataaaaagggaaaaagaaaaagaaaaggggaacatctggtactgccactattgtctctttagtcccggttggtaacatcaaccgggactaaagatcctctctctttagtcccggttggtggtaccaaccgagactaaagatgtacatctttagtcccggatccttactcccagttggaaaantggactaaagggggttcccaaccgggagtaaagatggtttctccactagtgttatggaagcagacatgcatgttaatatatattcagcgaaaattagaagtacttttaccataggcaacaagtcgatcaccatatatttcagagggaatattagtactatatagtacagggtgatgaaggattttttttatttttaatttttttaatatttatagaaatattatatcggcgaaaagatttacaaaaatagaccc

SEQ ID NO: 36919 - DNA, 745 bp, Oryza sativa
  unsure (1)..(745): unsure at all n locations
cgcgtggtttgnattagtannnnnnnnnnnnnnnnnnnnnnnnnnnnnnctttttcccctaaaccccaggacagagagaaaaagggggcctctaactccaagttaagctccagtcgaaaggtcttcacatagtaatgtttttgcttaattaaacgcagattttacattagtttccggtagcatgtctttaagctactaaacaatatgtttcataaaaaactttctatatagaagtcgctataaaatacagatataataattaaaacttaactaatcatgtgtattaatagctttcttgtttacgtaatttccgtctttatttctctttagataatggaaacttccatcttcatatttggtgcttctgacatactatttttcttctgcacaagatgcaaaagtcaatataaactcgctggctgaagaattggagcaatgcaaatatgttcttgttttgagcttgttcacgacctgtatgctcactgttaaggttgatatacaatttactagtaaaaaacagagagtccttttctttcttctgaattttcacttgaaattactagtgtacaactgtacatcaacaatgtgaatgctaactgagcgtgaaatgccatatactcctatcttttaccattcgtcactaataaaaatatttcgacagacaatgggaaatagtatgcaagagaaagagggaaatcgtttgttttttatgaaactgggacatagtatgttattgtacgcataa

SEQ ID NO: 36920 - DNA, 2674 bp, Oryza sativa
  unsure (1)..(2674): unsure at all n locations
actgtcgatatatttgtcaaatggcctatataaggatttcacatgtaccaagtcgtttctcctaattttgtgttacaaataacaaggtatttaactttttgtcacttttaagatgtggcaattaaatatttacccctcacaacctatgacatatgaacccttatgtacctataatatgtaggtccaatgttaaattcttaattgtcactcataagagtggcaaatagttaaatatctctaaatcacaatggtagatcacttattcatgtattcacccaaggcattagataaattggtcatatttgttattagataaattggtcatgtttgtactgtcatctaatattctaatatatgtgtatgctaatagtaatggtatttctaatatatgtgtatgntaatagttattgttgataattaagtttattaatgaaaagacaaatatatatatgttattataaagtctatattttagagatatattattcttaatattaagaaagatatattgttgacattcgttgtcacaattcttaagaagataatggtgtgacttctcacttagcgctttggtgatggaggtggtgttctctatttgcttccaaagcaagaggtgcaaaggctgatcttggaaacagattgtaacactggtggtggagaaactgtctttactcccggtttgtaaccccctatagtcccggtttcctaaccgggactacgaatccgggactaaagatcgctatctttagtcccgggcgaaataaccgggagtaaagatctatctttagtcccggttggtaactaaagagatggatcgttaccaaccgggactaaagaggggatagggacaatcccggatggtccctttcttttttgttacttttttattttctcccgaatcggatggcatgcacatcccaaatcaaaccccaaatccccaaataaagtaacatctcaaatccacatcacaaatcccaaatccaaatcacaaatcttaaagttacttatacacacaaatctaaaacatcacaaatcctaaaaaaattacacacaaatcaaatacatcacagattatacatctcaaatccatacaatgaatcacaaaattacgtctcagtgaatcacaaaatatcaaaaaaaaaaaagagacggccgtctgcgccgcacgcctgtgcgtccgtccatccaccgcgtccgcgcggcctcatccgtctctaggggagggaggaggaagggaaggggaaggaaggaggagcggcctcatccgtctccaggggagggaggaggacgcgtggcgtagcctcatccatctctaggggagggaggaggaagggaaggggaaggaaggaggagaggcctcatccgtctccaggggagggaggaggaagggaagggagaaggaaggaggaaggggaggatggagaggggaggggggagaagagaggaggatcgatctgtgggtgaggaagtggttgtgattgtggagaagaggataaggactagggattatatactacgttgaattttagtcctggttggtattatcaaccgggactaaagatctaaatgatctttactcccgggtggaagtaccaaccggaactaaagtggtaatctttagtcccggttggtagtatcaaccgggactaatgattctcgcccccctaacatgcctttgacaggggatgaaccgggactaaaaatcatatttagtcccggttggaaagatcaattttttttaactaggactaaaaatcatttttaatcccgatttttaatgaaaccgggactattgtagaatttggtcgaccgaccaaaaatggtttctccaccactgtaagatgctggttgattaatgagccaacttaggaagtgtctactatcttgaaacaaagagaggagctaagttggaattttatagaggttcagtttattttctctcatatcgatcttataatagagttgcacatgaatgagctaaactagttgtgtgtactcggacaggggagagtgggatgttgacccacctaattaacccattacggcaatgcttagaatatgattgtaatcctgccgctgggtaagaaatgaaagttcttcggtcttcaaaaagaaagaaaaaacccgatggtgctaatcggagacctctagtcggatatgttcttccctcaaggctctcaacgtcacctaactttgtttatgcgcgcatacttaccaaattgttaaaccatacatttttttaaaaaaagtttctatacaaaagttgttgtaaaaaaatcatactaatatttttttaatttttagagctaatacttaattaattaattatatgttaatttgtcgctcagttttgcatgtaaggagaggattcttaactgctccaaaagtacacagtctaacccaaggtcacaaggttgctaggttggtatccagtgtatccacacaaatgacatgttcttttctccaacaaaaattggataaactttttgataaaagtggcacgcttttcaaactgctaaacagtgcgtttcgtgcaaaaactttctatatgaaagttgttctaaaatataaggttaatctatttttcaagtttgtaataattaaaacttaattaatcacacgttattaccgtctcattttgtgtgaaatacttaagctgggttcaggagtgagg

SEQ ID NO: 36921 - DNA, 541 bp, Oryza sativa
gacctgattcttgtgaacgaagtggcttgtgcaaaattatttatctgataaacgaactatagaatatggtggagatttactcagtttgtgaacgactgttatgtgatgacccatttatgtgggttcacatgtgctttaaaaccttatttttcagctggctgtttcatgtgctctggctttcaattgttcaactaatgttatacctttgatttcatttctctgcatttttttattgtctgttagttcttaactgtaccgcattctctcgccctctgtgtgtgtgtgtgtgttttacaagttattactgtggtgcatgactaggaactttagctgttaaaagaaccacaggttagtttttttttccttggtcatcattagcttttcctgtctcaggttgagaagtggaatgaacagagggagaatgggacatttgcaggaccactctaaatctcctgtttgagagtcttctcagatcagtccactgccctcgtcggtgtcactgctatcatctggtttgaatttatgctgctgcttttgttct

SEQ ID NO: 36922 - DNA, 566 bp, Oryza sativa
tcgtacgcttatttgtttgtcaaaatatttaccgacaaaatttgcagattttgttcagctcagtttgatttactgactaggctactttaccaccatgtacataaagtcattttgtacagttgttgaaccggtgggtctaattcctttcgttagtttagtgtgatgatagcattggagaggtcaaatgtctgcacctccctatatatgggttcggatgctttattgtgtccagatgactattaacttggtggcatgaatttcagtttcacctgttcagttcgatggaaatgaccatcgaatatatctaatttatatcataaggactaaacttgaagttcctggatgaggaaattatttatgaaacctgatggagtggtgataggaatttcaccctgcctgaccattactctttgacacaattaatgtaacttgcagctgtttgctctatatttacatattttttttggttttgtagggatgtcttggcaaaccagcagtggttgattttgtacgccttcacttaaacaatgtgagtgacattccccgccccctctccagtgatacac

SEQ ID NO: 36923 - DNA, 751 bp, Oryza sativa
caaatcagcatatacatgaatacatccgtccatgcggttgagctaacaaaatgatgaaacgagatgatcgccagattaatccattgtttacatgcagccaaagtacaatgacagttgacaaccttcaatctgcaggcaataatttacacttttcttttaaataagccttttttttcctcttagaaattaaaccgaagctgtgagcaagagcacatcatggtcagttcttggaagtcttttgtttgacacacacttgaattgctcccattttttcccaaccaatttgccacctaccatgcctatctgcacgcacccgtcgcgcggtttattagcctcttttctcctgcgaatcacggcgagctgatcagcgattaggcgaagcaaacgtaccaaattataatgggtgacgcccagcggcggcagcttctcctcgtcgccctcatgctcgccgccgccgcagaccactcgctggccggcttcttcggcggcgcgccgccggcgtctggtcccgccgccgccgccgccgacaacgacgaggtacgttagagagacatagtatcgttaattactggaaaggttaaagccggcgatttcgttggtcgatcgttctggctaattctgatgttcttttcttgtttcttttggctgatcgatgatgcagaagtgcagccggacgtgcgagtcggagcactgcctgggcacgtatgcacgtacgtacgtatatatataccactctccctggccgatcgat

SEQ ID NO: 36924 - DNA, 729 bp, Oryza sativa
ttctggttagctggaagtctgtttttagattttcatttagtgcaaatgtatatgtatattttttaaaaagttgttttataacactacaattataacaacttttatgttggtggagttgtaatttatgttgtgattgtcttaaaacgccattgcaatattggccataaactttatattatgtatagtaggatgttttcttcatgcgtgcttgtaatatactccatccgtttcacaatgtaaggctttctagcattgcccatatacatataggtgttaatgaatctagacacatacatgtgtctaaatgaatgtgagcaatgctagaaagtcttacattgtgaaatggaggaagtagtaaggctctcctattatttttgctccttttatcgttagattggcttatggcttcttccttgcttgttaattttccataacctcaagtagactgggttatttatttatatctaccactaagaggaggaggcagggcgaggagaaagatgtgttggccgtaaggaagagggagtaaaaggtgaagtagtctatcgtccttggaggcagtgccgtggacagcgtgatgacgataagatgaggcggtttgcagcttttttgttttcacaacaggggcgtgggagagtaggagcccaggcctatttgtgaaagaaggtttgcaacatctccataaaaatggaatggctcatgcatatttgtttcatgacgtgacacgat

SEQ ID NO: 36925 - DNA, 732 bp, Oryza sativa
caagaaaaatacaaaccagtggtaaaaaggaaaataagaataaagttattttcagacatactccctccattccaaaattactcatgctttgtttagttcctgaaaaaagttgaaagtttggggaaagttgaacgtttggaaaaaaaaaagttgaaagtttatgtgtgtaagaaagttttggatgtgatgtaaagttgaaagtttggggtagttgagggtgaactaaacacgacctcaatctagatgggtatgcgacctcttctaatataatctctcctaatatagagctggcttggtttgaggcctaaattggccttaccaatatttgtcaatttcaatagtgtttattgtctatttgggttggagccaaattttggcatgcctaagaaaataggccatttcaacagctaatttaggctattttggtttcaatccaaacacaattttacctttgccaaaattagccatgccaaaagttgacaaaatttgacattgataaaaattggtaaggccaatttagaccacaaaccaaaccagcccatagtaacaaatctaaacttgtattacaagacagcacctttccacccaaagccttttcaaaaatgttaaattgtagcaaaataaaccttacttaaatttggcaattagtaatattgctaaaattttaacaaaattttttattatttaccaagtttagcacaaactaagatttttttttagcaactttaaaaa

SEQ ID NO: 36926 - DNA, 521 bp, Oryza sativa
acagtagttcatcaaactcaaagaaagaatgaaaaatttccaggtaactttctagcttattgtccatcttctatgagaaaacaaattgaagagcttgcagtacagtaatccacatttcatacagaatctaagacaaattattcaagatgagtaccgacaaggcgttgcgaggatggttttcacaggtaaggagttcttttttcaagtcgttttacgttctttctgataaatatttccttcgttctagaatgtaaggagttttggtttgtcttggagtagtttgacttagaacaaatccaaaacaacttttattctgaaacggagagagtataatttacttcaagctattctatcacatgcttcttgataaacctgaatcttgaacagtcactggagagcagccttctgatcaggtgaggacagtagtgctactacgcttggtgttgagagatgctttctcctctgatctcattgtggtgaaaaaaaaaaaaaacatgactaggtgattgaccacctgattg

SEQ ID NO: 36927 - DNA, 524 bp, Oryza sativa
tgtcagtagttcatcatttatttctaagggcagtcacaactctccacctaggatggtgtctatagtattaactacattgccatgtaggacttttaccttatgtggcactatattaaataagagagagagtgaagagaggaagaaactgggtctcatgtaagacacagcttcaacacgagaacctatgcattagacactatcaagttttacattgggagagaatagtctcttcataatagatgaagaataaatatgattggtagagaagagagatgatgtatttattaatgacccactttaagaaaccatgggttgtagagtgtagtttctactgtgaagtcttattgacatggcatcatagatattacttatggacaccatggattgggactgccctaatgctggctgcttctgccagcagtgatctgtccacgtgtgctctctcacacgggagatatatccggcccaagagcaccaaaagaaaaaaaaaatccaagagttgagcaggtgtgcgttctaagagt

SEQ ID NO: 36928 - DNA, 622 bp, Oryza sativa
cagtgcaactagtcatgcacggtgagataatacaccaaaaactagcaagtgtcaaatatgctagtagctggtttctctgctgaaatgggtgaggtctaagtgaatgcattgttttttttcacaaatttaaatgtatatatattgtgaaagtacctaagttagtatgcaatattgcatgcgataagtatagaatttatgtgccgatagttagcaattgatatttttaactgctcacttcaattcatgcatgtctaataggaatatctcagatagcatattgttctagctaggttccgtggcaatttcagttgttactggtccacttgaaagtctatgggtcgtagttaagtcacaccttatcgatgcaaagtacgatatctctcctctcttgttcatttttccactgcccataaatatcttgtttataagtatatatcaaagaatcagttactaacactggatcatggatcttacatgcatacctgctgctggttttataagtcaagaactcgagcatgcacatggaaatgatcattcatgcataacctaattaaagtcttttcacaaacatgttaatgatcactttgctgcatctaaatttattgggagtactcatgcatgt

SEQ ID NO: 36929 - DNA, 520 bp, Oryza sativa
  unsure (1)..(520): unsure at all n locations
agccgattctagtcgtagctgatctggactccagccgattcttactttggtcccgcaacaatccttatctccaactccggttcgatcccatcttcacctccgacgctgatattaccaaattcggttggtacacatgccccccaagtccgggatatttggtaatgttccggatttgccgggtactgacttcgagcaagtttcgcactttgctgttttccgaccgttattggcgggcttgaaatactaaccggcaccctcgagaaatctcacaccgtgacttctgttttcaccgctcaagcgaaactttatcctctctctctctccggcgattcctccgacgcaaaagcgacttccgggtgacttcatctncagcgagacctccgcctgcagcgatgtcgtcttccaccaatccatctgatgtgccatcggccgagtatgctgaggtaagtctccactggctagatcccctttcttagcagcagatcgattttctcctatcttatatcgctctctttctctc

SEQ ID NO: 36930 - DNA, 1202 bp, Oryza sativa
tgcattgagtgcaaggaaataggaaaaaaaataccaagctgatgtgaaggtcttgggaatcaatgtatcatgggattcagaatagaaaaatgaaaaagggatcaatcagagaatcactacgatggtaaaattttgaatgaatggacaaggataggtgctttctttgactacttcacttgccatacgcactgcaaacccaagtcacttacatacacactgcaagcccacgtgtaacatcattttggcaagaggtgggaaacgctaagccggttttccccttgattgaggataagttgaggaattccagcagatggtcagccctcaactcgataattgcatgtagctttgcctaattccccaacagatagctaaagcaaccactctacgtctctacccatctttcatactctctcaagctgtttagcatatcgacttatatcagtcacatggatcatgcagtacgattaagccatacaggttgccattctaaaatgaaacatccaaagatattattcagtaatgccacaatcattcttcagaaacatcacaaccaaaaatggaccaatctcccccgcccccgaaatgaagtatgaaatgctaaccatataaccaacagaagaacctaatccacaaaatcatccctgacgatggactagtaagcatcacacaacgaaaaaattgttggaaattcatagcgtgatccttatagtgatctagcccgctctacccatcatcatcccgtaatcttaggacgtatagacactcagatcagacagaggatcgggaaaataagtccataacactggatcgagcgggcaccagagacagccatctaacacgggcagaaacaggagaacttaagtgctcgtcagaacccaatacgcccgccacgaactcagcaccaggcgcgtacatcgaggtgccatccacaccgaagagatccacacgaaagcaaccaaactctgaccgcgcgatagacggattcaaatcgaaccaaggcacgtcacgggcagaacagatcagaacccccaacacacggcatgatctgatcgggagagaggggatccctcacctcggccatctcgtggcgtcggagactggggaccggaggcgaggatgaggggggttggaatcccggcgtcgcggagcggaggaccgagccgagaggaagggggagaacgacgacgacgacgacgtggtag

SEQ ID NO: 36931 - DNA, 564 bp, Oryza sativa
atgtgcagtttccccttaacaaaaaggtgaagaaacggttagttttcagaggagcttgcccatggcgaggccgatgccggcaatgccgacgcagacggcgagcgcgagccaccacgcagcggccccgcgccgggcgccgccgtcgtcgtcctcgcctcgtcctcgccgacgccttccttggccgagccggcggctcctgctgctcctctgagcccggagttctcggcctccagcatcatgacccaccggcggtgcgccgacagcaccaccgagtcccgcaccagcagcgccgagagctcgccgttgctcgccccggcggccgccagcttctcctccgcctcccgcgcccgcgactgcgacagccgcagcgcacgcatcaggcggtcgccgccgtcaccaccaccgccttcgccgtccccgcccttccgatccgggctcgtgctcgtccacgccgccgcgttctccaacctccacatcaacaaaaagggtaaaaaaaacaaaaaaaaaaacaccgcgccgctctaagcaatgccacactcgcgaattccacggcatcgatcgtgt

SEQ ID NO: 36932 - DNA, 720 bp, Oryza sativa
acagtaggctatcatgcttttcgtaaaaaaaaaaacgtggagcctgactgccgaatggccgatattccggcagcattgctggcttgctgctgctccaccctagaggcctactagaggataagttcatgactgcaagatggaggtgtgcaagtgtgcaacccatcttccggtatcgttcaccgggacgtttggcgtatagctctgctaccggtggtacgcttttcaacgggcgaatccaaacaaaatggcgtggacgaacgaggacgacgcgccgtggaaaaagatgccggaaaaccgattcaccccctccccaccaccgcgcgatgccgccatccatctgtcgcacggcgcggcggcaaagaaacgacggctcggccgctatccagcggaaggcgagaagcctcctctctcccccacgcgcgcgcgcgactgcctgtgctgccgtggcatgcacgagacgccacgagcccacgacgctggatgcgcgcgtgtggttgccggcacgggccatgtccgtgtccatgtcccgtcacgctcggctccacgtccgcgtacgtgtgtggactgtggaggcgagcgacgagcccccacggctagtgattgcatactgaattttctgagtgattggttcggctgctggaaggaaaaaaaaatgccatactgtggtccttgagactgagaactgaacctatatattcaaatctagagaaatattattta
